United States Patent Application Publication US 2011/0183924 A1 - sequence listing, part 41

SEQ ID NO: 98912 - DNA, 1467 bp, Homo sapiens
aattaggttatgtaattatggaggctaggaagtcccacactaggctgtctgcaagctagagacgtagtgatggtggtagcatgactcagtcgaagtccagaagcctcagaaccaggaaaactggtggtgtaactctcagactgagatagaaggcctgagaaccaaggggccacgggtgtaagtcctcgaatccaaaggcctgaaaccctggagttctgatgtccaagggcatgaaaataaagctgtctcagctcctggggtatggcgttaggcgtggggggaggaagttagtggagagagaattagctttttctcttttccttctgtccaggctcctagctgtttggattgtgcgtcaatcacattgtgggcaaatcttccccattcagtgtaatggctcacataccagtctctgaaaacaccctcacagacacattcagaaataatgttttaccagttgtctaggtattccttaatgcattcaagttgacactgaaaattaactgtcacagggcctgactttatttgtaacagacttcagagtattgtagaaaacagtagagcaatcagtaacagtggaggttcaacagttgccaggtcattccaatagataaccagaagcttaaagaaaggatcagggaggccaggcacggtggctcagtctgtaatcccagcactctgggaggccgagacgggcggatcacaaggtcaggagatcgagaccatcctggctaacacggtgaaactgcgtccctcctaaaaatacaaaaaaatagccaggcatggcagcgtgcacctgtagtcccactactcgagagtctgaggcaagaggatggtgtgaacccgggaggcggaacttgcagtgagccgagatcgcaccgctgcactccagcctaggcgacagagcgagactctgtctcaaaaagaaagaaaggatcagggaaagagacaacctagataaaactacagacatcccttgtgatcaggaagactgtgcatgctgaaggctgccatctcagaggactgaccagagcagaacttctaaactacaagttcctggccaaatgaagggcaaacttgtaaactccttaagtagtgaaagcagtcttcaagccatacattaattagtcaagccaagtcactaaaggaagatgatcagtatgcagagatctgtgttacctaaaatgtccagtttcaacacaaaaattgagatatgcaaagaaacagaaaagtatgtgtcctatatgacagagaaatgtaggaaatataaagttttgagggataccaaatttaggataaatgctaagcagctgttaaaaatgtatgttcaaaaggctgagtgcagtggttcatgccttggcctcccaaagtctgggattgtaggcatgagccaccatgcccagccagtaagacccgtctagaataagaggcacaaaataatacaagcctgccaaaaaacaacaccca

SEQ ID NO: 98913 - DNA, 2541 bp, Homo sapiens
aattaggttatgtaattatggaggctaggaagtcccacactaggctgtctgcaagctagagacgtagtgatggtggtagcatgactcagtcgaagtccagaagcctcagaaccaggaaaactggtggtgtaactctcagactgagatagaaggcctgagaaccaaggggccacgggtgtaagtcctcgaatccaaaggcctgaaaccctggagttctgatgtccaagggcatgaaaataaagctgtctcagctcctggggtatggcgttaggcgtggggggaggaagttagtggagagagaattagctttttctcttttccttctgtccaggctcctagctgtttggattgtgcgtcaatcacattgtgggcaaatcttccccattcagtgtaatggctcacataccagtctctgaaaacaccctcacagacacattcagaaataatgttttaccagttgtctaggtattccttaatgcattcaagttgacactgaaaattaactgtcacagggcctgactttatttgtaacagacttcagagtattgtagaaaacagtagagcaatcagtaacagtggaggttcaacagttgccaggtcattccaatagataaccagaagcttaaagaaaggatcagggaggccaggcacggtggctcagtctgtaatcccagcactctgggaggccgagacgggcggatcacaaggtcaggagatcgagaccatcctggctaacacggtgaaactgcgtccctcctaaaaatacaaaaaaatagccaggcatggcagcgtgcacctgtagtcccactactcgagagtctgaggcaagaggatggtgtgaacccgggaggcggaacttgcagtgagccgagatcgcaccgctgcactccagcctaggcgacagagcgagactctgtctcaaaaagaaagaaaggatcagggaaagagacaacctagataaaactacagacatcccttgtgatcaggaagactgtgcatgctgaaggctgccatctcagaggactgaccagagcagaacttctaaactacaagttcctggccaaatgaagggcaaacttgtaaactccttaagtagtgaaagcagtcttcaagccatacattaattagtcaagccaagtcactaaaggaagatgatcagtatgcagagatctgtgttacctaaaatgtccagtttcaacacaaaaattgagatatgcaaagaaacagaaaagtatgtgtcctatatgacagagaaatgtaggaaatataaagttttgagggataccaaatttaggataaatgctaagcagctgttaaaaatgtatgttcaaaaggctgagtgcagtggttcatgcctgtaatgccagcagtttgggaggctgaggtgggtggatcacttgaggccaggagtttgagaccagcctggccaaaatggtgaaaccccgtctctactaaaaataaattggccaagcgtggtgggcgcctgtagtcccagctactcaggaggctgaggcaggagaatcgcttgaactcaggaggcagaggttgcagtgagccgagattgcgccattgctgtccagcctgggaggcagcgagactccacctcaaaataaataagtaaacccaaagaactaaaggaagccagatgtgaagaattaaggaaagtattctaatgtctcaccaagtagagaacatagagatagaaattttttttaaagaactaaatgaaaattctggagttgaaaagtacaataactacaattttaaaagttactagaaaggctcaatactagatttgagatggcagaagaaagaatcagcaaacctgcagattgatagaggatatgcaatctgaaacaaaaagtttgaagaaaaagtgttcttcacactatgtacacaaaaattaactcaaaatggatcatagacctaaatacaagcaaaaactgtaaaacttacaaaaaatgtaagtatttgtgataattctctaggcaaagctttcatagctgtgacaccaaaaacaaaaaagtgcaatagataatttgttttaaaagacagcgtttttattacaggaggttgtaaaactagtctgttttatctgtttcagattaatctcaacttaatttcagtaatgaaaaatttgctctatatgccttcattctgcccatgctgttattgtcacaaactacatctttataataattatatgtccatcaacatagttttataattacgcagttttaaaaatcaggagggaagaacaagagttacgaacagatatacattgtcttgctgctccaaaatctgcaatgtaaaaggccccatgcacaagggcaatgtgctaattctgttggagtcatgagtgagaggcccagaggttgcacctcacttggctgctcactgggtcttggatgcagggttcaaccacttggccagtgggaatggtgtgctacgatctgctcctttattttattttttgctcaccacacgggaattgtgatgcacccttaaataaagcatttgtgttccaaattaaaaaaaaaa

SEQ ID NO: 98914 - DNA, 545 bp, Homo sapiens
cagactctttcaaaagatggaagagttccaaactcaaggccagccctactctgatactaaaaccagaaaaagacattataagaaaagaaaactacaggccagtagccttgaggaaaatggatgcaaaaatcctcaacagaatactggtgcaccaaatccaatagcacattaaaaggatcacataccatgaccaagtggaatttatgcctggggtgcaaggatggttcaacatatgaaaatcagtatgatacaccacattaactgactgaaggacaaaaatgacacagtcataccagttgatggaggaaaagttcagtaccagactttgacaaaattcagtgccctttcatgataaaaacactcaaactaggaatagaagaaaattatctcaacataataagggccatatatgaaaagcccacagcaaacaacatattcagtgatgaaaaactgaaagcttttcctgtaagatcagaaataaggcagtggcggtgtgtgctggctcatgcatataagtccagtgctttggaaggaggcctcagtgg

SEQ ID NO: 98915 - DNA, 677 bp, Homo sapiens
gactcagttgcaacgcatcttacaaaaatcctcaattctgatgaacatgcagtggtcatatcttctgccaagacgctatgtgaaactgtaaaggacttcgttgccaaagtagaaaagacgtatgacaaaaccttggaaaatgccgttgtagctgatgccgtggccagtaaatgttcagtcctaaacgagaagctcgaacaactgctgcaggctttgcacacagattcccaggctgcgcctgttctccctggcctcagccctctcattgtggaagaagatgctgtggaatcgtccagtgaagagtccctgggtgaaagcaaagagcagcttggggatgacgttacaaaaccttcctcccagaaagccgtcaaaccaagggaaatcatgttgcgggcaaatagtttaaagaaagcagtgaggcaagtcattgaggaagccggaaaagtcactggatgaaccgaaagaacaccgagtgaaccagcaaatcagccctctgatacatgacagcacagaaaacagacgaaatcgtaacggagcgaacgactaaaagcatgaacggcgcccacagagagccaaacaactgcccaaaaacgaaccaccaggcaacaaaaatgcccagagcaacggacaagagcccaagcaaccaaagagaaaacaggcaccaggaacagcgagag

SEQ ID NO: 98916 - DNA, 650 bp, Homo sapiens
tagtgatactaatgtaaacacacctgtgctgccagtcatagaagtatagcacatacagttatttacagcgtataataccgtcgtgcattgcttaatgatgggatgcattctgagaaatgccctgttaggtgatgtcattgttgtacaaacatcataaagggtacttacacagacctaggtggtatagcctcctattacccctacgctatatggtatggcctgttgctcctaggctacaaacttgtatggcatgttactataagagaatactatatactgaatactataagagtgattaacacaatggtaagtatttgtgtttctaaacatagtgaagcatagaaaaggtacagtaaaaatgcaatataaaagaaaaattggtacacctatattgggcacttgcgggactggaagttgctctgagtggtgactgaatatgaagggacattattgtacatcactgtagactttataaacacacttaggctacataaaaagtaaaactttaaaattcttaacttctgaatcttttgtaataacacttagcttaaaacacaaacacggcaacctgcccgggtccccttccacactgcggaagctttgtcctttcactcttcataatgaatccttctaccgctccaaaaaaaaaa

SEQ ID NO: 98917 - DNA, 961 bp, Homo sapiens
taagtgaagattgttttgatatcatcagcatctgctgcaaacttaaaccacttttgggactttcttttctcttttgtctctaccaaacttttagcatcattccctgattctaaatacattttccaccttctttttacatgtcttttacaaatttgagctttttttttaagttttaaaacttttataagttcagtgttgtcactgtatgtttacatattcattgatacaatttacatcgagatttttacttatccatttttgcagatatgtacacaaagatacatattcaataactgagaaacaagtgaaacttctgatctatactttcaggtttgttcgatcatgacacttctgataaggatcatggacataccagtttcacctcttccagaaggacgtcgtcattttatcttaagagtttactctgggttttattgccgaatacaaattccctcaatcgcttttttcttgcaggtgcctttttccataattttttcttataaccagcccttctcatccaaaggccacaatgaagtcgaagaaacctatagatgacagctttcacaatccttctcttgccttttcctgtactgacgtatgttagagatctggctggcagcttcaagacacttggaagcaagagggccactctattaaggatcgctgaagtatgcccacatgtcaggtttctctcagatgtggtaagtctgggagtggaggaaacaactggtgtctgaatatgactaaaacgtccagtggacaatgcagaaataagagaggcatttttgacacagttttggtaggctgaagatgccaaaatattcagaggccataagattcctgaagctgctctcactgcaccggcaaaggcagaggcagctatctcgtcatcctccaaatttgagctcttattaaagagttttctgcgtgctctgctatattttttcaaaaggtccctcca

SEQ ID NO: 98918 - DNA, 984 bp, Homo sapiens
taagtgaagattgttttgatatcatcagcatctgctgcaaacttaaaccacttttgggactttcttttctcttttgtctctaccaaacttttagcatcattccctgattctaaatacattttccaccttctttttacatgtcttttacaaatttgagctttttttttaagttttaaaacttttataagttcagtgttgtcactgtatgtttacatattcattgatacaatttacatcgagatttttacttatccatttttgcagatatgtacacaaagatacatattcaataactgagaaacaagtgaaacttctgatctatactttcaggtttgttcgatcatgacacttctgataaggatcatggacataccagtttcacctcttccagaaggacgtcgtcattttatcttaagagtttactctgggttttattgccgaatacaaattccctcaatcgcttttttcttgcaggtgcctttttccataattttttcttataaccagcccttctcatccaaaggccacaatgaagtcgaagaaacctatagatgacagctttcacaatccttctcttgccttttcctgtactgacgtatgttagagatctggctggcagcttcaagacacttggaagcaagagggccactctattaaggatcgctgaagtatgcccacatgtcaggtttctctcagatgtggtatcaaaacatcattatgggccgggcacggtggcttacgcctgtaatcccagcactttgggaggctgaggcaggcatatgaagaggtcaagagatcgagatcatcccggccaacatgaaataacaagaaagttagaaagtcttctgcctcccatcagaaaatgagctcaagtgttgtatccattgaaaatgacatctgatgctaatcatctctgagtgaaccctacatcttacagtaaattgcatattgcaataaaaagtgatctctcatggttcttgaatt

SEQ ID NO: 98919 - DNA, 282 bp, Homo sapiens
gaggaaggacgctgctgtggtttccaagatgggctgggggaaggggcgcgcagaagccggcccagcgctgtcgctcagcagctggggcaggaagcaggctgtgctgggagtctggcaggtggggatgaggctcacagagaggagaggccttcaacgccgggtcatccggtgtgcacacaatcaactctagccaggtggggtctgcccttgagactgggccccagaccaggcccagcccagcccactctgatcatctgaccaggccaggcacgtgccccaggc

SEQ ID NO: 98920 - DNA, 265 bp, Homo sapiens
tgggaagttctctaacttaaaaagtcacactgaagggtggagctaggatatggcagaatacaactcagacactgaagggctttatgtgaatcacccatcccttcagcttccagtgacctcagttcttttttttttttttttttctttgagacggagtttcactctatcgcccaggctggagtgcagtgatgtaatctcgcctcactgcagcctccgcctcccaggttcaagcgattattctgcctcagcctcatgaggagctggg

SEQ ID NO: 98921 - DNA, 517 bp, Homo sapiens
tttttttttttttttgagacggtgtcttgctctgtcgcccaggctagaatgcagtggtgctcactgtcagctccacctcccgggttcatgccattctcctgcctcagcctcccgagtagctgggactacaggcacctgccaccacgcccggctaatttttcgtatttttagtagagacagggtttcaccgtgttagccaggatggtctcgatctgcctgcctcgtgatctgcccgcctcggcctcccaaagtgctgggattacaggcatgagccaccacgcctggcctgtcactggtaatttttaatcatgatttttcttctctgtggtgcactaaggaatagaatgttgctttacagcttttcctcttaccttgttcctgaatgaatagtccaaggtatcttggaaaaacagagtataattaggctcctttctatgccttctttttctttgttcatttatacctagaaggcagtgttttaaagtgtggtccatggactacctgcatcagattcacc

SEQ ID NO: 98922 - DNA, 683 bp, Homo sapiens
agcactgaggctggtgagccaggcagaagtcagagtgggaggagccttgaggtctctccaggagattcagggaccataggatttggtagtgattcagctatagagtgaaaagatgacagtggccatatccagggtaatgtctacgggaatttgtgaatatccagatatccagataagagaggatgatggccctaactcgagtaccaaaattggatttcctcagatacttattcaggtgagaaatgattgagtcttgtcttggtgtcctgtagagagaaatgctgtcttctgggaccaccgccctgagcttgggggcccccactagcattcaggttcccgggagaaaatcctgaagaacgggggtcatgagcaggggacgtgtctgctatctgggtaagtgattgtgtgcaccataaacttaccacggacaacctgatcttcacgtttgtaggtcagtgaggttcctttccctgaacagtttaccatgtgatgcgtttatgggtattccggtaagaaagggtagtggctcctcgttctccttgccatgtaatcctattgttttctgtcttggagagaacgtatgaggtaagtaccctgtgagtgctgatggattggcacgtaaccagggaactccagtggcactgtgcatcacaggagtaactaaggtggatgtgcagagaaga

SEQ ID NO: 98923 - DNA, 399 bp, Homo sapiens
cctgaactctacaggctcctaaataaagaacctaaaattctgaataaaagaagtagagttggagcccagagacagagtgagctcagaacgcaagcttgacagcaagacaaacaaattcctcaaatgagactgccagccagtatttgggctataaagcatggccaatttgctttctcaggatggagaatataatccccagaagcattatcgagggcacttttgagtgcctgattccatgtctttgaacaaacaaagtcgccaactacagttcctctctcaagagcaaaacctgaaatttgtcaagaaatagtggacttttgctcttgttgcccaggctggagtgcaatggcgtgatctcggctcaccacaacctccgcttcccagattcaagtgattctc

SEQ ID NO: 98924 - DNA, 710 bp, Homo sapiens
atctgtatgggaggcccatatctgggctcaccagccctgccatctttgtcacagcctctgtccaggccaatgtgtcctccagctcagcttactccttcattcattttttcaggaaacattcaaggaccttcttccaagggcacaatactgagcaacatggacaaggtctggccctatggtaaagtcaggtctggatcatggaattgaatggggtgtgttgccaggcacccgcatgaggggctggctcctccccgtgaattctgggcacagacacccagacctgagcaggcccctcaccccacagcgactggggagccggagcccgagtccctcccacctgctccctcggtttctgagggtctgtctcatcctgcagctggacagacgtgatcttcagccccaagttacagacgcttagagaagctggagacttgcacaatgtctcagaggaaagagagccagaacctggacccgtgttgtaccccaaccaaaccctccatggtggaaggaataggagtgggaaggggaggaggagacatatggtccaggaggttccatatgtacccacacatggacctcaaagaggcccccacagcaagacagcaaatgacatccacagtcacagatcacggagtgatttcagatgaagatggtgctggcagtttccccatcagcgcaatggagtttgagcaaaggatctcactggagaa

SEQ ID NO: 98925 - DNA, 443 bp, Homo sapiens
acccctgagaaggtagtaggaatcccattgagaagggacaggaacctggacaaggtgaaggcactggggttggaggtgggggctcgggactccaggtactgagggcagtctagggcgtggtggagagtttgccatggaagtaagcaggagggagtctgctcttaaccacaaaagttgatgttctgcagggctctgttctaggcagtttgctttgtttagactcttctgaaacaaccatgtctgctcccatggcttcagttatcatcggataacagtgcctaccaaacctttatctctagcccagatctcccaggtcccaggcctgtgtctccagctgtgtcccctgtgcagttttacccagttatgacacagacaccccagactcaacttgctctacctacttcctgccccaacactgaccttcctgcagcttccctcaccct

SEQ ID NO: 98926 - DNA, 708 bp, Homo sapiens
  misc_feature (18)..(18): n is a, c, g, or t
  misc_feature (39)..(39): n is a, c, g, or t
ccggttaagctagagggnacagtggctgcctatcttcanataaaataaaaatcaaaaggaactttccaccatttcattgaacctgtgagtgaaaatgatcccaaaagttagagaaaacaaagaacaaatcgggcagcccttagaaccaaaacagttctgaggagctcccaggctgcaatgtggtgcgaaatgttttatggacagaaaatggaaatgaggtgcagaaattggagacggaggtttgctcttgttgtccaggctggagtgaaatggcgtgatctcggctcactgcatcctctgcctcagcctcccgagtagctggaattacaggcaccctccaccatgcccagctaatttttgtattttcagtagagacagggtttcaccatgttggccaggctggtcttaaactcctaacctcaggtgatccgcccacgtcggcctcccaaagtgctgggattacaggcgtgaaccaccgggcccagccaagtgttttaatttttaaaaactatttgaccatatgaaaatatagatgttccattaaatatatatagcctaagaaatataatcagcaatgcagtaaaagattatgtatacggatgctcctgacagttggatttacaatagggaaaagctggaaacaacctaaatatttgaaaaaagagaatggtaaatacatcaaaaatacaataaatacagtgttaagtg

SEQ ID NO: 98927 - DNA, 422 bp, Homo sapiens
gcgagggaaaaggtttttcagttcctcaaggtattgaaaagttgaatatgaaattgaagttagttgtatgagaaaactgagatatagaatgattacgtgactagcccaaggtcacacaactaataagttcaagacagtggagaaaggatttcagagttgatactttacccataagccttaaccacgatactgtgtatcatgatttgaaccacccaactactcagtgaagttagtgatactgttctctttttacagaggaaattgaggttcatcatgcttaagaaacttattcagggtagcaaacctagcaagtgttagaagtaggattccagctaaaatgtatctaattctaaaacctctattctttacattctaccaccctggctcttcaaaatttataatacaatttttggtgaaagggt

SEQ ID NO: 98928 - DNA, 242 bp, Homo sapiens
gttttgtttgtaccctagtggcacctagaaagccagcgagacagaaccgttcactcttccggaaagggggctgaaaccagggagccgagtggtattgctcagcggatctcactcccatgaagcccaacaagctaagatccactggcttgaaactctcactgccagcacagcagtctgaagtcaacctgatccaaggctgaattctgcagtttttggcttcattccaacttgaatttatatag

SEQ ID NO: 98929 - DNA, 492 bp, Homo sapiens
acccacttcctcttgtctgctagctcatggcctgtcctctgcactttgtgttactgtggagatgaagaatttgctcctattccatttatactacctcatgaacggggggcaggtgtggattcttgctggttctcagtggaagggtctggaaaggctggtttccttttcagtagaggaaggagagtagcgcacgaataggaagatggttctcttattattattattcaagttaggatatgtgtcctgaatgatgaggtgcatgtgctgtatcccttattccccttgactagagactgcatgaggtcctattgaacagggatgagttccagacaactttgcctcacccggcccatggcccaagaacccctggtttttggttggtcactatgttcagttattaggagctcaaaggagaagggccagggatgggctccttgtcccactacctattgtatcatgaccagcagctgtgaaaatccctagacacctccc

SEQ ID NO: 98930 - DNA, 397 bp, Homo sapiens
gtccctttggcagcgtgtgtgggaaggactagaggctccgaggaggctggagcagctctgagtaggcgaggccggcactcaggccccagcagtggaaaaggaacagagtcagggggactagaggaggctggatggaggggaaggcagggtcaaagccaacaaaagcatgttatataagacccaacagagagacagcatcatccccagacacttcgcccccaggggctgacccggaccttggctaagggcagcggcccaggcccaggcactgcttccggccagcctggtctctctgcaaagtccaggggagcaaagaggaagccacacagcagggtgaggggtggcagaaggtggaacccctccatcccttcactcttggcatctacagccacttccc

SEQ ID NO: 98931 - DNA, 317 bp, Homo sapiens
tggatgccaagaggctgcccaagccctccaaggtcaccctccctagagcattccagttaagactggactgggctcgtactgccgggtcaggagacttgatttcaggaaacaaagtccaactctgggcaggagagggtagaaaagtcaaagggcaagagcctagagacacttctacttctcaccacattaaaaaagacacattttgttttcatacatcatcatttgtgggggaaaaaatgtttaaaatctcacccctataaacaagaccctgtcaagctctgattggagaaatggaaatacatgcaacctttccagaa

SEQ ID NO: 98932 - DNA, 525 bp, Homo sapiens
ttttttttttttagatggagtctcactctgtcacccaggctggagtgcagtggcacgatctcgactcactgcaacctccgcctcccgggttcaagcgattctcctgcctcagcctccagagtagctgggattacagacgctggcaaccacggccggctaatttttgtatttttagaagagatggggtttcaccatgttggccaggctcctgacctcaggcgatccacccgcctgggcctcccagagtgctgggattacaggcatgagccaccacgcccagtcccaataaatcctactcttctaactggccttgcttcaattccgccacccagcggctaagtttctagctagagtttgcatttatttagtgaactcaatgtgctgggtgctctgaacactcacctgctgggttgtatatttaatcctacaacaactcagtagtgatagatagtattatccctgctctgccgatcagggagctgagtctaatcagctggtgagtatgtgatccaaccctagccatac

SEQ ID NO: 98933 - DNA, 892 bp, Homo sapiens
ggcagatgaatgaaaaagcacagtgcagttcattcatacaacggaagactattcagccataaaaatgcaggcacttctggccggtgccgtggctcacgcctgtaatctcagcatcttggaagaccgaggtgggcggatcacccgaggtcaggaattcgagaccagcctggccatcttggtgaaaccctgtctctactgaatatgcacaaaattagacgagcgtggtggcgcgtgcctatactcccagctactcgggaggctgagcacaagaatcgctggaacccgggaggcggaggttgcagtgagcccagattgtgccactgcactccagcctgtgtgacagagtgagactccatgtaaacacaaaacaaaacagaaccaaaaaaataaataaataaataataaaaaaccgaaaaagccaggcaggcacttctgacacaggctgcaacatggatgaaccttgaagacattatcgccagtgaaacaaataaatcccaaaaggataaacacgaccagcctccgtggctcgcacctgtaaacccagcactttgagaggccgaggcaggcgtatcacttcaggtcagcagttcgagaccagcctggccaatatggtgaaacctcgtttctattaaaactacaaaaattagctgggcgtggtggcgcacgcctgtaaccccagctacacgggagactgagacacaagaatcgcttggacccacgatgtggaggttgcagtcagccgagaccatgccgctgcactccagcctgggtgacagagaaagactgtctccaaaacaaagaaacaaagaaaattaaacacggtatgattccccttctatcaagtgtctagagtagttaaactcatagagttgcaaaatagaacggtggcccc

SEQ ID NO: 98934 - DNA, 373 bp, Homo sapiens
caggatatgcatttaattgtcatatctccccagtgatttgtgacaatttctcaactcttgtttttcatgacttttagagtcttaagaaagtactggctgggcacggtggctcacacctgtaatcccaatactttgggagaccaaggtgagtggatcacctgaaaggtcaggagtttgagaacagcttggccaatgtggtgaaaccccatctctattaaaaatacaaaattagctggtcatggtggcgggggcctgtaatcccagcttcttgggaagctgaggcagaagaattgcttaaacccggaaggtggaggttgcagggagctgagatcgcaccattgcactccagcctgggcaacaagagcaaaactcc

SEQ ID NO: 98935 - DNA, 535 bp, Homo sapiens
ctttacttaaaatctctctcaatgacttcctaccatcctattaatgatctgatttctactgacctctccaaacatacctccaccagctttgtcctagtaaagctccagccacatggcctcctccagatcttgcaacatgccaagttttttccacctcagaacctttatacatgctgttcattctggctagcacattcttcccttcactttgtgtatgcctgcttccttttcttccttcagtttcaatgtaatacctcttgaaatagactttccttggacaccatatctaaactgaactctcaatctgtattcctgtttttctctattacccattcactgatctttccttctttgttcttcagcatattcccaatagatagagccatgtctggcatacagtagaaagactaaaaatgatttaggaaggaagcaaaaaggcagggaagctgtctataggtgtaatatatgcagactattttgatgtgaacacaaggttcttattttctctaaatttcaccttcaacagcctaacacc

SEQ ID NO: 98936 - DNA, 321 bp, Homo sapiens
aataattcaagaatttattttgtaaaatcagaggtaaccagtaacagtaaaataatgtgtaaccaccaaatgagtaaagggggcggggtggaatggtataattaaaaaaacaaaatcttttcccaaaaggcaaatatgagactattttaaaagaacaagaaacaggtgtcatctatagaatagtaaataacaaaacatagaaatatatacaaatatattgcagtgacagtaaatgtaaataaactgtttcaatttgaagacagtaattttcaggttaaaaaataccacttctccttagagacatacatataagaattcagg

SEQ ID NO: 98937 - DNA, 673 bp, Homo sapiens
ctatacttatcacttttagtgctgacattccaactggagaaatgagacataagcaaaagaaaaacaaaaaatagttcaaagcaatgccaaataagcggtgcaaataataaaccctccagaaaagaagagtttgctgtgagttagcatgatttggaaaacgtcaattcacatatgattcaagaattggactagatgttaggtatttaagtcaggtatgttgtatttcagtgcaagggcaggaaatagtatagcttttgattagagcttaatgttagccacatctgtcaatttatgtaatatacatatgttattgtgtctaaaatggctaaggtagtaatcccgttttatgtgccaatcacatctacaaagggccattctgtttgtggcacagcatttcaagaaagattggcagatttgttaactggaccagagaaaggtgaccaagatgtatgagtcttagaaaccatggctcaggaggattggatgaaggatttggtagtatttgactggaaaataggaaggagagtactggaaaataggaaggagagtacctgggtacatgacaactatctcccgtgtaatagacctagaaaagatagatagcagtgtgggctgttcttaaaatttataaccactgctattaagtaggctgccctgcagttctaccataggt

SEQ ID NO: 98938 - DNA, 559 bp, Homo sapiens
ttattgcagcactattcacagcggtcaagattgggaagcaacctaagtgtccatcaacagacaaatggataaagaaaatgtgatacctatacacagtggaataccattcagccataaaaaagaatgagatcctgtcatttgcaaatgtgggtggaactggaggtcactatattaaacgaaatgaaacaggcccagagaaacaaacttcacatgttttcttttatttgtgattgctaaaaactgaaacaaaggaacctatgagttttatagattccctatctaaagataaagagtagaatcaaccttcccaggaaacataatcaggctttggcaggggagtggggactggttaaatgggtataaaaatatagttagctagaatatatacaatctagtatttgatagtgcaacagggtaactataatcaacaatagtttattatacattgaaaaataactaagagtctaattgcattgtttgtaacacgcagtaagggtaaatgcttgaggtgatggagaacccatttaccttgatgtgattattgttcgtggtgtgcctg

SEQ ID NO: 98939 - DNA, 491 bp, Homo sapiens
ttcttctcctaattatgtctccttacgttaccaaaaaccacccaataaatatttacattcactggaagatgtgtgactgtgcacaggatttttaaaaattaactaatttaacaggtgactggcattgatctgagacatgtttttccaccactcaccccattcccaatgcctttgctgaccttagaaagttacttcccttctctattcatttccctatcaaaatccacactaaggctcagcgaggcaaattgaatgacacaagtgggttcactttataaaccacccccacataaaaacatgagaagctaaatatatgtaaaatgccagcctaattctggcctataatcaagattttgtaatttaatgattttttttttataacaagataaaatctccctgttggtttgcttcctaaacagagcaccaatcccattgtctagcccatcatcctccaaaaaaggaccttggagaaataagatctgaagttctgt

SEQ ID NO: 98940 - DNA, 165 bp, Homo sapiens
agtgccaggtaccagtgtcctttccctggtgcagcagtgaggcaggaagctgatggttgggtccccagcccaccacgctggagctctgaggctcctcactcaccctccttagactcatcattgtctcaacccaaagagagacccgagccacctcgtgcacccact

SEQ ID NO: 98941 - DNA, 783 bp, Homo sapiens
gaaactcagtagctataaaggaaaagatagatgtgctagttacttattaattaacgaactactacaacttaatgttgtaaaacaacttttaatattatcacttccttcgtttttcataaataacatctttaactgagaatatgtttattaacctaatatcatttcaaaataaaatgttatacttaatctcaaaaacaaattcctagaaagccgttttcaaaaaatgtataaaatagacctatttatcatgacaccttcaggtgtgtaatttgatttgccatgaatgtatacattaatttttaaataattttacatttaacatttgggatgtggaatggatttattttgtatctaagtacatgaattaagtaataaacagtaattattggcaggagcgtctagagtttaaaattgtgtttctttacaatatttcattttttaaaatatatttttccatattaatctgtgaaaaaatatattaatgaaaaactgacgcaaaggaaatattttaaaataatattttttatttcagttatacaaatacttggctagatatagtttttattttgacatgttagaaggatagttttgaggtaaaagtaattctttattaaatatttttttcttccatttttgttttgttttgtatttttgagttggggtcttgctctgttgcgcaggctgaggcaggagaatcacttgaacctgggaggcggaggttgtggtgagccaagatcgcgccactgcactccagcctgggcgacagagcgagacactgtctca

SEQ ID NO: 98942 - DNA, 490 bp, Homo sapiens
  misc_feature (444)..(444): n is a, c, g, or t
  misc_feature (452)..(452): n is a, c, g, or t
  misc_feature (454)..(454): n is a, c, g, or t
tgatgagtaaatcttggcttctttataaactggtcttaaggtcactctgtgaagagtggctacaagccaagatggctgctttttagaagagccctgatgggcaggccgtcaggttcctgtgtgtcagtcaggtgagatacaatgacaaaaatgagaaggtgaaaccaaacgcatgaaacagaagaaatttattacttacagatctgacagcttaggggtactgatggggagcgcagataagtctggaggtggcagggagctcagcagtgggtagggagtgagagagcagctatgggagaatctaagtgaatgactagattgtaaaagtagtttgggtataaattgcagaggcctgtgaatgtcatactgaacacactcttcaggcatatgagacgagagcatgacacccatgcttgcacttggcgtgctgggacactgtgcaantagcctgncnagattactcatcggtacagagctcgattctaatctt

SEQ ID NO: 98943 - DNA, 148 bp, Homo sapiens
ctcaggcccctgccatatgaaacgcctgttttctctttgctttctaccatgattataaacttcctgaggcctccaaggagcagatgccagcaccatatatcctgtaaagcctgcagaatcatgacccaattaaacttcttttctttat

SEQ ID NO: 98944 - DNA, 431 bp, Homo sapiens
tcaattcagaattagtaactattatcttcctaataaactatttcagaatgttttttagatatttagaactgttgcaaaaatagaacagacagtttctatataccttagaccaaagttcctccattattaatgccttacattagcatggtacatttgtcacaattaatggaacaatattgatatagtattactaactaaagtctgtattttcagatttccttagtattttacctaaggcccttttgttaatgccagggccccatccttaccatatgatattagctgttacatctcctaggcaactcttggctgtggcagttgtaactatcaatttctgaacacttactctttgccaggcacactgggcttcttatgtgttagcttccaatcaccacagaaatcagagttgtgcattattactgcatttttca

SEQ ID NO: 98945 - DNA, 730 bp, Homo sapiens
cacgctcggataaatttttgtatttttagtagagacggggtttcaccatgttagccaggatggtcttgatctcctttcctcatgatccgcccgccttggcctcccaaagtgctgggattacaggcgggtagtaattttaaatgttacagccatatagaaatagtatagaaagtaggccagcatcatcctgaaaccaaagcctggcagacagacaacaaaaaagagaattttagaccaatatccctgatgaacatcaatgcaaaaatcctcaataaaatactggcaaaccgaatccagcagcacatcaaaaagcttatccaccatgatcaagtgagcttcatccctgggatgcaaggctggttcaacatacacaaatcaataaacataatccagcatataaaccgaaccaatgacaaaaaccacatgattatctcaatagatgcacagaaggcctttgacaaaattcaacactccttcatgctaaaaactctcaataaattaggtattgatgggatgtatctcaaaataataagagctatctatgacaaacccacagccaatatcatactgaatgggcaaaaactggaagcattccctttgaaaactggcacaagacagggatgccctctctcaccactcctattcaacatagtgttggaagttctggccagggcaatcaggcaagagaaggaaataaagggtattcaattaggaaaagaggaagtcaaat

SEQ ID NO: 98946 - DNA, 345 bp, Homo sapiens
ggttttgtagaaattactaaaaatgattttttgactaaagtctccaatctgccaggcactgtgccagcagtttggagaagagcaaggcatcttggccccagaggacttcaaagagagtgggagaggctggtggctatttatagtccttttggtcacttttagagggccttagaaagtaagacaagggcgtgagccattctgtgggaggcagaaggtgaccttgatcttattggcaagcaggagttttccctctaaaggggaggcagggcatttgagagagagaacagcaagtgcaatgataagtagctcagcttgtgaaaaagcaaagcaactattaactacagg

SEQ ID NO: 98947 - DNA, 356 bp, Homo sapiens
ttggaaatctctttcgcatccctcctcaatcctattcatttcccttgcttctcagaggaaaaacgatttggatcttggtgtgtgtcgtgccctttaatttggaagtatttttgcaggaaagaaagtttattcatgcaacccttaactcttttgcaatcacaaaaagagagagagagagagagagagagggctgggcacagtggctcatgcctgtaaccccagcactttgggaggccaaggtagaagaatcccttgagcccaagagtgagaccagcctaggcaaaatgatgacacccctgtttatacaaaaataaaaataaaaataaaaaaaatcacacctggccaacatggtgaaa

SEQ ID NO: 98948 - DNA, 323 bp, Homo sapiens
gtttgaggccggctgggcaacatagacaccatctctttaaacaaacaaacatcattagtttctacattctacaaggtgaaagactaattagaagtgaaaaataccactgaaatgttggtgtacaaatggcagcataatttgatttacactagattttacacatttgtgtctatttcaaataggtacttttacatttttcttaactgcatctgacacagagtgaatcacagatatatgttggtgtcgaaagcagaggttactattattaaacgaaattttgtgttttgaagttattttgttttgtttttttgagacaagatgtc

SEQ ID NO: 98949 - DNA, 319 bp, Homo sapiens
catcccatttgcacccagcaccatatgcgtctcgctcactgtctgcttcctccactacggcagaatctgcctggggacaggaatgtctgtctgctttcagtgatgtatgtcactgacgtgtatcccaagtctagaacgctgcctggcccacaagggaaattcaatatgccttttttaaaatgaatgaatacatgaagaatgaataaatgaaacccatgccacctcccagatcccatctcagggagagccacatcacctactcagcagccttgtcctaaatcctccctcttcctccccctgccctgaactgcccatcagt

SEQ ID NO: 98950 - DNA, 461 bp, Homo sapiens
gtaagtcagccctattcacctgggaggaaactagacaaggatgtgaatactaggaagttagattcattcaggggcatcctggaggccagcgccaaaatgataatgatgatgattatgattatcagtattacttctttggttccttcagacccacttatcttttctcatttctccaaggattttctttttcccaagatatggctttttgagattgcctagcctcgctttttgagattggcagagattttggagaaaggtattaagaataatctagctacattttttccatgaataaacagctaaatttgtccatctacaccttcctatcctaacgtagacctaaaactgtaagaatgcttgttttggtagtgaaagtgtgaaacattttctatttgctggactaagaaaagcaaaattctctaatttaggaaaaaaggttatgtgccccaatgtctagtttc

SEQ ID NO: 98951 - DNA, 1091 bp, Homo sapiens
  misc_feature (76)..(76): n is a, c, g, or t
  misc_feature (87)..(89): n is a, c, g, or t
ggaggaggcgcacgaatgatgtcataggcgatgaccgggttgttatttcatcacgagggcgcttctggaggaacgncgcgatggctnnncggagagccccaggtccagttcaaacttgtattggttggtgatggtggtactggaaaaacgaccttcgtgaaacgtcatttgactggtgaatttgagaagaagtatgtagccaccttgggtgttgaggttcatcccctagtgttccacaccaacagaggacctattaagttcaatgtatgggacacagccggccaggagaaattcggtggactgagagatggctattatatccaagcccagtgtgccatcataatgtttgatgtaacatcgagagttacttacaagaatgtgcctaactggcatagagatctggtacgagtgtgtgaaaacatccccattgtgttgtgtggcaacaaagtggatattaaggacaggaaagtgaaggcgaaatccattgtcttccaccgaaagaagaatcttcagtactacgacatttctgccaaaagtaactacaactttgaaaagcccttcctctggcttgctaggaagctcattggagaccctaacttggaatttgttgccatgcctgctctcgccccaccagaagttgtcatggacccagctttggcagcacagtatgagcacgacttagaggttgctcagacaactgctctcccggatgaggatgatgacctgtgagaatgaagctggagcccagcgtcagaagtctagttttataggcagctgtcctgtgatgtcagcggtgcagcgtgtgtgccacctcattattatctagctaagcggaacatgtgcttcatctgtgggatgctgaaggagatgagtgggcttcggagtgaatgtggcagtttaaaaaataacttcattgtttggacctgcatatttagctgttttgctgatccttgatccaatttagactgtgcccctcaacatacgggaaactggtggctgctccaccctcgtaaaacaaaatcgtttccttaaaaaaacggttttggggaaaaaagctccacttagtcctatacttttcaacaaagttatat

SEQ ID NO: 98952 - DNA, 748 bp, Homo sapiens
aaattagagctaagtagagccggtgtttgcgcttcgacatctttccacgcctcagtcggacgggcgcggagacgcttctggaaggaacgccgcgatggctgcgcagggagagccccaggtccagttcaaacttgtattggttggtgatggtggtactggaaaaacgaccttcgtgaaacgtcatttgactggtgaatttgagaagaagtatgtagccaccttgggtgttgaggttcatcccctagtgttccacaccaacagaggacctattaagttcaatgtatgggacacagccggccaggagaaattcggtggactgagagatggctattatatccaagcccagtgtgccatcataatgtttgatgtaacatcgagagttacttacaagaatgtgcctaactggcatagagatctggtacgagtgtgtgaaaacatccccattgtgttgtgtggcaacaaagtggatattaaggacaggaaagtgaaggcgaaatccattgtcttccaccgaaagaagaatcttcaggtgcctaactggcatagagatctggtacgagtgtgtgaaaacatacacattgtgttgtgtgcgcacaaagtggataattaaggacaggaacagtgacaggcgaaatccattgtatacaccgaaagaagatcttcacgtatacacattctgcaaaagtactaaactttgaaagcccttctacaagcagagaagacgtgtgtcaggtctgtcccgtccatc

SEQ ID NO: 98953 - DNA, 294 bp, Homo sapiens
gcggccgcctactactactactgctcgaattcaagcttctaacgatgtaaacatgtgcttcatctgtgggatgctgaaggagatgagtgggcttcggagtgaatgtggcagtttaaaaaataacttcattgtttggacctgcatatttagctgttttggaacgcagttgattccttgagtttcatatataagactgctgcagtcacatcacaatattcagtggtgaaatcttgtttgttactgtcattcccattccttttcgtttagaatcagaataaagttgtatttcaaata

SEQ ID NO: 98954 - DNA, 2534 bp, Homo sapiens
ccgccccgcgccggccccgcccctgctctcgcgccggcgtcggctgcgtctccggcgtttgaattgcgcttccgccatctttccagcctcagtcggacgggcgcggagacgcttctggaaggaacgccgcgatggctgcgcagggagagccccaggtccagttcaaacttgtattggttggtgatggtggtactggaaaaacgaccttcgtgaaacgtcatttgactggtgaatttgagaagaagtatgtagccaccttgggtgttgaggttcatcccctagtgttccacaccaacagaggacctattaagttcaatgtatgggacacagccggccaggagaaattcggtggactgagagatggctattatatccaagcccagtgtgccatcataatgtttgatgtaacatcgagagttacttacaagaatgtgcctaactggcatagagatctggtacgagtgtgtgaaaacatccccattgtgttgtgtggcaacaaagtggatattaaggacaggaaagtgaaggcgaaatccattgtcttccaccgaaagaagaatcttcagtactacgacatttctgccaaaagtaactacaactttgaaaagcccttcctctggcttgctaggaagctcattggagaccctaacttggaatttgttgccatgcctgctctcgccccaccagaagttgtcatggacccagctttggcagcacagtatgagcacgacttagaggttgctcagacaactgctctcccggatgaggatgatgacctgtgagaatgaagctggagcccagcgtcagaagtctagttttataggcagctgtcctgtgatgtcagcggtgcagcgtgtgtgccacctcattattatctagctaagcggaacatgtgcttcatctgtgggatgctgaaggagatgagtgggcttcggagtgaatgtggcagtttaaaaaataacttcattgtttggacctgcatatttagctgttttggaacgcagttgattccttgagtttcatatataagactgctgcagtcacatcacaatattcagtggtgaaatcttgtttgttactgtcattcccattccttttcgtttagaatcagaataaagttgtatttcaaatatctaagcaagtgaactcatcccttgtttataaatagcatttggaaaccactaaagtagggaagttttatgccatgttaatatttgaattgccttgcttttatcacttaatttgaaatctattgggttaatttctccctatgtttatttttgtacatttgagccatgtcacacaaactgatgatgacaggtcagcagtattctatttggttagaagggttacatggtgtaaatattagtgcagttaagctaaagcagtgtttgctccaccttcatattggctaggtagggtcacctagggaagcacttgctcaaaatctgtgacctgtcagaataaaaatgtggtttgtacatatcaaatagatattttaagggtaatattttcttttatggcaaaagtaatcatgttttaatgtagaacctcaaacaggatggaacatcagtggatggcaggaggttgggaattcttgctgttaaaaataattacaaattttgcacttttttgtttgaatgttagatgcttagtgtgaagttgatacgcaaggaaaatggtccatgtttacccacagttttcaggtactcctagactttaaagatgtcttgaacatttaagttcttcagcagttcacactacaccgtttttttgtttttttttcccccccgggagggtttttttgtagggcagcacagcagagcaggacatggatgaaatactaggaatatgcacagtggggcagtgtgggggcttctcagtaatggagaacagttggtgaaacttttttttttttttaactaagcatttaatttatcttgcatattttccacatttaaaaatgaattaggtctattaggataattaggagtttgatcccatcaacactattcttgtagcagttaggaatcttgagctatttttttctcatacgattactatagtccagtttaccaaagttttctttagatgtctgataatcttgagatgattgcttaccttaaaaggtatagaaaggatcacttaaatatatggaaaaatgaaataagggtgaagctgaataaagttctacttactgtattaactggcaacagttgagtttcttaagatctgaattgctgtgtatgttacgctgtattcagaaccagtttctaaccagcctgtgagatgggaagttttttccccataattgggatgaaacctttcattcaggtattttgaattgaaggtgtatgtgttgtttgtaaccttgtggagattgcaagtggtgttgacattctggatcttctatgtaacagttgaaatttggaagtgacgtcacttacctgtctaacgtggtgtgggagagaatttacaagtcctttattgaaagaataattgttgcaaaatatattgcttctactttgcctgga

SEQ ID NO: 98955 - DNA, 2534 bp, Homo sapiens
gaccagctgcctgagtagctgggactacaggcgccggcgtcggctgcgtctccggcgtttgaattgcgcttccgccatctttccagcctcagtcggacgggcgcggagacgcttctggaaggaacgccgcgatggctgcgcagggagagccccaggtccagttcaaacttgtattggttggtgatggtggtactggaaaaacgaccttcgtgaaacgtcatttgactggtgaatttgagaagaagtatgtagccaccttgggtgttgaggttcatcccctagtgttccacaccaacagaggacctattaagttcaatgtatgggacacagccggccaggagaaattcggtggactgagagatggctattatatccaagcccagtgtgccatcataatgtttgatgtaacatcgagagttacttacaagaatgtgcctaactggcatagagatctggtacgagtgtgtgaaaacatccccattgtgttgtgtggcaacaaagtggatattaaggacaggaaagtgaaggcgaaatccattgtcttccaccgaaagaagaatcttcagtactacgacatttctgccaaaagtaactacaactttgaaaagcccttcctctggcttgctaggaagctcattggagaccctaacttggaatttgttgccatgcctgctctcgccccaccagaagttgtcatggacccagctttggcagcacagtatgagcacgacttagaggttgctcagacaactgctctcccggatgaggatgatgacctgtgagaatgaagctggagcccagcgtcagaagtctagttttataggcagctgtcctgtgatgtcagcggtgcagcgtgtgtgccacctcattattatctagctaagcggaacatgtgcttcatctgtgggatgctgaaggagatgagtgggcttcggagtgaatgtggcagtttaaaaaataacttcattgtttggacctgcatatttagctgttttggaacgcagttgattccttgagtttcatatataagactgctgcagtcacatcacaatattcagtggtgaaatcttgtttgttactgtcattcccattccttttcgtttagaatcagaataaagttgtatttcaaatatctaagcaagtgaactcatcccttgtttataaatagcatttggaaaccactaaagtagggaagttttatgccatgttaatatttgaattgccttgcttttatcacttaatttgaaatctattgggttaatttctccctatgtttatttttgtacatttgagccatgtcacacaaactgatgatgacaggtcagcagtattctatttggttagaagggttacatggtgtaaatattagtgcagttaagctaaagcagtgtttgctccaccttcatattggctaggtagggtcacctagggaagcacttgctcaaaatctgtgacctgtcagaataaaaatgtggtttgtacatatcaaatagatattttaagggtaatattttcttttatggcaaaagtaatcatgttttaatgtagaacctcaaacaggatggaacatcagtggatggcaggaggttgggaattcttgctgttaaaaataattacaaattttgcacttttttgtttgaatgttagatgcttagtgtgaagttgatacgcaaggaaaatggtccatgtttacccacagttttcaggtactcctagactttaaagatgtcttgaacatttaagttcttcagcagttcacactacaccgtttttttgtttttttttcccccccgggagggtttttttgtagggcagcacagcagagcaggacatggatgaaatactaggaatatgcacagtggggcagtgtgggggcttctcagtaatggagaacagttggtgaaacttttttttttttttaactaagcatttaatttatcttgcatattttccacatttaaaaatgaattaggtctattaggataattaggagtttgatcccatcaacactattcttgtagcagttaggaatcttgagctatttttttctcatacgattactatagtccagtttaccaaagttttctttagatgtctgataatcttgagatgattgcttaccttaaaaggtatagaaaggatcacttaaatatatggaaaaatgaaataagggtgaagctgaataaagttctacttactgtattaactggcaacagttgagtttcttaagatctgaattgctgtgtatgttacgctgtattcagaaccagtttctaaccagcctgtgagatgggaagttttttccccataattgggatgaaacctttcattcaggtattttgaattgaaggtgtatgtgttgtttgtaaccttgtggagattgcaagtggtgttgacattctggatcttctatgtaacagttgaaatttggaagtgacgtcacttacctgtctaacgtggtgtgggagagaatttacaagtcctttattgaaagaataattgttgcaaaatatattgcttctactttgcctgga

SEQ ID NO: 98956 - DNA, 2159 bp, Homo sapiens
ccgccccgcgccggccccgcccctgctctcgcgccggcgtcggctgcgtctccggcgtttgaattgcgcttccgccatctttccagcctcagtcggacgggcgcggagacgcttctggaaggaacgccgcgatggctgcgcagggagagccccaggtccagttcaaacttgtattggttggtgatggtggtactggaaaaacgaccttcgtgaaacgtcatttgactggtgaatttgagaagaagtatgtagccaccttgggtgttgaggttcatcccctagtgttccacaccaacagaggacctattaagttcaatgtatgggacacagccggccaggagaaattcggtggactgagagatggctattatatccaagcccagtgtgccatcataatgtttgatgtaacatcgagagttacttacaagaatgtgcctaactggcatagagatctggtacgagtgtgtgaaaacatccccattgtgttgtgtggcaacaaagtggatattaaggacaggaaagtgaaggcgaaatccattgtcttccaccgaaagaagaatcttcagtactacgacatttctgccaaaagtaactacaactttgaaaagcccttcctctggcttgctaggaagctcattggagaccctaacttggaatttgttgccatgcctgctctcgccccaccagaagttgtcatggacccagctttggcagcacagtatgagcacgacttagaggttgctcagacaactgctctcccggatgaggatgatgacctgtgagaatgaagctggagcccagcgtcagaagtctagttttataggcagctgtcctgtgatgtcagcggtgcagcgtgtgtgccacctcattattatctagctaagcggaacatgtgcttcatctgtgggatgctgaaggagatgagtgggcttcggagtgaatgtggcagtttaaaaaataacttcattgtttggacctgcatatttagctgttttggaacgcagttgattccttgagtttcatatataagactgctgcagtcacatcacaatattcagtggtgaaatcttgtttgttactgtcattcccattccttttcgtttagaatcagaataaagttgtatttcaaatatctaagcaagtgaactcatcccttgtttataaatagcatttggaaaccactaaagtagggaagttttatgccatgttaatatttgaattgccttgcttttatcacttaatttgaaatctattgggttaatttctccctatgtttatttttgtacatttgagccatgtcacacaaactgatgatgacaggtcagcagtattctatttggttagaagggttacatggtgtaaatattagtgcagttaagctaaagcagtgtttgctccaccttcatattggctaggtagggtcacctagggaagcacttgctcaaaatctgtgacctgtcagaataaaaatgtggtttgtacatatcaaatagatattttaagggtaatattttcttttatggcaaaagtaatcatgttttaatgtagaacctcaaacaggatggaacatcagtggatggcaggaggttgggaattcttgctgttaaaaataattacaaattttgcacttttttgtttgaatgttagatgcttagtgtgaagttgatacgcaaggaaaatggtccatgtttacccacagttttcaggtactcctagactttaaagatgtcttgaacatttaagttcttcagcagttcacactacaccgtttttttgtttttttttcccccccgggagggtttttttgtagggcagcacagcagagcaggacatggatgaaatactaggaatatgcacagtggggcagtgtgggggcttctcagtaatggagaacagttggtgaaacttttttttttttttaactaagcatttaatttatcttgcatattttccacatttaaaaatgaattaggtctattaggataattaggagtttgatcccatcaacactattcttgtagcagttaggaatcttgagctatttttttctcatacgattactatagtccagtttaccaaagttttctttagatgtctgataatcttgagatgattgcttaccttaaaggttttgaacgctccttctttttgggccctgc

SEQ ID NO: 98957 - DNA, 2496 bp, Homo sapiens
  misc_feature (26)..(26): n is a, c, g, or t
aagagagtacaacctacggctaggtncgaggctgggtgttgcttccagcctcagtcggacgggcgcggagacgcttctggaaggaacgccgcgatggctgcgcagggagagccccaggtccagttcaaacttgtattggttggtgatggtggtactggaaaaacgaccttcgtgaaacgtcatttgactggtgaatttgagaagaagtatgtagccaccttgggtgttgaggttcatcccctagtgttccacaccaacagaggacctattaagttcaatgtatgggacacagccggccaggagaaattcggtggactgagagatggctattatatccaagcccagtgtgccatcataatgtttgatgtaacatcgagagttacttacaagaatgtgcctaactggcatagagatctggtacgagtgtgtgaaaacatccccattgtgttgtgtggcaacaaagtggatattaaggacaggaaagtgaaggcgaaatccattgtcttccaccgaaagaagaatcttcagtactacgacatttctgccaaaagtaactacaactttgaaaagcccttcctctggcttgctaggaagctcattggagaccctaacttggaatttgttgccatgcctgctctcgccccaccagaagttgtcatggacccagctttggcagcacagtatgagcacgacttagaggttgctcagacaactgctctcccggatgaggatgatgacctgtgagaatgaagctggagcccagcgtcagaagtctagttttataggcagctgtcctgtgatgtcagcggtgcagcgtgtgtgccacctcattattatctagctaagcggaacatgtgcttcatctgtgggatgctgaaggagatgagtgggcttcggagtgaatgtggcagtttaaaaaataacttcattgtttggacctgcatatttagctgttttggaacgcagttgattccttgagtttcatatataagactgctgcagtcacatcacaatattcagtggtgaaatcttgtttgttactgtcattcccattccttttcgtttagaatcagaataaagttgtatttcaaatatctaagcaagtgaactcatcccttgtttataaatagcatttggaaaccactaaagtagggaagttttatgccatgttaatatttgaattgccttgcttttatcacttaatttgaaatctattgggttaatttctccctatgtttatttttgtacatttgagccatgtcacacaaactgatgatgacaggtcagcagtattctatttggttagaagggttacatggtgtaaatattagtgcagttaagctaaagcagtgtttgctccaccttcatattggctaggtagggtcacctagggaagcacttgctcaaaatctgtgacctgtcagaataaaaatgtggtttgtacatatcaaatagatattttaagggtaatattttcttttatggcaaaagtaatcatgttttaatgtagaacctcaaacaggatggaacatcagtggatggcaggaggttgggaattcttgctgttaaaaataattacaaattttgcacttttttgtttgaatgttagatgcttagtgtgaagttgatacgcaaggaaaatggtccatgtttacccacagttttcaggtactcctagactttaaagatgtcttgaacatttaagttcttcagcagttcacactacaccgtttttttgtttttttttcccccccgggagggtttttttgtagggcagcacagcagagcaggacatggatgaaatactaggaatatgcacagtggggcagtgtgggggcttctcagtaatggagaacagttggtgaaacttttttttttttttaactaagcatttaatttatcttgcatattttccacatttaaaaatgaattaggtctattaggataattaggagtttgatcccatcaacactattcttgtagcagttaggaatcttgagctatttttttctcatacgattactatagtccagtttaccaaagttttctttagatgtctgataatcttgagatgattgcttaccttaaaaggtatagaaaggatcacttaaatatatggaaaaatgaaataagggtgaagctgaataaagttctacttactgtattaactggcaacagttgagtttcttaagatctgaattgctgtgtatgttacgctgtattcagaaccagtttctaaccagcctgtgagatgggaagttttttccccataattgggatgaaacctttcattcaggtattttgaattgaaggtgtatgtgttgtttgtaaccttgtggagattgcaagtggtgttgacattctggatcttctatgtaacagttgaaatttggaagtgacgtcacttacctgtctaacgtggtgtgggagagaatttacaagtcctttattgaaagaataattgttgcaaaatatattgcttctactttgcctgga

SEQ ID NO: 98958 - DNA, 1675 bp, Homo sapiens
ccgccccgcgccggccccgcccctgctctcgcgccggcgtcggctgcgtctccggcgtttgaattgcgcttccgccatctttccagcctcagtcggacgggcgcggagacgcttctggaaggaacgccgcgatggctgcgcagggagagccccaggtccagttcaaacttgtattggttggtgatggtggtactggaaaaacgaccttcgtgaaacgtcatttgactggtgaatttgagaagaagtatgtagccaccttgggtgttgaggttcatcccctagtgttccacaccaacagaggacctattaagttcaatgtatgggacacagccggccaggagaaattcggtggactgagagatggctattatatccaagcccagtgtgccatcataatgtttgatgtaacatcgagagttacttacaagaatgtgcctaactggcatagagatctggtacgagtgtgtgaaaacatccccattgtgttgtgtggcaacaaagtggatattaaggacaggaaagtgaaggcgaaatccattgtcttccaccgaaagaagaatcttcagtactacgacatttctgccaaaagtaactacaactttgaaaagcccttcctctggcttgctaggaagctcattggagaccctaacttggaatttgttgccatgcctgctctcgccccaccagaagttgtcatggacccagctttggcagcacagtatgagcacgacttagaggttgctcagacaactgctctcccggatgaggatgatgacctgtgagaatgaagctggagcccagcgtcagaagtctagttttataggcagctgtcctgtgatgtcagcggtgcagcgtgtgtgccacctcattattatctagctaagcggaacatgtgcttcatctgtgggatgctgaaggagatgagtgggcttcggagtgaatgtggcagtttaaaaaataacttcattgtttggacctgcatatttagctgttttggaacgcagttgattccttgagtttcatatataagactgctgcagtcacatcacaatattcagtggtgaaatcttgtttgttactgtcattcccattccttttcgtttagaatcagaataaagttgtatttcaaataaaaaaaaaaaaaaaaaaaaaaaaaaaaaaaaaaaaaaaaaaaaaaaaaaaaaaaaaaaaaaaaaaaaaaaaaaaaaaaaaaaaaaaaaaaaaaaaaaaaaaagggggggggggcccaaaaatcacctcacgggggcgacaaacaatgaaatgccacacacacccgtgtgagtctgtgaggaaaagggaaggcagcactcattaagggcgtcgtatattaaaatcaacaaagggcgagggggcgtctgtgatcaaaacagacccacggagggacggtgaggagggacaaacacaggctggacgtcagaaggcacttctagtggagaaagacggcacaccccccaccccctgggggggcgggaaaaacgacgaaggtccagacacccccacggcaaaaagataacaccggagcgcggaactaaagaaaaaaacaaccgacgagtagacaggggcgcacaaacccaaacagtaaatttgccggaccgaaaaaaacagtacccacgagacgtgaataacaacaccatcacggccgttgcaatcatgg

SEQ ID NO: 98959 - DNA, 1300 bp, Homo sapiens
ccgccccgcgccggccccgcccctgctctcgcgccggcgtcggctgcgtctccggcgtttgaattgcgcttccgccatctttccagcctcagtcggacgggcgcggagacgcttctggaaggaacgccgcgatggctgcgcagggagagccccaggtccagttcaaacttgtattggttggtgatggtggtactggaaaaacgaccttcgtgaaacgtcatttgactggtgaatttgagaagaagtatgtagccaccttgggtgttgaggttcatcccctagtgttccacaccaacagaggacctattaagttcaatgtatgggacacagccggccaggagaaattcggtggactgagagatggctattatatccaagcccagtgtgccatcataatgtttgatgtaacatcgagagttacttacaagaatgtgcctaactggcatagagatctggtacgagtgtgtgaaaacatccccattgtgttgtgtggcaacaaagtggatattaaggacaggaaagtgaaggcgaaatccattgtcttccaccgaaagaagaatcttcagtactacgacatttctgccaaaagtaactacaactttgaaaagcccttcctctggcttgctaggaagctcattggagaccctaacttggaatttgttgccatgcctgctctcgccccaccagaagttgtcatggacccagctttggcagcacagtatgagcacgacttagaggttgctcagacaactgctctcccggatgaggatgatgacctgtgagaatgaagctggagcccagcgtcagaagtctagttttataggcagctgtcctgtgatgtcagcggtgcagcgtgtgtgccacctcattattatctagctaagcggaacatgtgcttcatctgtgggatgctgaaggagatgagtgggcttcggagtgaatgtggcagtttaaaaaataacttcattgtttggacctgcatatttagctgttttggaacgcagttgattccttgagtttcatatataagactgctgcagtcacatcacaatattcagtggtgaaatcttgtttgttactgtcattcccattccttttcgtttagaatcagaataaagttgtatttcaaatacaataaacaaaaaaaagggggcgtctaagatctgagggccaagttaggtacagttctgtcaggggccatggaggattaaggaggggggggttaaagggatggaaagtctggtttggggggctttgggggattggaccagataagtgataatagtagggtagttgggag

SEQ ID NO: 98960 - DNA, 1338 bp, Homo sapiens
ccgccccgcgccggccccgcccctgctctcgcgccggcgtcggctgcgtctccggcgtttgaattgcgcttccgccatctttccagcctcagtcggacgggcgcggagacgcttctggaaggaacgccgcgatggctgcgcagggagagccccaggtccagttcaaacttgtattggttggtgatggtggtactggaaaaacgaccttcgtgaaacgtcatttgactggtgaatttgagaagaagtatgtagccaccttgggtgttgaggttcatcccctagtgttccacaccaacagaggacctattaagttcaatgtatgggacacagccggccaggagaaattcggtggactgagagatggctattatatccaagcccagtgtgccatcataatgtttgatgtaacatcgagagttacttacaagaatgtgcctaactggcatagagatctggtacgagtgtgtgaaaacatccccattgtgttgtgtggcaacaaagtggatattaaggacaggaaagtgaaggcgaaatccattgtcttccaccgaaagaagaatcttcagtactacgacatttctgccaaaagtaactacaactttgaaaagcccttcctctggcttgctaggaagctcattggagaccctaacttggaatttgttgccatgcctgctctcgccccaccagaagttgtcatggacccagctttggcagcacagtatgagcacgacttagaggttgctcagacaactgctctcccggatgaggatgatgacctgtgagaatgaagctggagcccagcgtcagaagtctagttttataggcagctgtcctgtgatgtcagcggtgcagcgtgtgtgccacctcattattatctagctaagcggaacatgtgcttcatctgtgggatgctgaaggagatgagtgggcttcggagtgaatgtggcagtttaaaaaataacttcattgtttggacctgcatatttagctgttttggaacgcagttgattccttgagtttcatatataagactgctgcagtcacatcacaatattcagtggtgaaatcttgtttgttactgtcattcccattccttttcgtttagaatcagaataaagttgtatttcaaatacaaacaaaaacaacacacaccacaaccacaacacaccacacaccacacacacacacaacacaaccacaacaaacaacaacacacaaccacaatccaacaccccacatcctacccccctcaccactcaccacctcacccccgccccccacctcccccaccacaccctcccccactcccccccccctcccaccaccccacccccccct

SEQ ID NO: 98961 - DNA, 1144 bp, Homo sapiens
ccgccccgcgccggccccgcccctgctctcgcgccggcgtcggctgcgtctccggcgtttgaattgcgcttccgccatctttccagcctcagtcggacgggcgcggagacgcttctggaaggaacgccgcgatggctgcgcagggagagccccaggtccagttcaaacttgtattggttggtgatggtggtactggaaaaacgaccttcgtgaaacgtcatttgactggtgaatttgagaagaagtatgtagccaccttgggtgttgaggttcatcccctagtgttccacaccaacagaggacctattaagttcaatgtatgggacacagccggccaggagaaattcggtggactgagagatggctattatatccaagcccagtgtgccatcataatgtttgatgtaacatcgagagttacttacaagaatgtgcctaactggcatagagatctggtacgagtgtgtgaaaacatccccattgtgttgtgtggcaacaaagtggatattaaggacaggaaagtgaaggcgaaatccattgtcttccaccgaaagaagaatcttcagtactacgacatttctgccaaaagtaactacaactttgaaaagcccttcctctggcttgctaggaagctcattggagaccctaacttggaatttgttgccatgcctgctctcgccccaccagaagttgtcatggacccagctttggcagcacagtatgagcacgacttagaggttgctcagacaactgctctcccggatgaggatgatgacctgtgagaatgaagctggagcccagcgtcagaagtctagttttataggcagctgtcctgtgatgtcagcggtgcagcgtgtgtgccacctcattattatctagctaagcggaacatgtgcttcatctgtgggatgctgaaggagatgagtgggcttcggagtgaatgtggcagtttaaaaaataacttcattgtttggacctgcatatttagctgttttgctgatccttgatccaatttagactgtgcccctcaacatacgggaaactggtggctgctccaccctcgtaaaacaaaatcgtttccttaaaaaaacggttttggggaaaaaagctccacttagtcctatacttttcaacaaagttatat

SEQ ID NO: 98962 - DNA, 2758 bp, Homo sapiens
gggcggctgagtaggtgggtggtgcgggcccggccgggccggggcaggagacgggcgtggggtcggcgctagcccccgcgaacccccgtttcatcctccgctctcatccccgtcccggtcccagtcccgttcccatccctacacctccggccgccgttccccgggccccgccgccccggatgccggccccgcccgccgccttcccgctcccaggcctggccgccatggcgccgcgggcgggaggcctttgtggggcgggcacgtggggcgctgggggcgcgggagcggggccgccatgggctgcggggccgcgcgagcgctcgcctccgtcctctgcctccgcaggaacgccgcgatggctgcgcagggagagccccaggtccagttcaaacttgtattggttggtgatggtggtactggaaaaacgaccttcgtgaaacgtcatttgactggtgaatttgagaagaagtatgtagccaccttgggtgttgaggttcatcccctagtgttccacaccaacagaggacctattaagttcaatgtatgggacacagccggccaggagaaattcggtggactgagagatggctattatatccaagcccagtgtgccatcataatgtttgatgtaacatcgagagttacttacaagaatgtgcctaactggcatagagatctggtacgagtgtgtgaaaacatccccattgtgttgtgtggcaacaaagtggatattaaggacaggaaagtgaaggcgaaatccattgtcttccaccgaaagaagaatcttcagtactacgacatttctgccaaaagtaactacaactttgaaaagcccttcctctggcttgctaggaagctcattggagaccctaacttggaatttgttgccatgcctgctctcgccccaccagaagttgtcatggacccagctttggcagcacagtatgagcacgacttagaggttgctcagacaactgctctcccggatgaggatgatgacctgtgagaatgaagctggagcccagcgtcagaagtctagttttataggcagctgtcctgtgatgtcagcggtgcagcgtgtgtgccacctcattattatctagctaagcggaacatgtgcttcatctgtgggatgctgaaggagatgagtgggcttcggagtgaatgtggcagtttaaaaaataacttcattgtttggacctgcatatttagctgttttggaacgcagttgattccttgagtttcatatataagactgctgcagtcacatcacaatattcagtggtgaaatcttgtttgttactgtcattcccattccttttcgtttagaatcagaataaagttgtatttcaaatatctaagcaagtgaactcatcccttgtttataaatagcatttggaaaccactaaagtagggaagttttatgccatgttaatatttgaattgccttgcttttatcacttaatttgaaatctattgggttaatttctccctatgtttatttttgtacatttgagccatgtcacacaaactgatgatgacaggtcagcagtattctatttggttagaagggttacatggtgtaaatattagtgcagttaagctaaagcagtgtttgctccaccttcatattggctaggtagggtcacctagggaagcacttgctcaaaatctgtgacctgtcagaataaaaatgtggtttgtacatatcaaatagatattttaagggtaatattttcttttatggcaaaagtaatcatgttttaatgtagaacctcaaacaggatggaacatcagtggatggcaggaggttgggaattcttgctgttaaaaataattacaaattttgcacttttttgtttgaatgttagatgcttagtgtgaagttgatacgcaaggaaaatggtccatgtttacccacagttttcaggtactcctagactttaaagatgtcttgaacatttaagttcttcagcagttcacactacaccgtttttttgtttttttttcccccccgggagggtttttttgtagggcagcacagcagagcaggacatggatgaaatactaggaatatgcacagtggggcagtgtgggggcttctcagtaatggagaacagttggtgaaacttttttttttttttaactaagcatttaatttatcttgcatattttccacatttaaaaatgaattaggtctattaggataattaggagtttgatcccatcaacactattcttgtagcagttaggaatcttgagctatttttttctcatacgattactatagtccagtttaccaaagttttctttagatgtctgataatcttgagatgattgcttaccttaaaaggtatagaaaggatcacttaaatatatggaaaaatgaaataagggtgaagctgaataaagttctacttactgtattaactggcaacagttgagtttcttaagatctgaattgctgtgtatgttacgctgtattcagaaccagtttctaaccagcctgtgagatgggaagttttttccccataattgggatgaaacctttcattcaggtattttgaattgaaggtgtatgtgttgtttgtaaccttgtggagattgcaagtggtgttgacattctggatcttctatgtaacagttgaaatttggaagtgacgtcacttacctgtctaacgtggtgtgggagagaatttacaagtcctttattgaaagaataattgttgcaaaatatattgcttctactttgcctgga

SEQ ID NO: 98963 - DNA, 2464 bp, Homo sapiens
  misc_feature (15)..(15): n is a, c, g, or t
taggctagagaggcngggtggtgcggacgggcgcggagacgcttctggaaggaacgccgcgatggctgcgcagggagagccccaggtccagttcaaacttgtattggttggtgatggtggtactggaaaaacgaccttcgtgaaacgtcatttgactggtgaatttgagaagaagtatgtagccaccttgggtgttgaggttcatcccctagtgttccacaccaacagaggacctattaagttcaatgtatgggacacagccggccaggagaaattcggtggactgagagatggctattatatccaagcccagtgtgccatcataatgtttgatgtaacatcgagagttacttacaagaatgtgcctaactggcatagagatctggtacgagtgtgtgaaaacatccccattgtgttgtgtggcaacaaagtggatattaaggacaggaaagtgaaggcgaaatccattgtcttccaccgaaagaagaatcttcagtactacgacatttctgccaaaagtaactacaactttgaaaagcccttcctctggcttgctaggaagctcattggagaccctaacttggaatttgttgccatgcctgctctcgccccaccagaagttgtcatggacccagctttggcagcacagtatgagcacgacttagaggttgctcagacaactgctctcccggatgaggatgatgacctgtgagaatgaagctggagcccagcgtcagaagtctagttttataggcagctgtcctgtgatgtcagcggtgcagcgtgtgtgccacctcattattatctagctaagcggaacatgtgcttcatctgtgggatgctgaaggagatgagtgggcttcggagtgaatgtggcagtttaaaaaataacttcattgtttggacctgcatatttagctgttttggaacgcagttgattccttgagtttcatatataagactgctgcagtcacatcacaatattcagtggtgaaatcttgtttgttactgtcattcccattccttttcgtttagaatcagaataaagttgtatttcaaatatctaagcaagtgaactcatcccttgtttataaatagcatttggaaaccactaaagtagggaagttttatgccatgttaatatttgaattgccttgcttttatcacttaatttgaaatctattgggttaatttctccctatgtttatttttgtacatttgagccatgtcacacaaactgatgatgacaggtcagcagtattctatttggttagaagggttacatggtgtaaatattagtgcagttaagctaaagcagtgtttgctccaccttcatattggctaggtagggtcacctagggaagcacttgctcaaaatctgtgacctgtcagaataaaaatgtggtttgtacatatcaaatagatattttaagggtaatattttcttttatggcaaaagtaatcatgttttaatgtagaacctcaaacaggatggaacatcagtggatggcaggaggttgggaattcttgctgttaaaaataattacaaattttgcacttttttgtttgaatgttagatgcttagtgtgaagttgatacgcaaggaaaatggtccatgtttacccacagttttcaggtactcctagactttaaagatgtcttgaacatttaagttcttcagcagttcacactacaccgtttttttgtttttttttcccccccgggagggtttttttgtagggcagcacagcagagcaggacatggatgaaatactaggaatatgcacagtggggcagtgtgggggcttctcagtaatggagaacagttggtgaaacttttttttttttttaactaagcatttaatttatcttgcatattttccacatttaaaaatgaattaggtctattaggataattaggagtttgatcccatcaacactattcttgtagcagttaggaatcttgagctatttttttctcatacgattactatagtccagtttaccaaagttttctttagatgtctgataatcttgagatgattgcttaccttaaaaggtatagaaaggatcacttaaatatatggaaaaatgaaataagggtgaagctgaataaagttctacttactgtattaactggcaacagttgagtttcttaagatctgaattgctgtgtatgttacgctgtattcagaaccagtttctaaccagcctgtgagatgggaagttttttccccataattgggatgaaacctttcattcaggtattttgaattgaaggtgtatgtgttgtttgtaaccttgtggagattgcaagtggtgttgacattctggatcttctatgtaacagttgaaatttggaagtgacgtcacttacctgtctaacgtggtgtgggagagaatttacaagtcctttattgaaagaataattgttgcaaaatatattgcttctactttgcctgga

SEQ ID NO: 98964 - DNA, 2464 bp, Homo sapiens
aaaacatagagctaagagcgaggccgcgtgttagggagacgcttctggaaggaacgccgcgatggctgcgcagggagagccccaggtccagttcaaacttgtattggttggtgatggtggtactggaaaaacgaccttcgtgaaacgtcatttgactggtgaatttgagaagaagtatgtagccaccttgggtgttgaggttcatcccctagtgttccacaccaacagaggacctattaagttcaatgtatgggacacagccggccaggagaaattcggtggactgagagatggctattatatccaagcccagtgtgccatcataatgtttgatgtaacatcgagagttacttacaagaatgtgcctaactggcatagagatctggtacgagtgtgtgaaaacatccccattgtgttgtgtggcaacaaagtggatattaaggacaggaaagtgaaggcgaaatccattgtcttccaccgaaagaagaatcttcagtactacgacatttctgccaaaagtaactacaactttgaaaagcccttcctctggcttgctaggaagctcattggagaccctaacttggaatttgttgccatgcctgctctcgccccaccagaagttgtcatggacccagctttggcagcacagtatgagcacgacttagaggttgctcagacaactgctctcccggatgaggatgatgacctgtgagaatgaagctggagcccagcgtcagaagtctagttttataggcagctgtcctgtgatgtcagcggtgcagcgtgtgtgccacctcattattatctagctaagcggaacatgtgcttcatctgtgggatgctgaaggagatgagtgggcttcggagtgaatgtggcagtttaaaaaataacttcattgtttggacctgcatatttagctgttttggaacgcagttgattccttgagtttcatatataagactgctgcagtcacatcacaatattcagtggtgaaatcttgtttgttactgtcattcccattccttttcgtttagaatcagaataaagttgtatttcaaatatctaagcaagtgaactcatcccttgtttataaatagcatttggaaaccactaaagtagggaagttttatgccatgttaatatttgaattgccttgcttttatcacttaatttgaaatctattgggttaatttctccctatgtttatttttgtacatttgagccatgtcacacaaactgatgatgacaggtcagcagtattctatttggttagaagggttacatggtgtaaatattagtgcagttaagctaaagcagtgtttgctccaccttcatattggctaggtagggtcacctagggaagcacttgctcaaaatctgtgacctgtcagaataaaaatgtggtttgtacatatcaaatagatattttaagggtaatattttcttttatggcaaaagtaatcatgttttaatgtagaacctcaaacaggatggaacatcagtggatggcaggaggttgggaattcttgctgttaaaaataattacaaattttgcacttttttgtttgaatgttagatgcttagtgtgaagttgatacgcaaggaaaatggtccatgtttacccacagttttcaggtactcctagactttaaagatgtcttgaacatttaagttcttcagcagttcacactacaccgtttttttgtttttttttcccccccgggagggtttttttgtagggcagcacagcagagcaggacatggatgaaatactaggaatatgcacagtggggcagtgtgggggcttctcagtaatggagaacagttggtgaaacttttttttttttttaactaagcatttaatttatcttgcatattttccacatttaaaaatgaattaggtctattaggataattaggagtttgatcccatcaacactattcttgtagcagttaggaatcttgagctatttttttctcatacgattactatagtccagtttaccaaagttttctttagatgtctgataatcttgagatgattgcttaccttaaaaggtatagaaaggatcacttaaatatatggaaaaatgaaataagggtgaagctgaataaagttctacttactgtattaactggcaacagttgagtttcttaagatctgaattgctgtgtatgttacgctgtattcagaaccagtttctaaccagcctgtgagatgggaagttttttccccataattgggatgaaacctttcattcaggtattttgaattgaaggtgtatgtgttgtttgtaaccttgtggagattgcaagtggtgttgacattctggatcttctatgtaacagttgaaatttggaagtgacgtcacttacctgtctaacgtggtgtgggagagaatttacaagtcctttattgaaagaataattgttgcaaaatatattgcttctactttgcctgga

SEQ ID NO: 98965 - DNA, 943 bp, Homo sapiens
ccgccccgcgccggccccgcccctgctctcgcgccggcgtcggctgcgtctccggcgtttgaattgcgcttccgccatctttccagcctcagtcggacgggcgcggagacgcttctggaaggaacgccgcgatggctgcgcagggagagccccaggtccagttcaaacttgtattggttggtgatggtggtactggaaaaacgaccttcgtgaaacgtcatttgactggtgaatttgagaagaagtatgtagccaccttgggtgttgaggttcatcccctagtgttccacaccaacagaggacctattaagttcaatgtatgggacacagccggccaggagaaattcggtggactgagagatggctattatatccaagcccagtgtgccatcataatgtttgatgtaacatcgagagttacttacaagaatgtgcctaactggcatagagatctggtacgagtgtgtgaaaacatccccattgtgttgtgtggcaacaaagtggatattaaggacaggaaagtgaaggcgaaatccattgtcttccaccgaaagaagaatcttcagtactacgacatttctgccaaaagtaactacaactttgaaaagcccttcctctggcttgctaggaagctcattggagaccctaacttggaatttgttgccatgcctgctctcgccccaccagaagttgtcatggacccagctttggcagcacagtatgagcacgacttagaggttgctcagacaactgctctcccggatgaggatgatgacctgtgagaatgaagctggagcccagcgtcagaagtctagttttataggcagctgtcctgtgatgtcagcggtgcagcgtgtgtgccacctcattattatctagctaagcggtacagaccgagaacaaggccatgtggagatagaggcacagactgaagttgtaccac

SEQ ID NO: 98966 - DNA, 2488 bp, Homo sapiens
gaccagctgcctgagtagctgggactacaggcgccggcgtcggctgcgtctccggcgtttgaattgcgcttccgccatctttccagcctcagtcggacgggcgcggagacgcttctggaagcttgtattggttggtgatggtggtactggaaaaacgaccttcgtgaaacgtcatttgactggtgaatttgagaagaagtatgtagccaccttgggtgttgaggttcatcccctagtgttccacaccaacagaggacctattaagttcaatgtatgggacacagccggccaggagaaattcggtggactgagagatggctattatatccaagcccagtgtgccatcataatgtttgatgtaacatcgagagttacttacaagaatgtgcctaactggcatagagatctggtacgagtgtgtgaaaacatccccattgtgttgtgtggcaacaaagtggatattaaggacaggaaagtgaaggcgaaatccattgtcttccaccgaaagaagaatcttcagtactacgacatttctgccaaaagtaactacaactttgaaaagcccttcctctggcttgctaggaagctcattggagaccctaacttggaatttgttgccatgcctgctctcgccccaccagaagttgtcatggacccagctttggcagcacagtatgagcacgacttagaggttgctcagacaactgctctcccggatgaggatgatgacctgtgagaatgaagctggagcccagcgtcagaagtctagttttataggcagctgtcctgtgatgtcagcggtgcagcgtgtgtgccacctcattattatctagctaagcggaacatgtgcttcatctgtgggatgctgaaggagatgagtgggcttcggagtgaatgtggcagtttaaaaaataacttcattgtttggacctgcatatttagctgttttggaacgcagttgattccttgagtttcatatataagactgctgcagtcacatcacaatattcagtggtgaaatcttgtttgttactgtcattcccattccttttcgtttagaatcagaataaagttgtatttcaaatatctaagcaagtgaactcatcccttgtttataaatagcatttggaaaccactaaagtagggaagttttatgccatgttaatatttgaattgccttgcttttatcacttaatttgaaatctattgggttaatttctccctatgtttatttttgtacatttgagccatgtcacacaaactgatgatgacaggtcagcagtattctatttggttagaagggttacatggtgtaaatattagtgcagttaagctaaagcagtgtttgctccaccttcatattggctaggtagggtcacctagggaagcacttgctcaaaatctgtgacctgtcagaataaaaatgtggtttgtacatatcaaatagatattttaagggtaatattttcttttatggcaaaagtaatcatgttttaatgtagaacctcaaacaggatggaacatcagtggatggcaggaggttgggaattcttgctgttaaaaataattacaaattttgcacttttttgtttgaatgttagatgcttagtgtgaagttgatacgcaaggaaaatggtccatgtttacccacagttttcaggtactcctagactttaaagatgtcttgaacatttaagttcttcagcagttcacactacaccgtttttttgtttttttttcccccccgggagggtttttttgtagggcagcacagcagagcaggacatggatgaaatactaggaatatgcacagtggggcagtgtgggggcttctcagtaatggagaacagttggtgaaacttttttttttttttaactaagcatttaatttatcttgcatattttccacatttaaaaatgaattaggtctattaggataattaggagtttgatcccatcaacactattcttgtagcagttaggaatcttgagctatttttttctcatacgattactatagtccagtttaccaaagttttctttagatgtctgataatcttgagatgattgcttaccttaaaaggtatagaaaggatcacttaaatatatggaaaaatgaaataagggtgaagctgaataaagttctacttactgtattaactggcaacagttgagtttcttaagatctgaattgctgtgtatgttacgctgtattcagaaccagtttctaaccagcctgtgagatgggaagttttttccccataattgggatgaaacctttcattcaggtattttgaattgaaggtgtatgtgttgtttgtaaccttgtggagattgcaagtggtgttgacattctggatcttctatgtaacagttgaaatttggaagtgacgtcacttacctgtctaacgtggtgtgggagagaatttacaagtcctttattgaaagaataattgttgcaaaatatattgcttctactttgcctgga

SEQ ID NO: 98967 - DNA, 2437 bp, Homo sapiens
catagcctagagagccggtgtaatcggagaggcggctgggtgttagggagagccccaggtccagttcaaacttgtattggttggtgatggtggtactggaaaaacgaccttcgtgaaacgtcatttgactggtgaatttgagaagaagtatgtagccaccttgggtgttgaggttcatcccctagtgttccacaccaacagaggacctattaagttcaatgtatgggacacagccggccaggagaaattcggtggactgagagatggctattatatccaagcccagtgtgccatcataatgtttgatgtaacatcgagagttacttacaagaatgtgcctaactggcatagagatctggtacgagtgtgtgaaaacatccccattgtgttgtgtggcaacaaagtggatattaaggacaggaaagtgaaggcgaaatccattgtcttccaccgaaagaagaatcttcagtactacgacatttctgccaaaagtaactacaactttgaaaagcccttcctctggcttgctaggaagctcattggagaccctaacttggaatttgttgccatgcctgctctcgccccaccagaagttgtcatggacccagctttggcagcacagtatgagcacgacttagaggttgctcagacaactgctctcccggatgaggatgatgacctgtgagaatgaagctggagcccagcgtcagaagtctagttttataggcagctgtcctgtgatgtcagcggtgcagcgtgtgtgccacctcattattatctagctaagcggaacatgtgcttcatctgtgggatgctgaaggagatgagtgggcttcggagtgaatgtggcagtttaaaaaataacttcattgtttggacctgcatatttagctgttttggaacgcagttgattccttgagtttcatatataagactgctgcagtcacatcacaatattcagtggtgaaatcttgtttgttactgtcattcccattccttttcgtttagaatcagaataaagttgtatttcaaatatctaagcaagtgaactcatcccttgtttataaatagcatttggaaaccactaaagtagggaagttttatgccatgttaatatttgaattgccttgcttttatcacttaatttgaaatctattgggttaatttctccctatgtttatttttgtacatttgagccatgtcacacaaactgatgatgacaggtcagcagtattctatttggttagaagggttacatggtgtaaatattagtgcagttaagctaaagcagtgtttgctccaccttcatattggctaggtagggtcacctagggaagcacttgctcaaaatctgtgacctgtcagaataaaaatgtggtttgtacatatcaaatagatattttaagggtaatattttcttttatggcaaaagtaatcatgttttaatgtagaacctcaaacaggatggaacatcagtggatggcaggaggttgggaattcttgctgttaaaaataattacaaattttgcacttttttgtttgaatgttagatgcttagtgtgaagttgatacgcaaggaaaatggtccatgtttacccacagttttcaggtactcctagactttaaagatgtcttgaacatttaagttcttcagcagttcacactacaccgtttttttgtttttttttcccccccgggagggtttttttgtagggcagcacagcagagcaggacatggatgaaatactaggaatatgcacagtggggcagtgtgggggcttctcagtaatggagaacagttggtgaaacttttttttttttttaactaagcatttaatttatcttgcatattttccacatttaaaaatgaattaggtctattaggataattaggagtttgatcccatcaacactattcttgtagcagttaggaatcttgagctatttttttctcatacgattactatagtccagtttaccaaagttttctttagatgtctgataatcttgagatgattgcttaccttaaaaggtatagaaaggatcacttaaatatatggaaaaatgaaataagggtgaagctgaataaagttctacttactgtattaactggcaacagttgagtttcttaagatctgaattgctgtgtatgttacgctgtattcagaaccagtttctaaccagcctgtgagatgggaagttttttccccataattgggatgaaacctttcattcaggtattttgaattgaaggtgtatgtgttgtttgtaaccttgtggagattgcaagtggtgttgacattctggatcttctatgtaacagttgaaatttggaagtgacgtcacttacctgtctaacgtggtgtgggagagaatttacaagtcctttattgaaagaataattgttgcaaaatatattgcttctactttgcctgga

SEQ ID NO: 98968 - DNA, 2411 bp, Homo sapiens
actatgcaggacgaggctgggttaatcggccgaggcgctctggacttgtattggttggtgatggtggtactggaaaaacgaccttcgtgaaacgtcatttgactggtgaatttgagaagaagtatgtagccaccttgggtgttgaggttcatcccctagtgttccacaccaacagaggacctattaagttcaatgtatgggacacagccggccaggagaaattcggtggactgagagatggctattatatccaagcccagtgtgccatcataatgtttgatgtaacatcgagagttacttacaagaatgtgcctaactggcatagagatctggtacgagtgtgtgaaaacatccccattgtgttgtgtggcaacaaagtggatattaaggacaggaaagtgaaggcgaaatccattgtcttccaccgaaagaagaatcttcagtactacgacatttctgccaaaagtaactacaactttgaaaagcccttcctctggcttgctaggaagctcattggagaccctaacttggaatttgttgccatgcctgctctcgccccaccagaagttgtcatggacccagctttggcagcacagtatgagcacgacttagaggttgctcagacaactgctctcccggatgaggatgatgacctgtgagaatgaagctggagcccagcgtcagaagtctagttttataggcagctgtcctgtgatgtcagcggtgcagcgtgtgtgccacctcattattatctagctaagcggaacatgtgcttcatctgtgggatgctgaaggagatgagtgggcttcggagtgaatgtggcagtttaaaaaataacttcattgtttggacctgcatatttagctgttttggaacgcagttgattccttgagtttcatatataagactgctgcagtcacatcacaatattcagtggtgaaatcttgtttgttactgtcattcccattccttttcgtttagaatcagaataaagttgtatttcaaatatctaagcaagtgaactcatcccttgtttataaatagcatttggaaaccactaaagtagggaagttttatgccatgttaatatttgaattgccttgcttttatcacttaatttgaaatctattgggttaatttctccctatgtttatttttgtacatttgagccatgtcacacaaactgatgatgacaggtcagcagtattctatttggttagaagggttacatggtgtaaatattagtgcagttaagctaaagcagtgtttgctccaccttcatattggctaggtagggtcacctagggaagcacttgctcaaaatctgtgacctgtcagaataaaaatgtggtttgtacatatcaaatagatattttaagggtaatattttcttttatggcaaaagtaatcatgttttaatgtagaacctcaaacaggatggaacatcagtggatggcaggaggttgggaattcttgctgttaaaaataattacaaattttgcacttttttgtttgaatgttagatgcttagtgtgaagttgatacgcaaggaaaatggtccatgtttacccacagttttcaggtactcctagactttaaagatgtcttgaacatttaagttcttcagcagttcacactacaccgtttttttgtttttttttcccccccgggagggtttttttgtagggcagcacagcagagcaggacatggatgaaatactaggaatatgcacagtggggcagtgtgggggcttctcagtaatggagaacagttggtgaaacttttttttttttttaactaagcatttaatttatcttgcatattttccacatttaaaaatgaattaggtctattaggataattaggagtttgatcccatcaacactattcttgtagcagttaggaatcttgagctatttttttctcatacgattactatagtccagtttaccaaagttttctttagatgtctgataatcttgagatgattgcttaccttaaaaggtatagaaaggatcacttaaatatatggaaaaatgaaataagggtgaagctgaataaagttctacttactgtattaactggcaacagttgagtttcttaagatctgaattgctgtgtatgttacgctgtattcagaaccagtttctaaccagcctgtgagatgggaagttttttccccataattgggatgaaacctttcattcaggtattttgaattgaaggtgtatgtgttgtttgtaaccttgtggagattgcaagtggtgttgacattctggatcttctatgtaacagttgaaatttggaagtgacgtcacttacctgtctaacgtggtgtgggagagaatttacaagtcctttattgaaagaataattgttgcaaaatatattgcttctactttgcctgga

SEQ ID NO: 98969 - DNA, 2739 bp, Homo sapiens
gaccagctgcctgagtagctgggactacaggcgccggcgtcggctgcgtctccggcgtttgaattgcgcttccgccatctttccagcctcagtcggacgggcgcggagacgcttctggaaggaacgccgcgatggctgcgcagggagagccccaggtccagttcaaagtaggtaaccctgcggggcgggaggcggccgagcccgaccgcgtgcgactcgcgggtccctcctcctggggccacgatggctgtaatggggccccgcatccacattctttgttttaagtgagcctgtggtggttaaagttccgtgactctgggatcttgagaggtgaagtgtttagggtttacttccaaaatgtgtttttcaacacttgtattggttggtgatggtggtactggaaaaacgaccttcgtgaaacgtcatttgactggtgaatttgagaagaagtatgtagccaccttgggtgttgaggttcatcccctagtgttccacaccaacagaggacctattaagttcaatgtatgggacacagccggccaggagaaattcggtggactgagagatggctattatatccaagcccagtgtgccatcataatgtttgatgtaacatcgagagttacttacaagaatgtgcctaactggcatagagatctggtacgagtgtgtgaaaacatccccattgtgttgtgtggcaacaaagtggatattaaggacaggaaagtgaaggcgaaatccattgtcttccaccgaaagaagaatcttcagtactacgacatttctgccaaaagtaactacaactttgaaaagcccttcctctggcttgctaggaagctcattggagaccctaacttggaatttgttgccatgcctgctctcgccccaccagaagttgtcatggacccagctttggcagcacagtatgagcacgacttagaggttgctcagacaactgctctcccggatgaggatgatgacctgtgagaatgaagctggagcccagcgtcagaagtctagttttataggcagctgtcctgtgatgtcagcggtgcagcgtgtgtgccacctcattattatctagctaagcggaacatgtgcttcatctgtgggatgctgaaggagatgagtgggcttcggagtgaatgtggcagtttaaaaaataacttcattgtttggacctgcatatttagctgttttggaacgcagttgattccttgagtttcatatataagactgctgcagtcacatcacaatattcagtggtgaaatcttgtttgttactgtcattcccattccttttcgtttagaatcagaataaagttgtatttcaaatatctaagcaagtgaactcatcccttgtttataaatagcatttggaaaccactaaagtagggaagttttatgccatgttaatatttgaattgccttgcttttatcacttaatttgaaatctattgggttaatttctccctatgtttatttttgtacatttgagccatgtcacacaaactgatgatgacaggtcagcagtattctatttggttagaagggttacatggtgtaaatattagtgcagttaagctaaagcagtgtttgctccaccttcatattggctaggtagggtcacctagggaagcacttgctcaaaatctgtgacctgtcagaataaaaatgtggtttgtacatatcaaatagatattttaagggtaatattttcttttatggcaaaagtaatcatgttttaatgtagaacctcaaacaggatggaacatcagtggatggcaggaggttgggaattcttgctgttaaaaataattacaaattttgcacttttttgtttgaatgttagatgcttagtgtgaagttgatacgcaaggaaaatggtccatgtttacccacagttttcaggtactcctagactttaaagatgtcttgaacatttaagttcttcagcagttcacactacaccgtttttttgtttttttttcccccccgggagggtttttttgtagggcagcacagcagagcaggacatggatgaaatactaggaatatgcacagtggggcagtgtgggggcttctcagtaatggagaacagttggtgaaacttttttttttttttaactaagcatttaatttatcttgcatattttccacatttaaaaatgaattaggtctattaggataattaggagtttgatcccatcaacactattcttgtagcagttaggaatcttgagctatttttttctcatacgattactatagtccagtttaccaaagttttctttagatgtctgataatcttgagatgattgcttaccttaaaaggtatagaaaggatcacttaaatatatggaaaaatgaaataagggtgaagctgaataaagttctacttactgtattaactggcaacagttgagtttcttaagatctgaattgctgtgtatgttacgctgtattcagaaccagtttctaaccagcctgtgagatgggaagttttttccccataattgggatgaaacctttcattcaggtattttgaattgaaggtgtatgtgttgtttgtaaccttgtggagattgcaagtggtgttgacattctggatcttctatgtaacagttgaaatttggaagtgacgtcacttacctgtctaacgtggtgtgggagagaatttacaagtcctttattgaaagaataattgttgcaaaatatattgcttctactttgcctgga

SEQ ID NO: 98970 - DNA, 2445 bp, Homo sapiens
  misc_feature (12)..(12): n is a, c, g, or t
tcactgtcatanccccgagtatgtagaggccgggtgggcccttcggacgagggcgggagagcccaatgtcagttcaaacttgtattggttggtgatggtggtactggaaaaacgaccttcgtgaaacgtcatttgactggtgaatttgagaagaagtatgtagccaccttgggtgttgaggttcatcccctagtgttccacaccaacagaggacctattaagttcaatgtatgggacacagccggccaggagaaattcggtggactgagagatggctattatatccaagcccagtgtgccatcataatgtttgatgtaacatcgagagttacttacaagaatgtgcctaactggcatagagatctggtacgagtgtgtgaaaacatccccattgtgttgtgtggcaacaaagtggatattaaggacaggaaagtgaaggcgaaatccattgtcttccaccgaaagaagaatcttcagtactacgacatttctgccaaaagtaactacaactttgaaaagcccttcctctggcttgctaggaagctcattggagaccctaacttggaatttgttgccatgcctgctctcgccccaccagaagttgtcatggacccagctttggcagcacagtatgagcacgacttagaggttgctcagacaactgctctcccggatgaggatgatgacctgtgagaatgaagctggagcccagcgtcagaagtctagttttataggcagctgtcctgtgatgtcagcggtgcagcgtgtgtgccacctcattattatctagctaagcggaacatgtgcttcatctgtgggatgctgaaggagatgagtgggcttcggagtgaatgtggcagtttaaaaaataacttcattgtttggacctgcatatttagctgttttggaacgcagttgattccttgagtttcatatataagactgctgcagtcacatcacaatattcagtggtgaaatcttgtttgttactgtcattcccattccttttcgtttagaatcagaataaagttgtatttcaaatatctaagcaagtgaactcatcccttgtttataaatagcatttggaaaccactaaagtagggaagttttatgccatgttaatatttgaattgccttgcttttatcacttaatttgaaatctattgggttaatttctccctatgtttatttttgtacatttgagccatgtcacacaaactgatgatgacaggtcagcagtattctatttggttagaagggttacatggtgtaaatattagtgcagttaagctaaagcagtgtttgctccaccttcatattggctaggtagggtcacctagggaagcacttgctcaaaatctgtgacctgtcagaataaaaatgtggtttgtacatatcaaatagatattttaagggtaatattttcttttatggcaaaagtaatcatgttttaatgtagaacctcaaacaggatggaacatcagtggatggcaggaggttgggaattcttgctgttaaaaataattacaaattttgcacttttttgtttgaatgttagatgcttagtgtgaagttgatacgcaaggaaaatggtccatgtttacccacagttttcaggtactcctagactttaaagatgtcttgaacatttaagttcttcagcagttcacactacaccgtttttttgtttttttttcccccccgggagggtttttttgtagggcagcacagcagagcaggacatggatgaaatactaggaatatgcacagtggggcagtgtgggggcttctcagtaatggagaacagttggtgaaacttttttttttttttaactaagcatttaatttatcttgcatattttccacatttaaaaatgaattaggtctattaggataattaggagtttgatcccatcaacactattcttgtagcagttaggaatcttgagctatttttttctcatacgattactatagtccagtttaccaaagttttctttagatgtctgataatcttgagatgattgcttaccttaaaaggtatagaaaggatcacttaaatatatggaaaaatgaaataagggtgaagctgaataaagttctacttactgtattaactggcaacagttgagtttcttaagatctgaattgctgtgtatgttacgctgtattcagaaccagtttctaaccagcctgtgagatgggaagttttttccccataattgggatgaaacctttcattcaggtattttgaattgaaggtgtatgtgttgtttgtaaccttgtggagattgcaagtggtgttgacattctggatcttctatgtaacagttgaaatttggaagtgacgtcacttacctgtctaacgtggtgtgggagagaatttacaagtcctttattgaaagaataattgttgcaaaatatattgcttctactttgcctgga

SEQ ID NO: 98971 - DNA, 2474 bp, Homo sapiens
ccgccccgcgccggccccgcccctgctctcgcgccggcgtcggctgcgtctccggcgtttgaattgcgcttccgccatctttccagcctcagtcggacgggcgcggagacgcttctggaaggaacgccgcgatggctgcgcagggagagccccaggtccagttcaaacttgtattggttggtgatggtggtactggaaaaacgaccttcgtgaaacgtcatttgactggtgaatttgagaagaagtatgtagccaccttgggtgttgaggttcatcccctagtgttccacaccaacagaggacctattaagttcaatgtatgggacacagccggccaggagaaattcggtggactgagagatggctattatatccaagcccagtgtgccatcataatgtttgatgtaacatcgagagttacttacaagaatgtgcctaactggcatagagatctggtacgagtgtgtgcgaaatccattgtcttccaccgaaagaagaatcttcagtactacgacatttctgccaaaagtaactacaactttgaaaagcccttcctctggcttgctaggaagctcattggagaccctaacttggaatttgttgccatgcctgctctcgccccaccagaagttgtcatggacccagctttggcagcacagtatgagcacgacttagaggttgctcagacaactgctctcccggatgaggatgatgacctgtgagaatgaagctggagcccagcgtcagaagtctagttttataggcagctgtcctgtgatgtcagcggtgcagcgtgtgtgccacctcattattatctagctaagcggaacatgtgcttcatctgtgggatgctgaaggagatgagtgggcttcggagtgaatgtggcagtttaaaaaataacttcattgtttggacctgcatatttagctgttttggaacgcagttgattccttgagtttcatatataagactgctgcagtcacatcacaatattcagtggtgaaatcttgtttgttactgtcattcccattccttttcgtttagaatcagaataaagttgtatttcaaatatctaagcaagtgaactcatcccttgtttataaatagcatttggaaaccactaaagtagggaagttttatgccatgttaatatttgaattgccttgcttttatcacttaatttgaaatctattgggttaatttctccctatgtttatttttgtacatttgagccatgtcacacaaactgatgatgacaggtcagcagtattctatttggttagaagggttacatggtgtaaatattagtgcagttaagctaaagcagtgtttgctccaccttcatattggctaggtagggtcacctagggaagcacttgctcaaaatctgtgacctgtcagaataaaaatgtggtttgtacatatcaaatagatattttaagggtaatattttcttttatggcaaaagtaatcatgttttaatgtagaacctcaaacaggatggaacatcagtggatggcaggaggttgggaattcttgctgttaaaaataattacaaattttgcacttttttgtttgaatgttagatgcttagtgtgaagttgatacgcaaggaaaatggtccatgtttacccacagttttcaggtactcctagactttaaagatgtcttgaacatttaagttcttcagcagttcacactacaccgtttttttgtttttttttcccccccgggagggtttttttgtagggcagcacagcagagcaggacatggatgaaatactaggaatatgcacagtggggcagtgtgggggcttctcagtaatggagaacagttggtgaaacttttttttttttttaactaagcatttaatttatcttgcatattttccacatttaaaaatgaattaggtctattaggataattaggagtttgatcccatcaacactattcttgtagcagttaggaatcttgagctatttttttctcatacgattactatagtccagtttaccaaagttttctttagatgtctgataatcttgagatgattgcttaccttaaaaggtatagaaaggatcacttaaatatatggaaaaatgaaataagggtgaagctgaataaagttctacttactgtattaactggcaacagttgagtttcttaagatctgaattgctgtgtatgttacgctgtattcagaaccagtttctaaccagcctgtgagatgggaagttttttccccataattgggatgaaacctttcattcaggtattttgaattgaaggtgtatgtgttgtttgtaaccttgtggagattgcaagtggtgttgacattctggatcttctatgtaacagttgaaatttggaagtgacgtcacttacctgtctaacgtggtgtgggagagaatttacaagtcctttattgaaagaataattgttgcaaaatatattgcttctactttgcctgga

SEQ ID NO: 98972 - DNA, 2231 bp, Homo sapiens
gaccagctgcctgagtagctgggactacaggcgccggcgtcggctgcgtctccggcgtttgaattgcgcttccgccatctttccagcctcagtcggacgggcgcggagacgcttctggaaggaacgccgcgatggctgcgcagggagagccccaggtccagttcaaacttgtattggttggtgatggtggtactggaaaaacgaccttcgtgaaacgtcatttgacgaaatccattgtcttccaccgaaagaagaatcttcagtactacgacatttctgccaaaagtaactacaactttgaaaagcccttcctctggcttgctaggaagctcattggagaccctaacttggaatttgttgccatgcctgctctcgccccaccagaagttgtcatggacccagctttggcagcacagtatgagcacgacttagaggttgctcagacaactgctctcccggatgaggatgatgacctgtgagaatgaagctggagcccagcgtcagaagtctagttttataggcagctgtcctgtgatgtcagcggtgcagcgtgtgtgccacctcattattatctagctaagcggaacatgtgcttcatctgtgggatgctgaaggagatgagtgggcttcggagtgaatgtggcagtttaaaaaataacttcattgtttggacctgcatatttagctgttttggaacgcagttgattccttgagtttcatatataagactgctgcagtcacatcacaatattcagtggtgaaatcttgtttgttactgtcattcccattccttttcgtttagaatcagaataaagttgtatttcaaatatctaagcaagtgaactcatcccttgtttataaatagcatttggaaaccactaaagtagggaagttttatgccatgttaatatttgaattgccttgcttttatcacttaatttgaaatctattgggttaatttctccctatgtttatttttgtacatttgagccatgtcacacaaactgatgatgacaggtcagcagtattctatttggttagaagggttacatggtgtaaatattagtgcagttaagctaaagcagtgtttgctccaccttcatattggctaggtagggtcacctagggaagcacttgctcaaaatctgtgacctgtcagaataaaaatgtggtttgtacatatcaaatagatattttaagggtaatattttcttttatggcaaaagtaatcatgttttaatgtagaacctcaaacaggatggaacatcagtggatggcaggaggttgggaattcttgctgttaaaaataattacaaattttgcacttttttgtttgaatgttagatgcttagtgtgaagttgatacgcaaggaaaatggtccatgtttacccacagttttcaggtactcctagactttaaagatgtcttgaacatttaagttcttcagcagttcacactacaccgtttttttgtttttttttcccccccgggagggtttttttgtagggcagcacagcagagcaggacatggatgaaatactaggaatatgcacagtggggcagtgtgggggcttctcagtaatggagaacagttggtgaaacttttttttttttttaactaagcatttaatttatcttgcatattttccacatttaaaaatgaattaggtctattaggataattaggagtttgatcccatcaacactattcttgtagcagttaggaatcttgagctatttttttctcatacgattactatagtccagtttaccaaagttttctttagatgtctgataatcttgagatgattgcttaccttaaaaggtatagaaaggatcacttaaatatatggaaaaatgaaataagggtgaagctgaataaagttctacttactgtattaactggcaacagttgagtttcttaagatctgaattgctgtgtatgttacgctgtattcagaaccagtttctaaccagcctgtgagatgggaagttttttccccataattgggatgaaacctttcattcaggtattttgaattgaaggtgtatgtgttgtttgtaaccttgtggagattgcaagtggtgttgacattctggatcttctatgtaacagttgaaatttggaagtgacgtcacttacctgtctaacgtggtgtgggagagaatttacaagtcctttattgaaagaataattgttgcaaaatatattgcttctactttgcctgga

SEQ ID NO: 98973 - DNA, 2470 bp, Homo sapiens
gaccagctgcctgagtagctgggactacaggcgccggcgtcggctgcgtctccggcgtttgaattgcgcttccgccatctttccagcctcagtcggacgggcgcggagacgcttctggaaggaacgccgcgatggctgcgcagggagagccccaggtccagttcaaacttgtattggttggtgatggtggtactggaaaaacgaccttcgtgaaacgtcatttgactggtgaatttgagaagaagtatgtagccaccttgggtgttgaggttcatcccctagtgttccacaccaacagaggacctattaagttcaatgtatgggacacagccggccaggagaaattcggtggactgagagatggctattatatccaagcccagtgtgccatcataatgtttgatgtaacatcgagagttacttacaagaatgtgcctaactggcatagagatctggtacgagtgtgtgaaaacatccccattgtgttgtgtggcaacaaagtggatattaaggacaggaaagtgaaggcgaaatccattgtcttccaccgaaagaagaatcttcagtactacgacatttctgccaaaagtaactacaactttggcctgctctcgccccaccagaagttgtcatggacccagctttggcagcacagtatgagcacgacttagaggttgctcagacaactgctctcccggatgaggatgatgacctgtgagaatgaagctggagcccagcgtcagaagtctagttttataggcagctgtcctgtgatgtcagcggtgcagcgtgtgtgccacctcattattatctagctaagcggaacatgtgcttcatctgtgggatgctgaaggagatgagtgggcttcggagtgaatgtggcagtttaaaaaataacttcattgtttggacctgcatatttagctgttttggaacgcagttgattccttgagtttcatatataagactgctgcagtcacatcacaatattcagtggtgaaatcttgtttgttactgtcattcccattccttttcgtttagaatcagaataaagttgtatttcaaatatctaagcaagtgaactcatcccttgtttataaatagcatttggaaaccactaaagtagggaagttttatgccatgttaatatttgaattgccttgcttttatcacttaatttgaaatctattgggttaatttctccctatgtttatttttgtacatttgagccatgtcacacaaactgatgatgacaggtcagcagtattctatttggttagaagggttacatggtgtaaatattagtgcagttaagctaaagcagtgtttgctccaccttcatattggctaggtagggtcacctagggaagcacttgctcaaaatctgtgacctgtcagaataaaaatgtggtttgtacatatcaaatagatattttaagggtaatattttcttttatggcaaaagtaatcatgttttaatgtagaacctcaaacaggatggaacatcagtggatggcaggaggttgggaattcttgctgttaaaaataattacaaattttgcacttttttgtttgaatgttagatgcttagtgtgaagttgatacgcaaggaaaatggtccatgtttacccacagttttcaggtactcctagactttaaagatgtcttgaacatttaagttcttcagcagttcacactacaccgtttttttgtttttttttcccccccgggagggtttttttgtagggcagcacagcagagcaggacatggatgaaatactaggaatatgcacagtggggcagtgtgggggcttctcagtaatggagaacagttggtgaaacttttttttttttttaactaagcatttaatttatcttgcatattttccacatttaaaaatgaattaggtctattaggataattaggagtttgatcccatcaacactattcttgtagcagttaggaatcttgagctatttttttctcatacgattactatagtccagtttaccaaagttttctttagatgtctgataatcttgagatgattgcttaccttaaaaggtatagaaaggatcacttaaatatatggaaaaatgaaataagggtgaagctgaataaagttctacttactgtattaactggcaacagttgagtttcttaagatctgaattgctgtgtatgttacgctgtattcagaaccagtttctaaccagcctgtgagatgggaagttttttccccataattgggatgaaacctttcattcaggtattttgaattgaaggtgtatgtgttgtttgtaaccttgtggagattgcaagtggtgttgacattctggatcttctatgtaacagttgaaatttggaagtgacgtcacttacctgtctaacgtggtgtgggagagaatttacaagtcctttattgaaagaataattgttgcaaaatatattgcttctactttgcctgga

SEQ ID NO: 98974 - DNA, 2232 bp, Homo sapiens
gagaccttgaaagtgaggggagagatacaggtgactcgttgaggtctaagactataactagttgaatcctagtctctggttcttagcattcttcacttgtgcagtaaactgagtgtactaattcccacaaatgtttcttcagcccagtgtgccatcataatgtttgatgtaacatcgagagttacttacaagaatgtgcctaactggcatagagatctggtacgagtgtgtgaaaacatccccattgtgttgtgtggcaacaaagtggatattaaggacaggaaagtgaaggcgaaatccattgtcttccaccgaaagaagaatcttcagctcattggagaccctaacttggaatttgttgccatgcctgctctcgccccaccagaagttgtcatggacccagctttggcagcacagtatgagcacgacttagaggttgctcagacaactgctctcccggatgaggatgatgacctgtgagaatgaagctggagcccagcgtcagaagtctagttttataggcagctgtcctgtgatgtcagcggtgcagcgtgtgtgccacctcattattatctagctaagcggaacatgtgcttcatctgtgggatgctgaaggagatgagtgggcttcggagtgaatgtggcagtttaaaaaataacttcattgtttggacctgcatatttagctgttttggaacgcagttgattccttgagtttcatatataagactgctgcagtcacatcacaatattcagtggtgaaatcttgtttgttactgtcattcccattccttttcgtttagaatcagaataaagttgtatttcaaatatctaagcaagtgaactcatcccttgtttataaatagcatttggaaaccactaaagtagggaagttttatgccatgttaatatttgaattgccttgcttttatcacttaatttgaaatctattgggttaatttctccctatgtttatttttgtacatttgagccatgtcacacaaactgatgatgacaggtcagcagtattctatttggttagaagggttacatggtgtaaatattagtgcagttaagctaaagcagtgtttgctccaccttcatattggctaggtagggtcacctagggaagcacttgctcaaaatctgtgacctgtcagaataaaaatgtggtttgtacatatcaaatagatattttaagggtaatattttcttttatggcaaaagtaatcatgttttaatgtagaacctcaaacaggatggaacatcagtggatggcaggaggttgggaattcttgctgttaaaaataattacaaattttgcacttttttgtttgaatgttagatgcttagtgtgaagttgatacgcaaggaaaatggtccatgtttacccacagttttcaggtactcctagactttaaagatgtcttgaacatttaagttcttcagcagttcacactacaccgtttttttgtttttttttcccccccgggagggtttttttgtagggcagcacagcagagcaggacatggatgaaatactaggaatatgcacagtggggcagtgtgggggcttctcagtaatggagaacagttggtgaaacttttttttttttttaactaagcatttaatttatcttgcatattttccacatttaaaaatgaattaggtctattaggataattaggagtttgatcccatcaacactattcttgtagcagttaggaatcttgagctatttttttctcatacgattactatagtccagtttaccaaagttttctttagatgtctgataatcttgagatgattgcttaccttaaaaggtatagaaaggatcacttaaatatatggaaaaatgaaataagggtgaagctgaataaagttctacttactgtattaactggcaacagttgagtttcttaagatctgaattgctgtgtatgttacgctgtattcagaaccagtttctaaccagcctgtgagatgggaagttttttccccataattgggatgaaacctttcattcaggtattttgaattgaaggtgtatgtgttgtttgtaaccttgtggagattgcaagtggtgttgacattctggatcttctatgtaacagttgaaatttggaagtgacgtcacttacctgtctaacgtggtgtgggagagaatttacaagtcctttattgaaagaataattgttgcaaaatatattgcttctactttgcctgga

SEQ ID NO: 98975 - DNA, 2098 bp, Homo sapiens
atataatagccatctctcagtccaccgaatttctcctggccggctgtgtcccatacattgaacttaataggtcctctgttggtgtggaacactaggggatgaacctcaacacccaaggtggctacatacttcttctcaaattcaccagtcaaatgacgtttcacgaaggtcgtttttccagtaccaccatcaccaaccaatacaagtttgaactggacctgggggcactgtgcctgctctcgccccaccagaagttgtcatggacccagctttggcagcacagtatgagcacgacttagaggttgctcagacaactgctctcccggatgaggatgatgacctgtgagaatgaagctggagcccagcgtcagaagtctagttttataggcagctgtcctgtgatgtcagcggtgcagcgtgtgtgccacctcattattatctagctaagcggaacatgtgcttcatctgtgggatgctgaaggagatgagtgggcttcggagtgaatgtggcagtttaaaaaataacttcattgtttggacctgcatatttagctgttttggaacgcagttgattccttgagtttcatatataagactgctgcagtcacatcacaatattcagtggtgaaatcttgtttgttactgtcattcccattccttttcgtttagaatcagaataaagttgtatttcaaatatctaagcaagtgaactcatcccttgtttataaatagcatttggaaaccactaaagtagggaagttttatgccatgttaatatttgaattgccttgcttttatcacttaatttgaaatctattgggttaatttctccctatgtttatttttgtacatttgagccatgtcacacaaactgatgatgacaggtcagcagtattctatttggttagaagggttacatggtgtaaatattagtgcagttaagctaaagcagtgtttgctccaccttcatattggctaggtagggtcacctagggaagcacttgctcaaaatctgtgacctgtcagaataaaaatgtggtttgtacatatcaaatagatattttaagggtaatattttcttttatggcaaaagtaatcatgttttaatgtagaacctcaaacaggatggaacatcagtggatggcaggaggttgggaattcttgctgttaaaaataattacaaattttgcacttttttgtttgaatgttagatgcttagtgtgaagttgatacgcaaggaaaatggtccatgtttacccacagttttcaggtactcctagactttaaagatgtcttgaacatttaagttcttcagcagttcacactacaccgtttttttgtttttttttcccccccgggagggtttttttgtagggcagcacagcagagcaggacatggatgaaatactaggaatatgcacagtggggcagtgtgggggcttctcagtaatggagaacagttggtgaaacttttttttttttttaactaagcatttaatttatcttgcatattttccacatttaaaaatgaattaggtctattaggataattaggagtttgatcccatcaacactattcttgtagcagttaggaatcttgagctatttttttctcatacgattactatagtccagtttaccaaagttttctttagatgtctgataatcttgagatgattgcttaccttaaaaggtatagaaaggatcacttaaatatatggaaaaatgaaataagggtgaagctgaataaagttctacttactgtattaactggcaacagttgagtttcttaagatctgaattgctgtgtatgttacgctgtattcagaaccagtttctaaccagcctgtgagatgggaagttttttccccataattgggatgaaacctttcattcaggtattttgaattgaaggtgtatgtgttgtttgtaaccttgtggagattgcaagtggtgttgacattctggatcttctatgtaacagttgaaatttggaagtgacgtcacttacctgtctaacgtggtgtgggagagaatttacaagtcctttattgaaagaataattgttgcaaaatatattgcttctactttgcctgga

SEQ ID NO: 98976 - DNA, 865 bp, Homo sapiens
  misc_feature (854)..(854): n is a, c, g, or t
gaccagctgcctgagtagctgggactacaggcgccggcgtcggctgcgtctccggcgtttgaattgcgcttccgccatctttccagcctcagtcggacgggcgcggagacgcttctggaaggaacgccgcgatggctgcgcagggagagccccaggtccagttcaaacttgtattggttggtgatggtggtactggaaaaacgaccttcgtgaaacgtcatttgactggtgaatttgagaagaagtatgtagccaccttgggtgttgaggttcatcccctagtgttccacaccaacagaggacctattaagttcaatgtatgggacacagccggccaggagaaattcggtggactgagagatggctattatatccaagcccagtgtgccatcataatgtttgatgtaacatcgagagttacttacaagaatgtgcctaactggcatagagatctggtacgagtgtgtgaaaacatccccattgtgttgtgtggcaacaaagtggatattaaggacaggaaagtgaaggcgaaatccattgtcttccaccgaaagaagaatcttcagtactcttaaaactaggcggctatggtataatacgcctcacactcattctcaaccccctgacaaaacacatagcctaccccttccttgtactatccctatgaggcataattataacaagctccatctgcctacgacaaacagacctaaaatcgctcattgcatactcttcaatcagccacatagccctcgtagtaacagccattctcatccaaaccccctgaagcttcaccggcgcagtcattctcataatcggccacgggttacatcctcattactaatctggctagnaaactcaaact

SEQ ID NO: 98977 - DNA, 784 bp, Homo sapiens
  misc_feature (26)..(26): n is a, c, g, or t
aagagagtacaacctacggctaggtncgaggctgggtgttgcttccagcctcagtcggacgggcgcggagacgcttctggaaggaacgccgcgatggctgcgcagggagagccccaggtccagttcaaacttgtattggttggtgatggtggtactggaaaaacgaccttcgtgaaacgtcatttgactggtgaatttgagaagaagtatgtagccaccttgggtgttgaggttcatcccctagtgttccacaccaacagaggacctattaagttcaatgtatgggacacagccggccaggagaaattcggtggactgagagatggctattatatccaagcccagtgtgccatcataatgtttgatgtaacatcgagagttacttacaagaatgtgcctaactggcatagagatctggtacgagtgtgtgaaaacatccccattgtgttgtgtggcaacaaagtggatattaaggacaggaaagtgaaggcgaaatccattgtcttccaccgaaagaagaatcttcagtactacgacatttctgccaaaagtaactacaactttgaaaagcccttcctctggcttgctaggaagctcattggagaccctaacttggaatttgttgccatgcctgctctcgccccaccagaagttgtcatggacccagctttggcagcacagtatgagcacgacttagaggctccagaccactggtcccccggttaggatgattgactgtgggaattgactgggccccgtccaggctagtttaggcggggccggg

SEQ ID NO: 98978 - DNA, 575 bp, Homo sapiens
gaggatcccgaatacagagctatccaagcccagtgtgccatcataatgtttgatgtaacatcgagagttacttacaagaatgtgcctaactggcatagagatctggtacgagtgtgtgaaaacatccccattgtgttgtgtggcaacaaagtggatattaaggacaggaaagtgaaggcgaaatccattgtcttccaccgaaagaagaatcttcagtactacgacatttctgccaaaagtaactacaactttgaaaagcccttcctctggcttgctaggaagctcattggagaccctaacttggaatttgttgccatgcctgctctcgccccaccagaagttgtcatggacccagctttggcagcacagtatgagcacgacttagaggttgctcagacaactgctctcccggatgaggatgatgacctgtgagaatgaagctggagcccagcgtcagaagtctagttttataggcagctgtcctgtgatgtcagcggtgcagcgtgtgtgccacctcattattatctagctaagcgggtcgacgcggccgcgaatttagtagtagtaggggccgc

SEQ ID NO: 98979 - DNA, 1132 bp, Homo sapiens
ccgccccgcgccggccccgcccctgctctcgcgccggcgtcggctgcgtctccggcgtttgaattgcgcttccgccatctttccagcctcagtcggacgggcgcggagacgcttctggaaggaacgccgcgatggctgcgcagggagagccccaggtccagttcaaacttgtattggttggtgatggtggtactggaaaaacgaccttcgtgaaacgtcatttgactggtgaatttgagaagaagtatgtagccaccttgggtgttgaggttcatcccctagtgttccacaccaacagaggacctattaagttcaatgtatgggacacagccggccaggagaaattcggtggactgagagatggctattatatccaagcccagtgtgccatcataatgtttgatgtaacatcgagagttacttacaagaatgtgcctaactggcatagagatctggtacgagtgtgtgaaaacatccccattgtgttgtgtggcaacaaagtggatattaaggacaggaaagtgaaggcgaaatccattgtcttccaccgaaagaagaatcttcagtactacgacatttctgccaaaagtaactacaactttgaaaagcccttcctctggcttgctaggaagctcattggagaccctaacttggaatttgttgccatgcctgctctcgccccaccagaagttgtcatggacccagctttggcagcacagtatgagcacgacttagaggttgctcagacaactgctctcccggatgaggatgatgacctgtgagaatgaagctggagcccagcgtcagaagtctagttttataggcagctgtcctgtgatgtcagcggtgcagcgtgtgtgccacctcattattatctagctaagcggaacatgtgcttcatctgtgggatgctgaaggagatgagtgggcttcggagtgaatgtggcagtttaaaaaataacttcattgtttggacctgcatatttagctgttttggaacgcagttgattccttgagtttcatatataagactgctgcagtcacatcacaatattcagtggtgaaatcttgtttgttactgtcattcccattccttttcgtttagaatcagaataaagttgtatttcaaata

SEQ ID NO: 98980 - DNA, 1283 bp, Homo sapiens
ccgccccgcgccggccccgcccctgctctcgcgccggcgtcggctgcgtctccggcgtttgaattgcgcttccgccatctttccagcctcagtcggacgggcgcggagacgcttctggaaggaacgccgcgatggctgcgcagggagagccccaggtccagttcaaacttgtattggttggtgatggtggtactggaaaaacgaccttcgtgaaacgtcatttgactggtgaatttgagaagaagtatgtagccaccttgggtgttgaggttcatcccctagtgttccacaccaacagaggacctattaagttcaatgtatgggacacagccggccaggagaaattcggtggactgagagatggctattatatccaagcccagtgtgccatcataatgtttgatgtaacatcgagagttacttacaagaatgtgcctaactggcatagagatctggtacgagtgtgtgaaaacatccccattgtgttgtgtggcaacaaagtggatattaaggacaggaaagtgaaggcgaaatccattgtcttccaccgaaagaagaatcttcagtactacgacatttctgccaaaagtaactacaactttgaaaagcccttcctctggcttgctaggaagctcattggagaccctaacttggaatttgttgccatgcctgctctcgccccaccagaagttgtcatggacccagctttggcagcacagtatgagcacgacttagaggttgctcagacaactgctctcccggatgaggatgatgacctgtgagaatgaagctggagcccagcgtcagaagtctagttttataggcagctgtcctgtgatgtcagcggtgcagcgtgtgtgccacctcattattatctagctaagcggaacatgtgcttcatctgtgggatgctgaaggagatgagtgggcttcggagtgaatgtggcagtttaaaaaataacttcattgtttggacctgcatatttagctgttttggaacgcagttgattccttgagtttcatatataagactgctgcagtcacatcacaatattcagtggtgaaatcttgtttgttactgtcattcccattccttttcgtttagaatcagaataaagttgtatttcaaataaaaaaaaaaaaaaaaaaaaaaaaaaccttgttggccggggtagagagagtaaaaaatttaacacccatagtaggcctaaaagcagccaccaattaagaaagcgttcaagctcaacacccactacctaacctatagaagaactaatgttagt

SEQ ID NO: 98981 - DNA, 1276 bp, Homo sapiens
  misc_feature (1141)..(1141): n is a, c, g, or t
  misc_feature (1144)..(1144): n is a, c, g, or t
  misc_feature (1148)..(1148): n is a, c, g, or t
  misc_feature (1155)..(1155): n is a, c, g, or t
  misc_feature (1159)..(1159): n is a, c, g, or t
  misc_feature (1164)..(1165): n is a, c, g, or t
  misc_feature (1168)..(1168): n is a, c, g, or t
ccgccccgcgccggccccgcccctgctctcgcgccggcgtcggctgcgtctccggcgtttgaattgcgcttccgccatctttccagcctcagtcggacgggcgcggagacgcttctggaaggaacgccgcgatggctgcgcagggagagccccaggtccagttcaaacttgtattggttggtgatggtggtactggaaaaacgaccttcgtgaaacgtcatttgactggtgaatttgagaagaagtatgtagccaccttgggtgttgaggttcatcccctagtgttccacaccaacagaggacctattaagttcaatgtatgggacacagccggccaggagaaattcggtggactgagagatggctattatatccaagcccagtgtgccatcataatgtttgatgtaacatcgagagttacttacaagaatgtgcctaactggcatagagatctggtacgagtgtgtgaaaacatccccattgtgttgtgtggcaacaaagtggatattaaggacaggaaagtgaaggcgaaatccattgtcttccaccgaaagaagaatcttcagtactacgacatttctgccaaaagtaactacaactttgaaaagcccttcctctggcttgctaggaagctcattggagaccctaacttggaatttgttgccatgcctgctctcgccccaccagaagttgtcatggacccagctttggcagcacagtatgagcacgacttagaggttgctcagacaactgctctcccggatgaggatgatgacctgtgagaatgaagctggagcccagcgtcagaagtctagttttataggcagctgtcctgtgatgtcagcggtgcagcgtgtgtgccacctcattattatctagctaagcggaacatgtgcttcatctgtgggatgctgaaggagatgagtgggcttcggagtgaatgtggcagtttaaaaaataacttcattgtttggacctgcatatttagctgttttggaacgcagttgattccttgagtttcatatataagactgctgcagtcacatcacaatattcagtggtgaaatcttgtttgttactgtcattcccattccttttcgtttagaatcagaataaagttgtatttcaaatagtgttccanttnaaanaaaaaanaccnggctnntcngggcggaaaggtaagcccgcctggcggcctctaagagagacggcctaggtttcatgggctcaacacaaatagacagaagccaactacacgccagccacttttctacca

SEQ ID NO: 98982 - DNA, 1254 bp, Homo sapiens
ccgccccgcgccggccccgcccctgctctcgcgccggcgtcggctgcgtctccggcgtttgaattgcgcttccgccatctttccagcctcagtcggacgggcgcggagacgcttctggaaggaacgccgcgatggctgcgcagggagagccccaggtccagttcaaacttgtattggttggtgatggtggtactggaaaaacgaccttcgtgaaacgtcatttgactggtgaatttgagaagaagtatgtagccaccttgggtgttgaggttcatcccctagtgttccacaccaacagaggacctattaagttcaatgtatgggacacagccggccaggagaaattcggtggactgagagatggctattatatccaagcccagtgtgccatcataatgtttgatgtaacatcgagagttacttacaagaatgtgcctaactggcatagagatctggtacgagtgtgtgaaaacatccccattgtgttgtgtggcaacaaagtggatattaaggacaggaaagtgaaggcgaaatccattgtcttccaccgaaagaagaatcttcagtactacgacatttctgccaaaagtaactacaactttgaaaagcccttcctctggcttgctaggaagctcattggagaccctaacttggaatttgttgccatgcctgctctcgccccaccagaagttgtcatggacccagctttggcagcacagtatgagcacgacttagaggttgctcagacaactgctctcccggatgaggatgatgacctgtgagaatgaagctggagcccagcgtcagaagtctagttttataggcagctgtcctgtgatgtcagcggtgcagcgtgtgtgccacctcattattatctagctaagcggaacatgtgcttcatctgtgggatgctgaaggagatgagtgggcttcggagtgaatgtggcagtttaaaaaataacttcattgtttggacctgcatatttagctgttttggaacgcagttgattccttgagtttcatatataagactgctgcagtcacatcacaatattcagtggtgaaatcttgtttgttactgtcattcccattccttttcgtttagaatcagaataaagttgtatttcaaatacaaaaaaaaaacccgcaggacacaagtcgggcgcgaaaaaaggtacgaaggcccatggcaaggttcccgcacccactcttgccaaggggaaaacgcgggtcccaaagggggattatgaaagc

SEQ ID NO: 98983 - DNA, 1093 bp, Homo sapiens
ccgccccgcgccggccccgcccctgctctcgcgccggcgtcggctgcgtctccggcgtttgaattgcgcttccgccatctttccagcctcagtcggacgggcgcggagacgcttctggaaggaacgccgcgatggctgcgcagggagagccccaggtccagttcaaacttgtattggttggtgatggtggtactggaaaaacgaccttcgtgaaacgtcatttgactggtgaatttgagaagaagtatgtagccaccttgggtgttgaggttcatcccctagtgttccacaccaacagaggacctattaagttcaatgtatgggacacagccggccaggagaaattcggtggactgagagatggctattatatccaagcccagtgtgccatcataatgtttgatgtaacatcgagagttacttacaagaatgtgcctaactggcatagagatctggtacgagtgtgtgaaaacatccccattgtgttgtgtggcaacaaagtggatattaaggacaggaaagtgaaggcgaaatccattgtcttccaccgaaagaagaatcttcagtactacgacatttctgccaaaagtaactacaactttgaaaagcccttcctctggcttgctaggaagctcattggagaccctaacttggaatttgttgccatgcctgctctcgccccaccagaagttgtcatggacccagctttggcagcacagtatgagcacgacttagaggttgctcagacaactgctctcccggatgaggatgatgacctgtgagaatgaagctggagcccagcgtcagaagtctagttttataggcagctgtcctgtgatgtcagcggtgcagcgtgtgtgccacctcattattatctagctaagcggaacatgtgcttcatctgtgggatgctgaaggagatgagtgggcttcggagtgaatgtggcagtttaaaaaataacttcattgtttggacctgcatatttagctgttttggaacgcagttgattccttgagtttcatatataagactgctgcagtcacatcacaatattcagtggtgaaatcttgtgctgctcagacggtaccgcct

SEQ ID NO: 98984 - DNA, 2489 bp, Homo sapiens
tacttacggctaggtacgaggactggcggtttaaattcggccgagggtcggacgggcgcggagacgcttctggaaggaacgccgcgatggctgcgcagggagagccccaggtccagttcaaacttgtattggttggtgatggtggtactggaaaaacgaccttcgtgaaacgtcatttgactggtgaatttgagaagaagtatgtagccaccttgggtgttgaggttcatcccctagtgttccacaccaacagaggacctattaagttcaatgtatgggacacagccggccaggagaaattcggtggactgagagatggctattatatccaagcccagtgtgccatcataatgtttgatgtaacatcgagagttacttacaagaatgtgcctaactggcatagagatctggtacgagtgtgtgaaaacatccccattgtgttgtgtggcaacaaagtggatattaaggacaggaaagtgaaggcgaaatccattgtcttccaccgaaagaagaatcttcagtactacgacatttctgccaaaagtaactacaactttgaaaagcccttcctctggcttgctaggaagctcattggagaccctaacttggaatttgttgccatgcctgctctcgccccaccagaagttgtcatggacccagctttggcagcacagtatgagcacgacttagaggttgctcagacaactgctctcccggatgaggatgatgacctgtgagaatgaagctggagcccagcgtcagaagtctagttttataggcagctgtcctgtgatgtcagcggtgcagcgtgtgtgccacctcattattatctagctaagcggaacatgtgcttcatctgtgggatgctgaaggagatgagtgggcttcggagtgaatgtggcagtttaaaaaataacttcattgtttggacctgcatatttagctgttttggaacgcagttgattccttgagtttcatatataagactgctgcagtcacatcacaatattcagtggtgaaatcttgtttgttactgtcattcccattccttttcgtttagaatcagaataaagttgtatttcaaatatctaagcaagtgaactcatcccttgtttataaatagcatttggaaaccactaaagtagggaagttttatgccatgttaatatttgaattgccttgcttttatcacttaatttgaaatctattgggttaatttctccctatgtttatttttgtacatttgagccatgtcacacaaactgatgatgacaggtcagcagtattctatttggttagaagggttacatggtgtaaatattagtgcagttaagctaaagcagtgtttgctccaccttcatattggctaggtagggtcacctagggaagcacttgctcaaaatctgtgacctgtcagaataaaaatgtggtttgtacatatcaaatagatattttaagggtaatattttcttttatggcaaaagtaatcatgttttaatgtagaacctcaaacaggatggaacatcagtggatggcaggaggttgggaattcttgctgttaaaaataattacaaattttgcacttttttgtttgaatgttagatgcttagtgtgaagttgatacgcaaggaaaatggtccatgtttacccacagttttcaggtactcctagactttaaagatgtcttgaacatttaagttcttcagcagttcacactacaccgtttttttgtttttttttcccccccgggagggtttttttgtagggcagcacagcagagcaggacatggatgaaatactaggaatatgcacagtggggcagtgtgggggcttctcagtaatggagaacagttggtgaaacttttttttttttttaactaagcatttaatttatcttgcatattttccacatttaaaaatgaattaggtctattaggataattaggagtttgatcccatcaacactattcttgtagcagttaggaatcttgagctatttttttctcatacgattactatagtccagtttaccaaagttttctttagatgtctgataatcttgagatgattgcttaccttaaaaggtatagaaaggatcacttaaatatatggaaaaatgaaataagggtgaagctgaataaagttctacttactgtattaactggcaacagttgagtttcttaagatctgaattgctgtgtatgttacgctgtattcagaaccagtttctaaccagcctgtgagatgggaagttttttccccataattgggatgaaacctttcattcaggtattttgaattgaaggtgtatgtgttgtttgtaaccttgtggagattgcaagtggtgttgacattctggatcttctatgtaacagttgaaatttggaagtgacgtcacttacctgtctaacgtggtgtgggagagaatttacaagtcctttattgaaagaataattgttgcaaaatatattgcttctactttgcctgga

SEQ ID NO: 98985 - DNA, 2470 bp, Homo sapiens
  misc_feature (27)..(27): n is a, c, g, or t
ttaagcgctagtacgagccgggtgtanagcggacgggcgcggagacgcttctggaaggaacgccgcgatggctgcgcagggagagccccaggtccagttcaaacttgtattggttggtgatggtggtactggaaaaacgaccttcgtgaaacgtcatttgactggtgaatttgagaagaagtatgtagccaccttgggtgttgaggttcatcccctagtgttccacaccaacagaggacctattaagttcaatgtatgggacacagccggccaggagaaattcggtggactgagagatggctattatatccaagcccagtgtgccatcataatgtttgatgtaacatcgagagttacttacaagaatgtgcctaactggcatagagatctggtacgagtgtgtgaaaacatccccattgtgttgtgtggcaacaaagtggatattaaggacaggaaagtgaaggcgaaatccattgtcttccaccgaaagaagaatcttcagtactacgacatttctgccaaaagtaactacaactttgaaaagcccttcctctggcttgctaggaagctcattggagaccctaacttggaatttgttgccatgcctgctctcgccccaccagaagttgtcatggacccagctttggcagcacagtatgagcacgacttagaggttgctcagacaactgctctcccggatgaggatgatgacctgtgagaatgaagctggagcccagcgtcagaagtctagttttataggcagctgtcctgtgatgtcagcggtgcagcgtgtgtgccacctcattattatctagctaagcggaacatgtgcttcatctgtgggatgctgaaggagatgagtgggcttcggagtgaatgtggcagtttaaaaaataacttcattgtttggacctgcatatttagctgttttggaacgcagttgattccttgagtttcatatataagactgctgcagtcacatcacaatattcagtggtgaaatcttgtttgttactgtcattcccattccttttcgtttagaatcagaataaagttgtatttcaaatatctaagcaagtgaactcatcccttgtttataaatagcatttggaaaccactaaagtagggaagttttatgccatgttaatatttgaattgccttgcttttatcacttaatttgaaatctattgggttaatttctccctatgtttatttttgtacatttgagccatgtcacacaaactgatgatgacaggtcagcagtattctatttggttagaagggttacatggtgtaaatattagtgcagttaagctaaagcagtgtttgctccaccttcatattggctaggtagggtcacctagggaagcacttgctcaaaatctgtgacctgtcagaataaaaatgtggtttgtacatatcaaatagatattttaagggtaatattttcttttatggcaaaagtaatcatgttttaatgtagaacctcaaacaggatggaacatcagtggatggcaggaggttgggaattcttgctgttaaaaataattacaaattttgcacttttttgtttgaatgttagatgcttagtgtgaagttgatacgcaaggaaaatggtccatgtttacccacagttttcaggtactcctagactttaaagatgtcttgaacatttaagttcttcagcagttcacactacaccgtttttttgtttttttttcccccccgggagggtttttttgtagggcagcacagcagagcaggacatggatgaaatactaggaatatgcacagtggggcagtgtgggggcttctcagtaatggagaacagttggtgaaacttttttttttttttaactaagcatttaatttatcttgcatattttccacatttaaaaatgaattaggtctattaggataattaggagtttgatcccatcaacactattcttgtagcagttaggaatcttgagctatttttttctcatacgattactatagtccagtttaccaaagttttctttagatgtctgataatcttgagatgattgcttaccttaaaaggtatagaaaggatcacttaaatatatggaaaaatgaaataagggtgaagctgaataaagttctacttactgtattaactggcaacagttgagtttcttaagatctgaattgctgtgtatgttacgctgtattcagaaccagtttctaaccagcctgtgagatgggaagttttttccccataattgggatgaaacctttcattcaggtattttgaattgaaggtgtatgtgttgtttgtaaccttgtggagattgcaagtggtgttgacattctggatcttctatgtaacagttgaaatttggaagtgacgtcacttacctgtctaacgtggtgtgggagagaatttacaagtcctttattgaaagaataattgttgcaaaatatattgcttctactttgcctgga

SEQ ID NO: 98986 - DNA, 1070 bp, Homo sapiens
  misc_feature (890)..(890): n is a, c, g, or t
  misc_feature (897)..(897): n is a, c, g, or t
ccgccccgcgccggccccgcccctgctctcgcgccggcgtcggctgcgtctccggcgtttgaattgcgcttccgccatctttccagcctcagtcggacgggcgcggagacgcttctggaaggaacgccgcgatggctgcgcagggagagccccaggtccagttcaaacttgtattggttggtgatggtggtactggaaaaacgaccttcgtgaaacgtcatttgactggtgaatttgagaagaagtatgtagccaccttgggtgttgaggttcatcccctagtgttccacaccaacagaggacctattaagttcaatgtatgggacacagccggccaggagaaattcggtggactgagagatggctattatatccaagcccagtgtgccatcataatgtttgatgtaacatcgagagttacttacaagaatgtgcctaactggcatagagatctggtacgagtgtgtgaaaacatccccattgtgttgtgtggcaacaaagtggatattaaggacaggaaagtgaaggcgaaatccattgtcttccaccgaaagaagaatcttcagtactacgacatttctgccaaaagtaactacaactttgaaaagcccttcctctggcttgctaggaagctcattggagaccctaacttggaatttgttgccatgcctgctctcgccccaccagaagttgtcatggacccagctttggcagcacagtatgagcacgacttagaggttgctcagacaactgctctcccggatgaggatgatgacctgtgagaatgaagctggagcccagcgtcagaagtctagttttataggcagctgtcctgtgatgtcagcggtgcagcgtgtgtgccacctcattattatctagctaagcggacngggatgnaaggaatatggtcggggagtgattaaaaaatctgtggctcattttggacaggctgatatagagggagcacattgggatgtgagaccgtgtgaaaggcaatacggaagaagaaagaggatatgttttttttccttttgtgttttttttttggaaaaaaaaaacagcaaaagaaa

SEQ ID NO: 98987 - DNA, 2450 bp, Homo sapiens
aggggtgcagaaacgatatacggctaggtcgaggctgggttgtggcgatggctgcgcagggagagccccaggtccagttcaaacttgtattggttggtgatggtggtactggaaaaacgaccttcgtgaaacgtcatttgactggtgaatttgagaagaagtatgtagccaccttgggtgttgaggttcatcccctagtgttccacaccaacagaggacctattaagttcaatgtatgggacacagccggccaggagaaattcggtggactgagagatggctattatatccaagcccagtgtgccatcataatgtttgatgtaacatcgagagttacttacaagaatgtgcctaactggcatagagatctggtacgagtgtgtgaaaacatccccattgtgttgtgtggcaacaaagtggatattaaggacaggaaagtgaaggcgaaatccattgtcttccaccgaaagaagaatcttcagtactacgacatttctgccaaaagtaactacaactttgaaaagcccttcctctggcttgctaggaagctcattggagaccctaacttggaatttgttgccatgcctgctctcgccccaccagaagttgtcatggacccagctttggcagcacagtatgagcacgacttagaggttgctcagacaactgctctcccggatgaggatgatgacctgtgagaatgaagctggagcccagcgtcagaagtctagttttataggcagctgtcctgtgatgtcagcggtgcagcgtgtgtgccacctcattattatctagctaagcggaacatgtgcttcatctgtgggatgctgaaggagatgagtgggcttcggagtgaatgtggcagtttaaaaaataacttcattgtttggacctgcatatttagctgttttggaacgcagttgattccttgagtttcatatataagactgctgcagtcacatcacaatattcagtggtgaaatcttgtttgttactgtcattcccattccttttcgtttagaatcagaataaagttgtatttcaaatatctaagcaagtgaactcatcccttgtttataaatagcatttggaaaccactaaagtagggaagttttatgccatgttaatatttgaattgccttgcttttatcacttaatttgaaatctattgggttaatttctccctatgtttatttttgtacatttgagccatgtcacacaaactgatgatgacaggtcagcagtattctatttggttagaagggttacatggtgtaaatattagtgcagttaagctaaagcagtgtttgctccaccttcatattggctaggtagggtcacctagggaagcacttgctcaaaatctgtgacctgtcagaataaaaatgtggtttgtacatatcaaatagatattttaagggtaatattttcttttatggcaaaagtaatcatgttttaatgtagaacctcaaacaggatggaacatcagtggatggcaggaggttgggaattcttgctgttaaaaataattacaaattttgcacttttttgtttgaatgttagatgcttagtgtgaagttgatacgcaaggaaaatggtccatgtttacccacagttttcaggtactcctagactttaaagatgtcttgaacatttaagttcttcagcagttcacactacaccgtttttttgtttttttttcccccccgggagggtttttttgtagggcagcacagcagagcaggacatggatgaaatactaggaatatgcacagtggggcagtgtgggggcttctcagtaatggagaacagttggtgaaacttttttttttttttaactaagcatttaatttatcttgcatattttccacatttaaaaatgaattaggtctattaggataattaggagtttgatcccatcaacactattcttgtagcagttaggaatcttgagctatttttttctcatacgattactatagtccagtttaccaaagttttctttagatgtctgataatcttgagatgattgcttaccttaaaaggtatagaaaggatcacttaaatatatggaaaaatgaaataagggtgaagctgaataaagttctacttactgtattaactggcaacagttgagtttcttaagatctgaattgctgtgtatgttacgctgtattcagaaccagtttctaaccagcctgtgagatgggaagttttttccccataattgggatgaaacctttcattcaggtattttgaattgaaggtgtatgtgttgtttgtaaccttgtggagattgcaagtggtgttgacattctggatcttctatgtaacagttgaaatttggaagtgacgtcacttacctgtctaacgtggtgtgggagagaatttacaagtcctttattgaaagaataattgttgcaaaatatattgcttctactttgcctgga

SEQ ID NO: 98988 - DNA, 2481 bp, Homo sapiens
  misc_feature (76)..(76): n is a, c, g, or t
  misc_feature (87)..(89): n is a, c, g, or t
ggaggaggcgcacgaatgatgtcataggcgatgaccgggttgttatttcatcacgagggcgcttctggaggaacgncgcgatggctnnncggagagccccaggtccagttcaaacttgtattggttggtgatggtggtactggaaaaacgaccttcgtgaaacgtcatttgactggtgaatttgagaagaagtatgtagccaccttgggtgttgaggttcatcccctagtgttccacaccaacagaggacctattaagttcaatgtatgggacacagccggccaggagaaattcggtggactgagagatggctattatatccaagcccagtgtgccatcataatgtttgatgtaacatcgagagttacttacaagaatgtgcctaactggcatagagatctggtacgagtgtgtgaaaacatccccattgtgttgtgtggcaacaaagtggatattaaggacaggaaagtgaaggcgaaatccattgtcttccaccgaaagaagaatcttcagtactacgacatttctgccaaaagtaactacaactttgaaaagcccttcctctggcttgctaggaagctcattggagaccctaacttggaatttgttgccatgcctgctctcgccccaccagaagttgtcatggacccagctttggcagcacagtatgagcacgacttagaggttgctcagacaactgctctcccggatgaggatgatgacctgtgagaatgaagctggagcccagcgtcagaagtctagttttataggcagctgtcctgtgatgtcagcggtgcagcgtgtgtgccacctcattattatctagctaagcggaacatgtgcttcatctgtgggatgctgaaggagatgagtgggcttcggagtgaatgtggcagtttaaaaaataacttcattgtttggacctgcatatttagctgttttggaacgcagttgattccttgagtttcatatataagactgctgcagtcacatcacaatattcagtggtgaaatcttgtttgttactgtcattcccattccttttcgtttagaatcagaataaagttgtatttcaaatatctaagcaagtgaactcatcccttgtttataaatagcatttggaaaccactaaagtagggaagttttatgccatgttaatatttgaattgccttgcttttatcacttaatttgaaatctattgggttaatttctccctatgtttatttttgtacatttgagccatgtcacacaaactgatgatgacaggtcagcagtattctatttggttagaagggttacatggtgtaaatattagtgcagttaagctaaagcagtgtttgctccaccttcatattggctaggtagggtcacctagggaagcacttgctcaaaatctgtgacctgtcagaataaaaatgtggtttgtacatatcaaatagatattttaagggtaatattttcttttatggcaaaagtaatcatgttttaatgtagaacctcaaacaggatggaacatcagtggatggcaggaggttgggaattcttgctgttaaaaataattacaaattttgcacttttttgtttgaatgttagatgcttagtgtgaagttgatacgcaaggaaaatggtccatgtttacccacagttttcaggtactcctagactttaaagatgtcttgaacatttaagttcttcagcagttcacactacaccgtttttttgtttttttttcccccccgggagggtttttttgtagggcagcacagcagagcaggacatggatgaaatactaggaatatgcacagtggggcagtgtgggggcttctcagtaatggagaacagttggtgaaacttttttttttttttaactaagcatttaatttatcttgcatattttccacatttaaaaatgaattaggtctattaggataattaggagtttgatcccatcaacactattcttgtagcagttaggaatcttgagctatttttttctcatacgattactatagtccagtttaccaaagttttctttagatgtctgataatcttgagatgattgcttaccttaaaaggtatagaaaggatcacttaaatatatggaaaaatgaaataagggtgaagctgaataaagttctacttactgtattaactggcaacagttgagtttcttaagatctgaattgctgtgtatgttacgctgtattcagaaccagtttctaaccagcctgtgagatgggaagttttttccccataattgggatgaaacctttcattcaggtattttgaattgaaggtgtatgtgttgtttgtaaccttgtggagattgcaagtggtgttgacattctggatcttctatgtaacagttgaaatttggaagtgacgtcacttacctgtctaacgtggtgtgggagagaatttacaagtcctttattgaaagaataattgttgcaaaatatattgcttctactttgcctgga

SEQ ID NO: 98989 - DNA, 2531 bp, Homo sapiens
  misc_feature (12)..(13): n is a, c, g, or t
  misc_feature (36)..(36): n is a, c, g, or t
  misc_feature (44)..(44): n is a, c, g, or t
  misc_feature (53)..(54): n is a, c, g, or t
  misc_feature (79)..(79): n is a, c, g, or t
  misc_feature (87)..(87): n is a, c, g, or t
  misc_feature (92)..(92): n is a, c, g, or t
  misc_feature (103)..(103): n is a, c, g, or t
  misc_feature (115)..(115): n is a, c, g, or t
ggcttctccganngccgtcacggtcgaggacagggncagccggnacgaaacgnnctgtcgtcggcaacgtgcatagcgncctgcagnagtgngactcgactgncgagcgaggagnacgccactcacaggttacctaggcttgcaagacctgtgctaatatggctgtggttggattggtcggtacttggagacaatgctgagccttcgtgaaacgtcatttgactggtgaatttgagaagaagtatgtagccaccttgggtgttgaggttcatcccctagtgttccacaccaacagaggacctattaagttcaatgtatgggacacagccggccaggagaaattcggtggactgagagatggctattatatccaagcccagtgtgccatcataatgtttgatgtaacatcgagagttacttacaagaatgtgcctaactggcatagagatctggtacgagtgtgtgaaaacatccccattgtgttgtgtggcaacaaagtggatattaaggacaggaaagtgaaggcgaaatccattgtcttccaccgaaagaagaatcttcagtactacgacatttctgccaaaagtaactacaactttgaaaagcccttcctctggcttgctaggaagctcattggagaccctaacttggaatttgttgccatgcctgctctcgccccaccagaagttgtcatggacccagctttggcagcacagtatgagcacgacttagaggttgctcagacaactgctctcccggatgaggatgatgacctgtgagaatgaagctggagcccagcgtcagaagtctagttttataggcagctgtcctgtgatgtcagcggtgcagcgtgtgtgccacctcattattatctagctaagcggaacatgtgcttcatctgtgggatgctgaaggagatgagtgggcttcggagtgaatgtggcagtttaaaaaataacttcattgtttggacctgcatatttagctgttttggaacgcagttgattccttgagtttcatatataagactgctgcagtcacatcacaatattcagtggtgaaatcttgtttgttactgtcattcccattccttttcgtttagaatcagaataaagttgtatttcaaatatctaagcaagtgaactcatcccttgtttataaatagcatttggaaaccactaaagtagggaagttttatgccatgttaatatttgaattgccttgcttttatcacttaatttgaaatctattgggttaatttctccctatgtttatttttgtacatttgagccatgtcacacaaactgatgatgacaggtcagcagtattctatttggttagaagggttacatggtgtaaatattagtgcagttaagctaaagcagtgtttgctccaccttcatattggctaggtagggtcacctagggaagcacttgctcaaaatctgtgacctgtcagaataaaaatgtggtttgtacatatcaaatagatattttaagggtaatattttcttttatggcaaaagtaatcatgttttaatgtagaacctcaaacaggatggaacatcagtggatggcaggaggttgggaattcttgctgttaaaaataattacaaattttgcacttttttgtttgaatgttagatgcttagtgtgaagttgatacgcaaggaaaatggtccatgtttacccacagttttcaggtactcctagactttaaagatgtcttgaacatttaagttcttcagcagttcacactacaccgtttttttgtttttttttcccccccgggagggtttttttgtagggcagcacagcagagcaggacatggatgaaatactaggaatatgcacagtggggcagtgtgggggcttctcagtaatggagaacagttggtgaaacttttttttttttttaactaagcatttaatttatcttgcatattttccacatttaaaaatgaattaggtctattaggataattaggagtttgatcccatcaacactattcttgtagcagttaggaatcttgagctatttttttctcatacgattactatagtccagtttaccaaagttttctttagatgtctgataatcttgagatgattgcttaccttaaaaggtatagaaaggatcacttaaatatatggaaaaatgaaataagggtgaagctgaataaagttctacttactgtattaactggcaacagttgagtttcttaagatctgaattgctgtgtatgttacgctgtattcagaaccagtttctaaccagcctgtgagatgggaagttttttccccataattgggatgaaacctttcattcaggtattttgaattgaaggtgtatgtgttgtttgtaaccttgtggagattgcaagtggtgttgacattctggatcttctatgtaacagttgaaatttggaagtgacgtcacttacctgtctaacgtggtgtgggagagaatttacaagtcctttattgaaagaataattgttgcaaaatatattgcttctactttgcctgga

SEQ ID NO: 98990 - DNA, 2551 bp, Homo sapiens
  misc_feature (184)..(184): n is a, c, g, or t
ggtggaccgggcgcggatacagcttctggatagcgaacgaccgagagtaagttagcgctaggggaagatgccccataggtccgatgtttcaagaactctcgatactttgtgctttggttgcaatgagtgtgtacgtagtgcatagacacagcggtacctccttcctgattgaagatagcaggtntccagttatttgaacattgtgttcggaatttatggcacgaaaggtatagtacttgtaagtccaactcgtatgtcggtgctatgagccaccttgggtgttgaggttcatcccctagtgttccacaccaacagaggacctattaagttcaatgtatgggacacagccggccaggagaaattcggtggactgagagatggctattatatccaagcccagtgtgccatcataatgtttgatgtaacatcgagagttacttacaagaatgtgcctaactggcatagagatctggtacgagtgtgtgaaaacatccccattgtgttgtgtggcaacaaagtggatattaaggacaggaaagtgaaggcgaaatccattgtcttccaccgaaagaagaatcttcagtactacgacatttctgccaaaagtaactacaactttgaaaagcccttcctctggcttgctaggaagctcattggagaccctaacttggaatttgttgccatgcctgctctcgccccaccagaagttgtcatggacccagctttggcagcacagtatgagcacgacttagaggttgctcagacaactgctctcccggatgaggatgatgacctgtgagaatgaagctggagcccagcgtcagaagtctagttttataggcagctgtcctgtgatgtcagcggtgcagcgtgtgtgccacctcattattatctagctaagcggaacatgtgcttcatctgtgggatgctgaaggagatgagtgggcttcggagtgaatgtggcagtttaaaaaataacttcattgtttggacctgcatatttagctgttttggaacgcagttgattccttgagtttcatatataagactgctgcagtcacatcacaatattcagtggtgaaatcttgtttgttactgtcattcccattccttttcgtttagaatcagaataaagttgtatttcaaatatctaagcaagtgaactcatcccttgtttataaatagcatttggaaaccactaaagtagggaagttttatgccatgttaatatttgaattgccttgcttttatcacttaatttgaaatctattgggttaatttctccctatgtttatttttgtacatttgagccatgtcacacaaactgatgatgacaggtcagcagtattctatttggttagaagggttacatggtgtaaatattagtgcagttaagctaaagcagtgtttgctccaccttcatattggctaggtagggtcacctagggaagcacttgctcaaaatctgtgacctgtcagaataaaaatgtggtttgtacatatcaaatagatattttaagggtaatattttcttttatggcaaaagtaatcatgttttaatgtagaacctcaaacaggatggaacatcagtggatggcaggaggttgggaattcttgctgttaaaaataattacaaattttgcacttttttgtttgaatgttagatgcttagtgtgaagttgatacgcaaggaaaatggtccatgtttacccacagttttcaggtactcctagactttaaagatgtcttgaacatttaagttcttcagcagttcacactacaccgtttttttgtttttttttcccccccgggagggtttttttgtagggcagcacagcagagcaggacatggatgaaatactaggaatatgcacagtggggcagtgtgggggcttctcagtaatggagaacagttggtgaaacttttttttttttttaactaagcatttaatttatcttgcatattttccacatttaaaaatgaattaggtctattaggataattaggagtttgatcccatcaacactattcttgtagcagttaggaatcttgagctatttttttctcatacgattactatagtccagtttaccaaagttttctttagatgtctgataatcttgagatgattgcttaccttaaaaggtatagaaaggatcacttaaatatatggaaaaatgaaataagggtgaagctgaataaagttctacttactgtattaactggcaacagttgagtttcttaagatctgaattgctgtgtatgttacgctgtattcagaaccagtttctaaccagcctgtgagatgggaagttttttccccataattgggatgaaacctttcattcaggtattttgaattgaaggtgtatgtgttgtttgtaaccttgtggagattgcaagtggtgttgacattctggatcttctatgtaacagttgaaatttggaagtgacgtcacttacctgtctaacgtggtgtgggagagaatttacaagtcctttattgaaagaataattgttgcaaaatatattgcttctactttgcctgga

SEQ ID NO: 98991 - DNA, 1087 bp, Homo sapiens
tacttacggctaggtacgaggactggcggtttaaattcggccgagggtcggacgggcgcggagacgcttctggaaggaacgccgcgatggctgcgcagggagagccccaggtccagttcaaacttgtattggttggtgatggtggtactggaaaaacgaccttcgtgaaacgtcatttgactggtgaatttgagaagaagtatgtagccaccttgggtgttgaggttcatcccctagtgttccacaccaacagaggacctattaagttcaatgtatgggacacagccggccaggagaaattcggtggactgagagatggctattatatccaagcccagtgtgccatcataatgtttgatgtaacatcgagagttacttacaagaatgtgcctaactggcatagagatctggtacgagtgtgtgaaaacatccccattgtgttgtgtggcaacaaagtggatattaaggacaggaaagtgaaggcgaaatccattgtcttccaccgaaagaagaatcttcagtactacgacatttctgccaaaagtaactacaactttgaaaagcccttcctctggcttgctaggaagctcattggagaccctaacttggaatttgttgccatgcctgctctcgccccaccagaagttgtcatggacccagctttggcagcacagtatgagcacgacttagaggttgctcagacaactgctctcccggatgaggatgatgacctgtgagaatgaagctggagcccagcgtcagaagtctagttttataggcagctgtcctgtgatgtcagcggtgcagcgtgtgtgccacctcattattatctagctaagcggaacatgtgcttcatctgtgggatgctgaaggagatgagtgggcttcggagtgaatgtggcagtttaaaaaataacttcattgtttggacctgcatatttagctgttttggaacgcagttgattccttgagtttcatatataagactgctgcagtcacatcacaatattcagtggtgaaatcttgtttgttactgtcattcccattccttttcgtttagaatcagaataaagttgtatttcaaata

SEQ ID NO: 98992 - DNA, 2184 bp, Homo sapiens
gaggatcccgaatacagagctatccaagcccagtgtgccatcataatgtttgatgtaacatcgagagttacttacaagaatgtgcctaactggcatagagatctggtacgagtgtgtgaaaacatccccattgtgttgtgtggcaacaaagtggatattaaggacaggaaagtgaaggcgaaatccattgtcttccaccgaaagaagaatcttcagtactacgacatttctgccaaaagtaactacaactttgaaaagcccttcctctggcttgctaggaagctcattggagaccctaacttggaatttgttgccatgcctgctctcgccccaccagaagttgtcatggacccagctttggcagcacagtatgagcacgacttagaggttgctcagacaactgctctcccggatgaggatgatgacctgtgagaatgaagctggagcccagcgtcagaagtctagttttataggcagctgtcctgtgatgtcagcggtgcagcgtgtgtgccacctcattattatctagctaagcggaacatgtgcttcatctgtgggatgctgaaggagatgagtgggcttcggagtgaatgtggcagtttaaaaaataacttcattgtttggacctgcatatttagctgttttggaacgcagttgattccttgagtttcatatataagactgctgcagtcacatcacaatattcagtggtgaaatcttgtttgttactgtcattcccattccttttcgtttagaatcagaataaagttgtatttcaaatatctaagcaagtgaactcatcccttgtttataaatagcatttggaaaccactaaagtagggaagttttatgccatgttaatatttgaattgccttgcttttatcacttaatttgaaatctattgggttaatttctccctatgtttatttttgtacatttgagccatgtcacacaaactgatgatgacaggtcagcagtattctatttggttagaagggttacatggtgtaaatattagtgcagttaagctaaagcagtgtttgctccaccttcatattggctaggtagggtcacctagggaagcacttgctcaaaatctgtgacctgtcagaataaaaatgtggtttgtacatatcaaatagatattttaagggtaatattttcttttatggcaaaagtaatcatgttttaatgtagaacctcaaacaggatggaacatcagtggatggcaggaggttgggaattcttgctgttaaaaataattacaaattttgcacttttttgtttgaatgttagatgcttagtgtgaagttgatacgcaaggaaaatggtccatgtttacccacagttttcaggtactcctagactttaaagatgtcttgaacatttaagttcttcagcagttcacactacaccgtttttttgtttttttttcccccccgggagggtttttttgtagggcagcacagcagagcaggacatggatgaaatactaggaatatgcacagtggggcagtgtgggggcttctcagtaatggagaacagttggtgaaacttttttttttttttaactaagcatttaatttatcttgcatattttccacatttaaaaatgaattaggtctattaggataattaggagtttgatcccatcaacactattcttgtagcagttaggaatcttgagctatttttttctcatacgattactatagtccagtttaccaaagttttctttagatgtctgataatcttgagatgattgcttaccttaaaaggtatagaaaggatcacttaaatatatggaaaaatgaaataagggtgaagctgaataaagttctacttactgtattaactggcaacagttgagtttcttaagatctgaattgctgtgtatgttacgctgtattcagaaccagtttctaaccagcctgtgagatgggaagttttttccccataattgggatgaaacctttcattcaggtattttgaattgaaggtgtatgtgttgtttgtaaccttgtggagattgcaagtggtgttgacattctggatcttctatgtaacagttgaaatttggaagtgacgtcacttacctgtctaacgtggtgtgggagagaatttacaagtcctttattgaaagaataattgttgcaaaatatattgcttctactttgcctgga

SEQ ID NO: 98993 - DNA, 2464 bp, Homo sapiens
gaccagctgcctgagtagctgggactacaggcgccggcgtcggctgcgtctccggcgtttgaattgcgcttccgccatctttccagcctcagtcggacgggcgcggagacgcttctggaaggaacgccgcgatggctgcgcagggagagccccaggtccagttcaaacttgtattggttggtgatggtggtactggaaaaacgaccttcgtgaaacgtcatttgactggtgaatttgagaagaagtatgtagccaccttgggtgttgaggttcatcccctagtgttccacaccaacagaggacctattaagttcaatgtatgggacacagccggccaggagaaattcggtggactgagagatggctattatatccaagcccagtgtgccatcataatgtttgatgtaacatcgagagttacttacaagaatgtgcctaactggcatagagatctggtacgagtgtgtgaaaacatccccattgtgttgtgtggcaacaaagtggatattaaggacaggaaagtgaaggcgaaatccattgtcttccaccgaaagaagaatcttcagtactacgacatttctgccaaaagtaactacaactttgaaaagcccttcctctggcttgctaggaagctcattggagaccctaacttggaatttgttgccatgttgctcagacaactgctctcccggatgaggatgatgacctgtgagaatgaagctggagcccagcgtcagaagtctagttttataggcagctgtcctgtgatgtcagcggtgcagcgtgtgtgccacctcattattatctagctaagcggaacatgtgcttcatctgtgggatgctgaaggagatgagtgggcttcggagtgaatgtggcagtttaaaaaataacttcattgtttggacctgcatatttagctgttttggaacgcagttgattccttgagtttcatatataagactgctgcagtcacatcacaatattcagtggtgaaatcttgtttgttactgtcattcccattccttttcgtttagaatcagaataaagttgtatttcaaatatctaagcaagtgaactcatcccttgtttataaatagcatttggaaaccactaaagtagggaagttttatgccatgttaatatttgaattgccttgcttttatcacttaatttgaaatctattgggttaatttctccctatgtttatttttgtacatttgagccatgtcacacaaactgatgatgacaggtcagcagtattctatttggttagaagggttacatggtgtaaatattagtgcagttaagctaaagcagtgtttgctccaccttcatattggctaggtagggtcacctagggaagcacttgctcaaaatctgtgacctgtcagaataaaaatgtggtttgtacatatcaaatagatattttaagggtaatattttcttttatggcaaaagtaatcatgttttaatgtagaacctcaaacaggatggaacatcagtggatggcaggaggttgggaattcttgctgttaaaaataattacaaattttgcacttttttgtttgaatgttagatgcttagtgtgaagttgatacgcaaggaaaatggtccatgtttacccacagttttcaggtactcctagactttaaagatgtcttgaacatttaagttcttcagcagttcacactacaccgtttttttgtttttttttcccccccgggagggtttttttgtagggcagcacagcagagcaggacatggatgaaatactaggaatatgcacagtggggcagtgtgggggcttctcagtaatggagaacagttggtgaaacttttttttttttttaactaagcatttaatttatcttgcatattttccacatttaaaaatgaattaggtctattaggataattaggagtttgatcccatcaacactattcttgtagcagttaggaatcttgagctatttttttctcatacgattactatagtccagtttaccaaagttttctttagatgtctgataatcttgagatgattgcttaccttaaaaggtatagaaaggatcacttaaatatatggaaaaatgaaataagggtgaagctgaataaagttctacttactgtattaactggcaacagttgagtttcttaagatctgaattgctgtgtatgttacgctgtattcagaaccagtttctaaccagcctgtgagatgggaagttttttccccataattgggatgaaacctttcattcaggtattttgaattgaaggtgtatgtgttgtttgtaaccttgtggagattgcaagtggtgttgacattctggatcttctatgtaacagttgaaatttggaagtgacgtcacttacctgtctaacgtggtgtgggagagaatttacaagtcctttattgaaagaataattgttgcaaaatatattgcttctactttgcctgga

SEQ ID NO: 98994 - DNA, 910 bp, Homo sapiens
ccgccccgcgccggccccgcccctgctctcgcgccggcgtcggctgcgtctccggcgtttgaattgcgcttccgccatctttccagcctcagtcggacgggcgcggagacgcttctggaaggaacgccgcgatggctgcgcagggagagccccaggtccagttcaaacttgtattggttggtgatggtggtactggaaaaacgaccttcgtgaaacgtcatttgactggtgaatttgagaagaagtatgtagccaccttgggtgttgaggttcatcccctagtgttccacaccaacagaggacctattaagttcaatgtatgggacacagccggccaggagaaattcggtggactgagagatggctattatatccaagcccagtgtgccatcataatgtttgatgtaacatcgagagttacttacaagaatgtgcctaactggcatagagatctggtacgagtgtgtgaaaacatccccattgtgttgtgtggcaacaaagtggatattaaggacaggaaagtgaaggcgaaatccattgtcttccaccgaaagaagaatcttcagtactacgacatttctgccaaaagtaactacaactttgaaaagcccttcctctggcttgctaggaagctcattggagaccctaacttggaatttgttgccatgcctgctctcgccccaccagaagttgtcatggacccagctttggcagcacagtatgagcacgacttagagtggaacacattttgaccccaattaaagggtgctcacacacttgttttccgggggaggaaatgacccgggtgagcttggcccaccggctaaatctatttttttagggcgtgtccttgattccgcccaccggtttgccccctatattatttacttagcggtgtgtttttgggggg

SEQ ID NO: 98995 - DNA, 1903 bp, Homo sapiens
gatctagcaggatcctaatggctggctgcacattaggcctgctctcgccccaccagaagttgtcatggacccagctttggcagcacagtatgagcacgacttagaggttgctcagacaactgctctcccggatgaggatgatgacctgtgagaatgaagctggagcccagcgtcagaagtctagttttataggcagctgtcctgtgatgtcagcggtgcagcgtgtgtgccacctcattattatctagctaagcggaacatgtgcttcatctgtgggatgctgaaggagatgagtgggcttcggagtgaatgtggcagtttaaaaaataacttcattgtttggacctgcatatttagctgttttggaacgcagttgattccttgagtttcatatataagactgctgcagtcacatcacaatattcagtggtgaaatcttgtttgttactgtcattcccattccttttcgtttagaatcagaataaagttgtatttcaaatatctaagcaagtgaactcatcccttgtttataaatagcatttggaaaccactaaagtagggaagttttatgccatgttaatatttgaattgccttgcttttatcacttaatttgaaatctattgggttaatttctccctatgtttatttttgtacatttgagccatgtcacacaaactgatgatgacaggtcagcagtattctatttggttagaagggttacatggtgtaaatattagtgcagttaagctaaagcagtgtttgctccaccttcatattggctaggtagggtcacctagggaagcacttgctcaaaatctgtgacctgtcagaataaaaatgtggtttgtacatatcaaatagatattttaagggtaatattttcttttatggcaaaagtaatcatgttttaatgtagaacctcaaacaggatggaacatcagtggatggcaggaggttgggaattcttgctgttaaaaataattacaaattttgcacttttttgtttgaatgttagatgcttagtgtgaagttgatacgcaaggaaaatggtccatgtttacccacagttttcaggtactcctagactttaaagatgtcttgaacatttaagttcttcagcagttcacactacaccgtttttttgtttttttttcccccccgggagggtttttttgtagggcagcacagcagagcaggacatggatgaaatactaggaatatgcacagtggggcagtgtgggggcttctcagtaatggagaacagttggtgaaacttttttttttttttaactaagcatttaatttatcttgcatattttccacatttaaaaatgaattaggtctattaggataattaggagtttgatcccatcaacactattcttgtagcagttaggaatcttgagctatttttttctcatacgattactatagtccagtttaccaaagttttctttagatgtctgataatcttgagatgattgcttaccttaaaaggtatagaaaggatcacttaaatatatggaaaaatgaaataagggtgaagctgaataaagttctacttactgtattaactggcaacagttgagtttcttaagatctgaattgctgtgtatgttacgctgtattcagaaccagtttctaaccagcctgtgagatgggaagttttttccccataattgggatgaaacctttcattcaggtattttgaattgaaggtgtatgtgttgtttgtaaccttgtggagattgcaagtggtgttgacattctggatcttctatgtaacagttgaaatttggaagtgacgtcacttacctgtctaacgtggtgtgggagagaatttacaagtcctttattgaaagaataattgttgcaaaatatattgcttctactttgcctgga

SEQ ID NO: 98996 - DNA, 696 bp, Homo sapiens
gaccagctgcctgagtagctgggactacaggcgccggcgtcggctgcgtctccggcgtttgaattgcgcttccgccatctttccagcctcagtcggacgggcgcggagacgcttctggaaggaacgccgcgatggctgcgcagggagagccccaggtccagttcaaacttgtattggttggtgatggtggtactggaaaaacgaccttcgtgaaacgtcatttgactggtgaatttgagaagaagtatgtagccaccttgggtgttgaggttcatcccctagtgttccacaccaacagaggacctattaagttcaatgtatgggacacagccggccaggagaaattcggtggactgagagatggctattatatccaagcccagtgtgccatcataatgtttgatgtaacatcgagagttacttacaagaatgtgcctaactggcatagagatctggtacgagtgtgtgaaaacatccccattgtgttgtgtggcaacaaagtggatattaaggacaggaaagtgaaggcgaaatccattgtcttccaccgaaagaagaatcttcagtactacgacatttctgccaaaagtaactacaactttgaaaagcccttcctctggcttgctaggaagctcattggagaccctaacttggaatttgttgccatcgacctatgagggatcctctagaacagcc

SEQ ID NO: 98997 - DNA, 556 bp, Homo sapiens
gggggctctgctcccttcctcggtctccccactcaggcttgccagtccctctcagtgggtgactgaaagccctgcagcgcgccggctcctgggttctggtttcgcttttcggcgctgttgagggggccggccccgttgtttgttgttgtgaacggaaaaaccgaggtgtcatcgtccctggaatttttcttcgaccaatgtttgatcttgactgagaggttaccccttaccttctgtccatctgcagcctttgtttggatgaaagatccatagtgtgtggtttcccagacctttacttatatttctcgtatacaaaacgctcttcatttgaatatttacagggttttacgttgagctcttggacgatgagattttcctgggtgttttgcactcaagtaccgttggagtttacattctcatagaatcagtattaggcctggaaaattgagccagagggtgaaattctggcaggagcatagacttaaattgaaggtgaattttaccgtaacgatctctaggccttttgcttaataactatgtggatgtagagaatttt

SEQ ID NO: 98998 - DNA, 204 bp, Homo sapiens
ggagctgcagatgtttcactgggaataacaaacttcaaaattctgctttactgggttgtagcaattcatggctacagggagaaagaaacgctgttttaagctgagtaaaccaaagcagtgggaggaattcaaatccaagtaccccagtgttaggcactctggggacgaggtgtagggagagggtggtacagagagaaaatttct

SEQ ID NO: 98999 - DNA, 698 bp, Homo sapiens
ggctgttagtagctttgcctggtgtttcttgcttggattggcgtttcctccctcgcattcctttgctggacttgaccttttctctgctgggtttggcattcccttgactgggctgggtgtttccttgggagggggggcttggcctttcctggggtgggcgtggggtccccctggtgggcgtgggctttccccgggtgggtgtgggttttccctgggtggggtgggctgggctcccttgctgggcttggcaagttttggctgggattgacctttctcttcaaacagattggaaacccagggtttcctgctagttggtgaaactggttggtagacgcgatctgttcgctactaccggcctcccctggctgttaaaagcagatggtggctgaggtttgttcaatgcccgctgcctctgctgtgaagaagccatttgatctcagaagcaagatgggcaagtggtgccaccaccgcttcccctgctgcagggggagcggcaagagcaacatgggcacttctggagaccacgacgactcctttatgaagacgctcaggagcaagatgggcaagtgttgccatcactgcttcccctgctgcagggggagcggcacgagcaatgtgggcacttctggagaccatgacaactcctttatgaagacactcaggagcaagatgggcaagtggtgctgtcactgcttccc

SEQ ID NO: 99000 - DNA, 268 bp, Homo sapiens
tgtcatgtacctgtacttccagtgggagctgaggtgggaagatctcttgagcctgggaggtggaggttgcagtgagcccggattgcgccttgcaccactacagggaaaaaaaaatgaatgagaagcctgagctttctggagcaaatcttactgtttgggagtgtaagaggctagtctgacttcttgaccctccagattaagatagatgctgttcctctgggcttcctcagcaccccaggtttcccatcatggctcttaccactttgtg

SEQ ID NO: 99001 - DNA, 324 bp, Homo sapiens
gagggaagccaggcactgggacagcaaccggaaggtgtttttctatggccacaacttccaggagacaatgaggtcacaggatgggtgaacccatgatccgtggcaccaccaagctcttggttaccacggcacaatgccttggcagcctaagcccttcctgccctactactaacctgctggcagttccgaatccacctctgcacgctctcagattctgtccttacctgtccaccccgttcccatcactccaagaccaggccctttgttcctcctgcagtggcctcctggttagccaccccttctggtttttccttgccctgactc

SEQ ID NO: 99002 - DNA, 452 bp, Homo sapiens
ctagcactttggaggccaaggcgggaggattgcttaagccccaggaggtcaaggctgtagtgagctgcaattgtgccattgcactccagcctgagtgacagagcaagaccctatttccaaaaacaaaacaaaacctacgttctttataactgtatggttgtcctttatcctgttagaacaaattctgtttaacagatttactgttgttgggaatttagctgttttccattttttgctatcataattagtgaagtaacattcatcattgtaaatatatttttcaatatctctgtaactgtttccttaagataaatttccagaagtagtattgctggaacaaagactttgaagaatttgtttgtccaaaattgccttttaggcttggcatggtggctcatgcctgtaatcccagctacttgggaggctgagacaggaggactgcttgaagttgg

SEQ ID NO: 99003 - DNA, 336 bp, Homo sapiens
ggttcgggaagctggccaggaaccttcctcggttagaggacaggagagacacagcaccataaagggtcagggaggaatgacagaccagcactagttaacttcgaaaacaccttctgccaccgaggcaagagggaatcccctgcctctccaaggcctggcgttctcctccatgagatgctgacgggataaaaggcagagcccatgtgtgcagagaccccacgacacagaaacacatcagctcccttggggcagcagccgtgcccagggagaggctgagagagtcagagagggatggttgctcctaactctgagtccacggagagataggaggcccag

SEQ ID NO: 99004 - DNA, 595 bp, Homo sapiens
aactgccagtgcccagcagtcgtagttgagtcctgctgatgaaacagaaaacctgcaacctgccctgtttgcaggcagaacagacagttaaatatatcagccaaggaacagcaggggctggtagctgaagtttggacagtcgagcccgtaaatgatttattccactctgttaagcttcctgaatcacagagaagttgtcagaaagattttagcctccgctataggaagtcctgcccaccttctccagatctctgttctcatagtccatcctctggttccaggtggaagaattctaaaatcacacaagaaaatgtaagatatcttcctcgaatatcaacagagaagaacagcagccacgtggataaggcagagtttgggaaatcctggattcccttatcataaagcatcttacagtaacctcagaaatgcagaagttacttgtaatggtgctgtagacactgtacgagaaagtttcacctttatgatctaatttaattctcacaaaaaccctgttaggtagggtgttattatttaaatttaaatcagaggaaaatgtaacaggaattcattctgcaacttacagtcaaagagataa

SEQ ID NO: 99005 - DNA, 753 bp, Homo sapiens
acccggcagttgggggatgccgacgcctgggccttgaggatgctgcggaagctcaccatcgagcagatcaacgactggttcaccatcggcaagacggtgaccaatgtggagctgctgggcgcgccgcccgccttcccggcaggggcggccagggaggaggtgcagcgccaggacgtggcccccggcgctggtcccgcggcccaggctccggctctggcccaagctccggcccggccggccgctgcgttcgaaaggtcactcagccaaaggagctcagaagtagagtatattaacaaatacagacagctcgaagcacaagagcttgatgtgtgtcgcagtgtccaaccaaccagtgggccaggtccaaggccatctttggctaaattaagcagtgtgacatgcatcccagggacaacttataaatatcctgatttgcctataagtcgatacaaggaagaggttgtgtctttgatagaaagtaattccgtggtgattatccatggggccacgggaagcggtaaaagcactcagctcccgcagtatatcttggaccactacgttcagcgctccgcctactgcagcattgtggtcacccagccccggaagataggggcaagcagcatcgccaggtggatcagtaaagagcgtgcctggaccctgggaggtgtggtgggctaccaggtagggctagagaaaatagcaacagaggacaccaggctaatttatatgacaactggagtcctgcttcagaaa

SEQ ID NO: 99006 - DNA, 585 bp, Homo sapiens
aagtcccttcccttctctgagcctcagtttctgcaactgcagtgaggggtatggactagaggagaagtctgtgaccttctgggggttatagaaccctttgagaatctaatgatggctattagcagattctctccccagacacacaaattcagagtggttgtgactggcccccatcaaaagccaagttaagaacatggaaattctctaggggcccctctggctttgacaagccatggctctcacagtctagacaggaccaaagccacaaacacaacatctgagagccctgggatctcaccatttcagcttcccccgtggccctgaaataaatctttaaactcttggacctgctggcttcaggtggatttgtggacatgcctagctgtctggagaagccacaggagaaactgagcccttccttcccatccctcagcctcctcctccttctcctccatcaggaatctgccaggtcagcctagacctctccctggggcagttccgggagctgcttctgatctggaatgaaggcaggacccagtgccaggctcaagtgccagcctgtacccccagatccctcctggggac

SEQ ID NO: 99007 - DNA, 525 bp, Homo sapiens
gataggattaggagaaatacctaacgtagatgacaggatgatgggtgcagcaagccaccatggcacgtgtgtacctatgtaacaaacctgcatgttctgcacatgtatcccagaacttaaagtataaaaaaaaagatttatggatatgcaaagggccatcagaagccaacatacacttgaaaagaacaaggtgaaagataattttccaagaacatcaacttatctcagcacaacaattaaattgacatttgatttatgctaggcatatagaacactgatgcagaatgctgagtcctgaaacacatcatacattaatggactcttgatatgtcatatatgtttttaagtcactggaaagcagtgggaaaagtatgatcctatcagttgatgagcagggcacaattggatattgataaggtaaaataaaattacaaccctatctcctatcatatacaatgcccatgtgtatttgatgcctaagtgtggaaaataaagtgacaaaacttttagaggataataaaacag

SEQ ID NO: 99008 - DNA, 494 bp, Homo sapiens
tcgttgggagcctgcggagattctgcccagtacatacataccttgcgttttctcggagcctgacaggtgctgccttgaagcggaaagacttcacctcacagggtggccagctgtcctttctcttcctctccctgtcttgtgtgctcatgataatggatagatagacatctccatggtagaaataatgcagccctttctgcagtccatggttccacagcatatggtcagtagacttagatgagtgctacataaagtgtaattagttctgcaccacggtgtcttaccttctgaaaaggaaactctggtattgacttagaaatgccagttttatccttccgaccagaacgcaagtcctgaatgaggccagaggccaatgaaaggtcctttcttctctcttttcaaatctgctgtattaaacagtgacttttcctagtcattcagtattcattcattcatccatttattcaagtttttgagtaccttctttgtggatg

SEQ ID NO: 99009 - DNA, 455 bp, Homo sapiens
aaaaacaaaatcagtctatccctgtgtggtaaagaattaactttacccaaagacaggtctggcttttgcctaggctcttaggaggtgctctctaagctgttggaatgtggtgtctgaaaagaggctctttccttacccaggagccttggcccactctggatagggtggggtctctgggtcatgtagtatcagttttgcctccagaagggctggagactgaggtcagctacctgggcagccaaccacatctttgtgaccaagcctcaataagaactctggacaccaaggcacaggtgggcatctctggttgatggtgcgccacgcatgttatcacacattactgaggggaaggttagcgctatctgtgactcccaagggagaagaccactggaagcttcgtgagtagaacttttctggactttccccatgcatctcttcccttggctgatttaact

SEQ ID NO: 99010 - DNA, 447 bp, Homo sapiens
attctatgaggtctgcataatcctaatctcaaaaccatacaaagacatttaatgaaaactacagacttacatctgtcatgcacatagatgcaagattccttgacagtatcttagcaaatccaatccaacaatgtataaaagttatacactgcagccacgtggcatttgtgtaggtacgcaagactggttcaacattcaaaaatcaatgtgtaacttaccatatttgaggtgatggatatgttaattgcactgatttgatcatttcacaatgtatagatgtatcagaataccactttgtacccaatacatatatacaattactatttttcaattaaaaagtttaggccgggcgtggtggctcatgcctgtaatcccagcactttgggaggccgaggtgggtggatcacgaggtcgggggttccagaccatcctggccaacatggtgaa

SEQ ID NO: 99011 - DNA, 498 bp, Homo sapiens
atggcatctctttctgttgctcaggctggagtgcagtaacgtgatcttggctgactgcagccttgacctcctgggctcaagcaatcctcctgcctatacctcccaaatagatgataccacaggtgaagaaggacgtgtttgcttccctttctgccatgaatgtttcctgaggcctctccagccctgtggaaattcctggagaaacaagctgctgtgctgtgaactgcttatggtggacactgtgtgtcaggaatgtaggctgtctccagacaataaggaccacttctgaccaacagccaacaaaacactgaatttttttttagcaatatgaatgaatgtggaagtggattctccttctgtcaagcccatagatgagaatgcagcctgcctgacaaatttactacagcctgaagtgatgctaaagcaagaactaagctaatccatacccaactcttgacctgaagtaactgtgagacaataaatatgtgttgttttaag

SEQ ID NO: 99012 - DNA, 578 bp, Homo sapiens
tgctttgtaagaccacctcatgagtagagctgtgttcttccatcagtcaggttgcttctctgtttgtgatgtttgcagccattgatgatcactgcctagatccattaattcattaaggtctgcaaaaggaccctctcttctccactctgtctcccaggtaggaacctctgaagctgaggacgtattcttgctggcttcattattgtcatcattcctcttcgtgacctattacacatttctgaagagaaactcctctcaccagctcctttgtttcctaagatggctgggatcctgatacctacatgcatgagaagccacaccagaatgccagccgacatttgcatgcagagacgttgcctgtggagctgtctccagaagaggatgcagctgcaggtacttgaggaccacactccccctcccaagcctaatgttccctacatggcagcgcactgagcattggcaatgcaaaaaccacttctcaattactcataattgagttgcaaaaagagattattctttgctgaaacttgacttctcatcctggaagcaggtttttctcatttgggatgggagggggg

SEQ ID NO: 99013 - DNA, 1188 bp, Homo sapiens
gcaaatttttgttgggaagtggacattttgtgtgttgtaatatggtaactctgaaagtcagattccactgcctccctagggattactgttgttacttacgaaagctgcatttgtttagtgacttttccaaactgtctttgcaaagagtgtatatctggttgcatgcggtcactgaagtctctgttcttttatctctgtggtctttcaatgacttgacagagagttccttaaatgcttagatccaataagaaaagaaaacagaaagaaaaaaagagtgttctctccctttaagttcacttgtctagtgccactaggtaggcaacttcagtcagggggtgtgcatgtgtgaaacagtggccagcgctctggcagctcctcagcaatcaaaagtagtgaacgaaacacataacttcaatttttggaggacaaagcccctatttcctgccctagcaccagcaagctgcagcagaaactgccatcccaacagttggttaccacagggatgggagctagagaatgataagatgctattccaaatgccaaaattcactaaaatttaccaacttttttcttcatcaagcactcttctggacactgcaagtgtttcattagaccccagagtcctaaaatatcacctcaagcagttcttgccatctcaatagttactttggtgaagatactaactcctgaagttcctactctgtcatcttgacctatgtccttaattttcagcaccgatttagttgatccaaccctccttctcagtgtatgcgcgcacacacactcatccaatctgttctctacacagaaagaaccctttgtaagtgccagtgcctatgtttttttcacttaaaagataatttcattcttaacatggaaaaagcggagtaaaaaaaaaaaaattcacagctgggcgcggtggctcacgcctataatcccagccctttgggaggccaaggcaggtggatcacgaggtcaggagtttgaaaccagcttggccaacagggtgaaacctcatctctgctaaagatacaaaaaattagctgggcatggtggtgggcacctgtaatcccagccactcgggaggctgaggcaggagaatcgcttgaaccctggaggcggaggttgcagtgagcgtaaattgtgccaatgcactccagcctgggtgacagggtgagactccgtctc

SEQ ID NO: 99014 - DNA, 864 bp, Homo sapiens
caaaataccagcaaaccagatttaacagcatattaaaaggattatacaccatgaccaataagcacatgaaaagatactcaatgttgctaattaaggaaatgcaagtcaaaactccaagatgctacctcacacccattaggatggctgctatcaagaacaacagttggttaccacagggatgggagctagagaatgataagatgctattccaaatgccaaaattcactaaaatttaccaacttttttcttcatcaagcactcttctggacactgcaagtgtttcattagaccccagagtcctaaaatatcacctcaagcagttcttgccatctcaatagttactttggtgaagatactaactcctgaagttcctactctgtcatcttgacctatgtccttaattttcagcaccgatttagttgatccaaccctccttctcagtgtatgcgcgcacacacactcatccaatctgttctctacacagaaagaaccctttgtaagtgccagtgcctatgtttttttcacttaaaagataatttcattcttaacatggaaaaagcggagtaaaaaaaaaaaaattcacagctgggcgcggtggctcacgcctataatcccagccctttgggaggccaaggcaggtggatcacgaggtcaggagtttgaaaccagcttggccaacagggtgaaacctcatctctgctaaagatacaaaaaattagctgggcatggtggtgggcacctgtaatcccagccactcgggaggctgaggcaggagaatcgcttgaaccctggaggcggaggttgcagtgagcgtaaattgtgccaatgcactccagcctgggtgacagggtgagactccgtctc

SEQ ID NO: 99015 - DNA, 599 bp, Homo sapiens
acgcgccggtttgttaccctgccgggtccggcggccgcccgggtccggcgaggcggggcggcccggggtcccgagggccgggtgcctccttacctgcagccgggcggccgggccggggatggcgggcgccggccgagggcgctgcttggctgcggcggggagaccgggcctgggttgcggcgggcggcggcctggccgggggcgctgacagacgcgcggagggcgggggaggccgggaggtgtcacccggcccagcggggtggaagtgcctggaaagtttgttttcggcttggcgcagcctggagccgagcctccagggttacctttcggttctgtctgtagaggaaccgccctgggcttccacctggaacggggtccttggcgcctccgcctgcgagagaagcagaaggtgcaagttcttgctgaaagcacctgatgctcctgggcccccttttccagattcttgatgacagtggtcgggaaaactcgcctttcacggcccggccaaggggcatttgggtgcttttgctgcccgtggctgtgctcagcgttgtgggaagcccctgggaggccgaatgtgcaggatcaccgaggggaaa

SEQ ID NO: 99016 - DNA, 341 bp, Homo sapiens
ggaggaacagaggaaaaattagtgagtgggagaaacaaagaaagaaagagagagagcaaatggtaaacccaataaagttaataaatgttttacatgtaagtggattaaacacttcaattaaaagacagatttctacactggatcaaataacaaaacctaagtatatgctgtgcaatatagatgtgtattaaatataatgctgggtataggttgaaagtaaaagtgtggaaaattatataccatgtgaacagcaagtataagaaagctggagttgacatattaatgtcaaataaacgacactttactgcaaggagtttccgcaaagataaaatgagatataa

SEQ ID NO: 99017 - DNA, 453 bp, Homo sapiens
  misc_feature (448)..(448): n is a, c, g, or t
  misc_feature (451)..(451): n is a, c, g, or t
tttatagataagtctgctcattttagcattgtttataatagctaaaaaatttgaaaaatttaagtgtctatcatagaagattagttaaattatcttacaggcatgtaatggagaagactgcagtcttttttttttttttagtgaggcaaatctatttttacttagatggcaagatgtccacggtcatagtggtaagtatagagaggaggaggagttagacaatagtgtatgttatctgaatttatttatagaactatgtattttaacatatatgcttgacattctgcaaggatatgaactaaacagttaaaagtagttatttcttaggcaggattatggggtgaccctttcactttctactttagatacttcagtatgaactttttctacaaccatatattgcttttataatcaggaaactcaataaagagatttctattaacaaaanaanaa

SEQ ID NO: 99018 - DNA, 1010 bp, Homo sapiens
aaaatcagtcccttaaaataaagttcacgctaatagcaggactctctgagatcccataccctgaccatttgaatgacttgtctttttctccagtgtttgggggctttcatatatgcttttccttttacccagattcctcttgttccacaaatataacctaaatacataggtgttaagccagtgtttaccgtttgtcttcctgttatttggagatttgaaaaatcttacttttaattttatttttaaatattttattgtgtatatttcaggtatacaatatgttgttatgggatacatatagatagtaaaaaggttactgtagtgaaggaaatgaacatatccatcatctcacataattacccaatttttaaaaagtttaccaagtccatccttctgcagaaattacctatttttttgtttttgtgacaagaacagctaaaatttacatttaacatgaatcccatacacagtacaagtttattaccttgaattaattcattaaaatattcttaattataagtgacatatgagtagatatgtaaaaatagttatgctgtctgtctcaactctacttctctttgcatagggaatcactgttaacaatttggtatgtatctaccccatctgttgtaccttgtgtaccaggggttttttaactttattttattatgtagatatatgtcctctgtggaaaacatcagtagaaataagctaagaaaacatctcccagttgggcttggtggctcacgcttgtaatcccagcactctgggaggttgaggtgggtggatcgcttgagctcaggagtttgagaccagcctgggcaatgtggtgaaaccctgtctctacaaaatatagaaaaatcagccaggtgtggtggcttgcgcctgtagtcccaactacttgaggggctgaggcagaggatcgcttgagccagggagttcaaggctgcagtgaaccaagattgcaccactgcattccagtatgggctacagaggaagactttgtctca

SEQ ID NO: 99019 - DNA, 725 bp, Homo sapiens
cactagtaacaaaagaaaaaggtaaatttttagaaaatgacataggaattctaatggcatacacatcaaagtaggtgatgaagatatttatatttcttcttgatgtcaaatcactgtttatcctacagaagtcaatgttatggcctgtgtagtatctggtcttttctggttgcattgttttgcttatggataaaattttgaaagggcataaaacagacaaacaaatgtctattggacttgggtaggacggggctttaatctgtgacgacttgttctgttttatcacttctcatattttggcaaaccaggctttgacagtaggctgactcttcttggttataatgtttagttctgccaaaatatacagctatttaaaagtaaaatatcaagttccttttgcaccataattctttgcttaaaataccttgtagtattttaattgggtttccagattgttgtgttctagtaatggacaccatatgtttaaagaagcagtatgttatagtgtagtggttaagagaacaaatagtgagtggttaagacatacgagctgggagttagatagcctgagttcagatcccaattctgccgtttactattatgtgatcacgggcatgtcagtttctttataaacagggacaaggatacttatcttatagggtcttgtaaggatcaaatgagttaatacatataaaatacttagagaaagtatggtccttaataag

SEQ ID NO: 99020 - DNA, 318 bp, Homo sapiens
caagggtttaatgaagagctatagaagcttcactgaacctcggagacccagaaaaactaagggaattttcggaatttactcatagtatcttctcactctcctctccagattttcagaacatatggtgggcatacagaagtcagtaaaaagcatcaaggcgtataccacctgcctctaaaatcatccagttttcctatatgccctgttgcaactgcttattaaaacaaggttgctaaataattcattgttgcttttgttagataataataacttattttttaggcatattttaacttcagcaataaatcaggaaattag

SEQ ID NO: 99021 - DNA, 573 bp, Homo sapiens
tcgctcgctcgctctctcctgctccaccatgataagatgtgcttgcttccccttcactttccgacttgatcgaccttcaagtacatgctccattgaactctctgaattcagctggctaaaaaagaagaaagagaagatggagaaggcacaaccattctaaactgccttgacatggaggtgacaccagttttattgtaggaataagtgacatgattgtatctaattgcaagggcctgggaagcacaactaaccatgcaccaaagaagacaagaacacaggcagcttgggtcatgtgctacagctttcctgtgatcaccttgcctctgaaatatctgaaaatggctttctcttcattcatttctacatcttcattcattctcccaggtcttgcaatggttgtgcacataggtagaagagacttgccttgtctcagatgagattttggacgtttgaattaacactggaatgagttaagactttcggggactgtcaggaaggcatgattgtattttgcaatgtgagaagaatatgtaatttgagagggactagggacagaatgatatagtttggatc

SEQ ID NO: 99022 - DNA, 469 bp, Homo sapiens
cagctgttgttattcaaagactttgtttttggaacaaatactttggcaaccaatacggagggtgtactggagcggggagttctgtgaggtgccttgtcttaaagtgggttcttcagaagcaaacaagaagagaagggctggtggagtagaaaagtaatttgctttgtccatgttaaaagccaaaagggagccaggtgtggtggctcatgcctgaaatctcagcactttgggaggccgaggtgggcgaatcacttgaggtcaggagttcgagactagcctggccaacatggcaaaactccatctctactaaaaatacaaaaattagccgggcatggcggtgcatgcctgtagtcccaggaggctgagacaggagaatttctttaacccgggaggcagaggttgcaatgagccaagatcacactactgcactccagcctgggtgacagagcgagactctgtctcaaaaaaa

SEQ ID NO: 99023 - DNA, 368 bp, Homo sapiens
acagacaagtactacgttttccaatattttcagtgcagtctgagtcagtgactggaaatggcttctgattggaaaaaaggcttcggctttcttgttccctttggcatagtagtataagtggggacaagctaccgtcttgcaatatagaaacacattaacggtgtcaagaataagggggaaaagtacaaatatcttacttttcattggtactataaaaatacggagaattatttctaactgtatttatagaagacacaggtaaactggaatattaataaacaaaataaaactaaactaaactaaaaaaaaaaaaaactttgggccaggcacggtggctcacgcctgtaatcccagcactttgggaggcc

SEQ ID NO: 99024 - DNA, 766 bp, Homo sapiens
cagaccctgcacttaatggatcagctgtccccacccagatcaataaactggctcatctgatcttctggcccccaccaggaacagactgagcgcaagaagacagctcggactccctatgatttgatttctgaccaatcagcactcctggctcactggcttctccccacccaccaagttctccttaaaaactctgctccccaaatgctcagggagactgatttgagtaataatagaacgccggtcccgcacagccagctttgcgtgaattaccctttctcaattgcaattcccctgtcttgataaatcggctctgtctagcctaggcagcaggcaagatgaaccccttgggccattacatttatgacctgtatcttgtgctgacctgctatctcatcctgtgacagagaatgcctaaccatctgggaatgcagcctagtgggtctcagcctcattttaaccagcccctattcaagatggagttgctctgtttcaaacacctctgacacagctagacagactcttgtcacaaaccattgtctgcactgcaggcccaacagactttgtcccaggcctctgtatactcttcaagcccactgaatcccccttaaaaatcatatactaaccccctaaccttatccacactttgccatctccctttcccctaagaagaagggtatataagcatctgtaccccatggtgcagtggagcaatcagtctgtgatttccccccatgcatgttaataaacgtgcatgccatttctccta

SEQ ID NO: 99025 - DNA, 293 bp, Homo sapiens
aaagtcgcagagatagcggagaacaagaaccagatctcacagtcatggtgccaaaagactgttaccctagcatgactgcttcagcgaagagataagagcttctttgactttttccactggaatttttcatgccagaagaaattgaacatgtgagcctggtgtctggaagagtagcctggatttatggtatcagatgcacatttttaacaccttcagttttctctttaaaatatctcttcaatcccttacttttctctatttgtttcaacattaaaatatgttatttttcttca

SEQ ID NO: 99026 - DNA, 1414 bp, Homo sapiens
tgaactggactacagtgtgaatgctggcgcttatcgtgttgaccctgtggtcgccatgccacggttgccacatctcgaggacatggctccctttttgactacctatcccgcctcagtttggatttggggacctggaactttagcgtgggtaactccattttgattctcagccggccctgttggggcctagtgcggaaacttagtccaaaacaatggccttctataatttttattaaacaaatcctatgtaatcatgtatgattctaaagcccttaatggagtataaaatatgacttaaaaattacttgcaataattcagaaaagttgagaagaaaagaacattagctccaaattatttggcagaattaaaaagagggttacaagtgacttttggaaagtacacattggggtgtacaaataaagtactttctctgaatttcattagctacattaaaaaaagaaaagatcaaatgcaatagatagcactgtaatagattttgctacattaaaaaaaatccatttgaatacacagtgaactaaaacaccagagtggctaaaaagtcccttcatgcatatttacttagcagagagctcttgagaaagacccaaccaataaaccccaaccaaagcaaatccagctacttctctagctgagagggtggaatgactccaaaatattgtttcaagctcaaaaagcctaaaacaactccacataaaaaaacaaaaatctatctaattggacatttacctttttggaaataaaaggcccagtgggaaaaaaaaaaaaaaaagaaagaaaggaaggaaggaaggaaggaaggaaggaaggaaggaaggaaagaaagaaagaaagaaacccttttcttagatccttagaagactcgactggagcccaaaataaatcccctgaattggccaagtattaaaggactctattctccttccctgcctttagtgtgctggagccctaacaagggcaaagaactgccagtggtcaagagctcaaacacccggaacaacccagcgacattcacagacaccagcaactacagccctgacccgagttggccctcagttcaactcttctgacggtcctcctgattttgcagataaagatgtggattcaggccaggccctgtggctcatacctgtaatcccagcactttgggaggctgaggtggccagatcacgagatcaagagatcgagaccatcctggccaacatggcgaaaccccatctctactaaaaatacaaaaattagctggacatgatggtgtgtgcctgtagtcccagctactcgggaggctgaggtaggagaatcacttgaacccaggaggcggaggttgcagtgagctgagatcctgccactgcactccagcctggtgacagaatgagactctgtctcaaaaaaaaa

SEQ ID NO: 99027 - DNA, 281 bp, Homo sapiens
tgctgggattacaggtatgagccaccacacccagccacagactgcctccttgactgtgtattttcgtttgtgagacagtgaaagtggtggtgaatgaggcacaggaactgtgccccgatgatgacaatgatggtaatgacagcggctaccattgagcacctcctatgtgttaggcacagtactggggactttacatttgttatctcatttaatcttcataacaaccccggtgtgttattttattattgtcatatttgcagaagctaaggtctagggaacta

SEQ ID NO: 99028 - DNA, 282 bp, Homo sapiens
gctcttcatatacatttatgtaattaaacatgcagttgtgacttggttgtctctcacttatgtaaaatacatcaaatcctcataagttattgttcttctgtaggttttgaaaagctctatgaaaaacaaaacaaaaaattagccgggcgtgttggcaggcacttgtaattccagctactcgggagggtgaggcaggagaattgcttgaaccccggggggcggaggttgcagtcagccgagattgtgctattgcactccagcctgggcagcagtcgacgcggc

SEQ ID NO: 99029 - DNA, 105 bp, Homo sapiens
aaaatcatgtttataatagacccgtgcatgcagcctttcctccttattccccttcatgcccccctttccccttcattccccccgccaccccggtttttttttttt

SEQ ID NO: 99030 - DNA, 751 bp, Homo sapiens
ccatgttagtcagaatggtctctatctcctgaccttgtgatctgcctgcctcggcctcccaaagtgctaggattacaggcgtgaaccaccgcgcccggcctgtgttgctttaagccaccttatttgttaggacagcaacaggaaactaatacaaggttcaatccctcactgacgatgttctggacgacaggacccctgcctggtgcctcatggtggacccacagaatcatcttcatacgcacgggggagaaacatcactaatgtccaccagcaccggcatcctcagccgcgaggacaaatcccttaccctcccagcaggtttcatctgcgtaacggaaatagtggtgaatttatcaggggctgttaatagatgacaggcaagggtgaagtcatcgcaaaagttcccagacgatatggacagctgctccccaataattactgctccacgcagtccacagcggggctgttattgaccccgacaggatgacgggacactaaggtgtgcagtacacgtcctcacagggagatttaaaaaaccggcagtgacccctgccccaagaaggccaagaactgctactctaaggtgtgcagcgcggagcttccccaccatggcaatttcagccatggcagctccttcccctaatcaccagggctcagaatctttatttcactcctttacccaatgcaattggcatcaaacgcgggctgggctgcgcccaaatggtcccagctccccggctctctcctctct

SEQ ID NO: 99031 - DNA, 873 bp, Homo sapiens
gcaccaacaatgaagttcaacttacggctctgctgcttgcttccttgcttgtctgcttgcttgattgattgacagggttttgctctgttgcccaggttggagtgcagtggcatgatcatagctcactgaaacctcaaactcctgggctcaagaggtcctcctgctttaatctcatgagttgctgtgattacaggtgcatgccactgcacccggcctggctttaccattgtaaacttcgagaacttacaagttatctgtcatgcctcatttctctcacctgcaaaaatggaataattagtgctactcatagtaatagctaatatgtattaggtgtttgctatatataccagtcacagttctaagaattttatttgtattaactcacaatcctcacatcaaccctatgtattgctagtattatgcccatttacaggtgagacaacagtgacagaaacagtaatttgctaaagattggtggagtcaggattagaacttagtctgactctagagtttatgctcataatctccaccttcatagttttttgttttttttaatttagcatataatcaagaaatagagtagttttgaagattaaataaaatctatataaaatggctgtgacaagcatttacggtattaagtactacagttagcttcgagtttacaaagcattttgcacacattttctttgattgtcataggaataaccaaatatgcttgtgaccatcactgtccggcaggaaacaggcacacatttggtcactttcccagtcatgcagcatgtgtgcagacagtgccctggtgttgctcctccatatctagatcatgtggaatttgaagcatcacattttgagaaaatttagtagacataa

SEQ ID NO: 99032 - DNA, 296 bp, Homo sapiens
gtctattttggtatgtatgactaagtatttgcttgcagcttcttctctttttcctttcccattgtcaggttttaggaaacaatatttcccttctgtccaatctctgctattccttctgtaggcccttccctccccaacttccctgcattttttttattctttgaaattagcaatcatggccacaatcagggttttagcaaaataaattcttgtcaaatcagataatgggttaaattcaaggaggaggtagcttcaactgatcgaggtaatagagaaaatcagcatttcttccagcc

SEQ ID NO: 99033 - DNA, 617 bp, Homo sapiens
gaatgtgtccagctgtatgtcatttggttataagcctgtgtggcaggccaagtgtgagctacagctgttttggcacgcaggggaggcctgtgctcataaacagcctcggagtgggtgtgcctgcctgaaggtccgcctgtaccacccaggcccaggctgggccaggacccagctaatctcccccagccagaaggtgctcccaggcttcaactcgggacaccaagcctgccccagtctcgcatctcagcctgcactgacgccccagaggctggagaaccctgttccgtgactcatcatttccttcccccaacttccaggaagtccccaacgtggagacactgaatgagcaagccctaaaggcaagcgcaagggggcctctgccccccgccctcctcaaagtgggggaggccattcttgggggcgcggggcagaggccaggagaaggaaaagaatctgctcccctttctaactggtcctcttctgggctgcctgctagggggtggcccagacagaggaggaaacgggagggaaaggcaggggtggcagggctgatctaaaagataaaggggaagcggccagaccccagctgaaatgggcgggaagcggaggccaaaaac

SEQ ID NO: 99034 - DNA, 765 bp, Homo sapiens
atgcatggatgttagattttgtcagcttttttctgtatgtattaataggatcatatggttgctatttagtctgttaatatgatgaattacattaattgatttataaatgatagaacagactttcattcttgggatgaatcccacttgttcttgatatattattattttttatattgttggattaaatttgctaatactttgttaagaatttttgcacctatgttcatgagaggtatttgtcattttcttgtaatgttttgtctggacttggtattacggtaatgctggcctcataaaataagttgggaattgtttcattcttttccactttctgggaaaggttataggcagttggtatcattttatatctttcatttctaatatatgcatataatgccataattttccccctcagcactgctttcactgcattccacaaattttgataagatgtattttaattttcatttagttcaaaatatgttttaatttctagacttattctttgacctgtgagttatttagaactgtattgtttaatttccaaatatctgggaacttttcagctatctttctgttactgatttctagcttaattttttttttgtctgagaatgcattttgtatgatttctattcttttaaatgtgttgagtgtattttatcatctaaaatgtgatatctttttttttttttcagatggagtttcgctgttgttgcccaggctggagtgcaatggcacaatctcagctcactgcaacctcca

SEQ ID NO: 99035 - DNA, 406 bp, Homo sapiens
tgaaataaaactgaagtttaggaaaacgtttcttttatgctatatttaaccacatatgggttatgatggcaaatacttgctacatcttagaacaaagatagatcaaatgccttttttaaaaaacttcaatttttttctgataaatcagaaggagtgctctcactgcaaacacccgggaccagtttttttttttaaaaaaaaaaaaaaaccttccaggattcctcagttctcccaggggccggctctgcaacctttgttattcaaatcagaggctttgaagctggtgaccttgtgggttttcctgtcttgttaacccagttgttatctgtccaaggctccagtgtcggccgctttgagcaccagcccagtgactctcacgtcactcacataaacttcatgaaacacc

SEQ ID NO: 99036 - DNA, 482 bp, Homo sapiens
acttttgcctcatgttagatttttttttctgctaaacattgctgttatcttagtgtttgttttttgttgactggctgtttggcctgagaatttagttctgaattccttttttttttttttttttaaggcaacagaataaacaagcaactgtgtgtcccttggcgcggtagccaatttaaggtgattcatacccagttacttaatagtaaagtctcattcctaaaggatataaactctatttcttgcaaggatgcttaaagagctgagcaaatcttaaagcattattatcacattttagactaaataaagatattttcgttcattctaattttcgtcattcccaaacacactgtggccttctgtggcatgagtagtttaatcaagtgtttagaatttcttggcctcaaccagattagaggaatttaactcagctgttgttgagaagaagtaattcttcagtcactactgaggttttgtaagtg

SEQ ID NO: 99037 - DNA, 137 bp, Homo sapiens
ccttttttatgccaccgacatattgtatatgagttctgtggaatgtctcacattctgaatttgtctgtcggctgcctcctggatcatttacattatttctccattgtctatatttcctgtaaactgcaagttgctct

SEQ ID NO: 99038 - DNA, 770 bp, Homo sapiens
gcagcctatactcagtgttaagaattgctgcttacttttgatgtttggacaagagctggcactgctagagatgttctgccttttgaggcacagctcatgccatccatgtgagcacagagtctcatcagcattcacatcttacctgctactggtctcacactgtggaaatgggtaatagaaacagaaacatcagtgacatttggctcttttattcagaggaatcaaaagtgacaaagagaagccagggtcagcagtaggcagtaggtccacccattgggatagcatagctattggggaaattgtcagcacagaggcaaaaccatggtattccgtgactgcagcaggaggtctgcagttgtgactttagccaagaagcattgggaatccaagatgagttgacaaggaatctatcctgatgtttgtctttgggacaaacatcaggaaacacaggaagtagttgctgtgatgaagtccaagaaaacaggcagagctaaggagctccaaagaggggaagacaggcaggaattgataggtgtggggacccccacaggcagaaatggcaccttcaagactcccagcagcagagtcttagagggaatggtggagcagcgttgggttgcctagcagctgaacagagtccatagcatgacaaaatggacaagacaggacctaagcagagaaagccatatactcgcagatgactaccttgtcacagaagcattatgagacacagcctcatccaggcaggtagatggtgacatcatccttaa

SEQ ID NO: 99039 - DNA, 743 bp, Homo sapiens
actcttatcacagtgcccttcaccagtatgggttgaaagaatgaatggtacaggtaaccattgctgagaggcacaagaaaagaagggaaagctcagttgaggctgagcttaaccagggatggctgcttcttgttgaacttgtacgaccttttagtggtctgaggtaggtaagacttcttagtccagccacaatctgcaagttacttttgccagatatccttgaactagattggtaaatgagaatcacagagaaaggttggtcaccagcagaacacagttaatccctgcctccacctgattgtgccgttcaaaaattattttctctacctgggatattcccccctgatctttgtgtggttagcaccttcttcactcatctcacatattacttcctcagagcagtttcctttcccagctactccatctgaaatcacacccctccatagcacagcacccagttgtatatatattttttaattttaaaattattttttaatacatagaaacagagttgcactctgttgcccaggctggaatgcagtggtgcgataatagctcactgcagccttgagctcctaggctcgaacagtcctcccatctcagcctccccagtagctgggactataggtgcatactaccatgcctggctagtaccccgttttcaataagcttctaaaactggtatttgtatattatttatcttatccccttggattgtaagcaccatgagtgaggactttgtc

SEQ ID NO: 99040 - DNA, 366 bp, Homo sapiens
ccctcgctcggttaccgttgactcgggctgactgcgcgcgaggcctcccgggcgcgcaccccctctcctccccccacgttacggatcagaaaacagaccccgggaggagaggggacggggggctgaaacccggcccccgaggtcaccctcccggggagcggtcgggtaggcctcggaggctctccggtccgggcccgcgccatcaacccccatgcgcagcagctgggcctgaggcctcgactacggggttggccccggcctggagggactgagggtggcgaggctcgaggcccggtgtaggggacgattctggaggctcccccggctccccgctcacggccctggacgccgctaccctgagcaggc

SEQ ID NO: 99041 - DNA, 443 bp, Homo sapiens
gcatgtgggtcatcaccaccacaatggagggtgctgtaaactaccttttgggactaaatttcaaaacgtacatttgtatttccagaaaatgttgagtatataaagcaatcactcttttaaacctgaacacgtaatagaaagccatagactttcaccgtgacttgcgatgaccttggcaaacctgactatgagctctttgacctacaatattgatgaattcctcaggagaacaagagctcacatttcctgaaggctgagtgtgtgccggcttctgctttaagtgctctataagcattcactcccatcatacaacaatcctttgagataagtcctatggttatcccaatttcctgatgaggaaactaagacgacagagattacacaacttgcccagtcacccaaacaatttcctgaggtgtccccgctagatgctcaacagttgt

SEQ ID NO: 99042 - DNA, 571 bp, Homo sapiens
cattttaatgtctgtggagtctatagtgaaatcccctttcattcctgttttagttcattttctattgctatagcaaaatacccgagagttggtagtttataaaggaaaaagatttatttggtttatggttctggaggctgagaaatctaagatgggttgccgcatgtggtgagggctttgtgctgtgtcataacatggcagagaagtgcaaggggaagcacatgtttgcaaagagaggccaaacatgagaggcatcctcactttataacaacctactcttgtgggttcacttctccaagagtgagaactcctttcagaacgacattaatccctcttaacaacctaatcacctcttaaaggtaccacctctcaacactgctacattgcagaccaagcttcaacatgagatttggtgaggacaaatgatattcaaaccatagtagtcatttttttgtgtgtgttagttttgctggaatcttgtcaattttattgatctttacaaacagtcagattttgatttgagtttttaaaaagttgtggtagaatatacacaaaatataatttgccatct

SEQ ID NO: 99043 - DNA, 508 bp, Homo sapiens
ttctccccatgtgatagcctgagatatggcctcatgggaagggaaagacctgacagcccgacgccagtaaaggggctgtgctgaggattagtaaaagaggaaggcctctttgcagttgagataagaggagggcatctgtctcccgctcatccctgggcaatggaatgtctgggtgttaaaacccaattgtatattccatatactgagataggagaaaaccgccttagggctggaggtgagacatgctggaggcaatactgctctttaaggcattgagatgtttatgtatatgcacatcaaaagcacagcacttttttctttaccttgtttatgatgcagagacatttgttcacatgttttcctgctgaacctctccccactattaccctattgacctgccacatggtagagataatgatcagtaaatactgaaggaactcggagactggtggcggcagggggaaggcagggttcctccgtatgctgagcgccagtcccctgggcccac

SEQ ID NO: 99044 - DNA, 1304 bp, Homo sapiens
ggtctgggacgccgagagcccggcaacacctcagcccgagcccggcgaggtctctgggctcctggagcgagagaggtggcatctcactacgtggcctaggctgatctccctctcctggactcacatgatcctcccaccttggcccttcaacgtgctgagatcgcaggtgtgagccaccacacccggccctgataaaactcatcagtgctttgaaacaagcagctctgaaccaaagaaatcatttgattcaagtaaccattggatcttcccaaggcaatggtgaaagaaaagaaaaaagcagacaaaaaaggggagaagtctgcccgctctccctcatctctctctgataatctagacttttccaaacaagatggcaacaccactaggcaagagatgtccccagctggtgtcccattgctgggaatgcagctcaacgaagtgaaacccaaaaaagaccgccaaaacgttcagcagaacgaagatgccagccaatacgaagagtccattctgaccaaactcatagtggaaagctatgaaggggaaaaggttcgtgggctgtatgagggagaaggcttcgcagcctttcaaggcggttgtacctatcgtggtatgttttcagaaggactcatgcatggacaggggacttatatttgggccgatggattaaaatatgagggcgactttgtgaagaatgtcccgatgaaccacggcgtgtacacgtggccggacggcagcatgtatgaaggcgaagtggtcaacggcatgaggaacggattcgggatgttcaagtgcagcacccagcctgtgtcctacatcggccactggtgcaatggcaagcggcacgggaagttataaatctggaaatatatacgaaggccagtgggaagacaacatgcgccacggggaggggaggatgaggtggctgaccaccaacgaagagtacaccgggcggtgggagaggggcatccagaatggctttggaacacacacatggtttctaaagagaatccgcagttcccatttttctgtctgcagggccgattaactttcaagaacgggcgtgtgtacgaaggcgcattctccaatgaccacatagctgggtttccggatcttgaagttgaattcatcagctgcctggacctgtcttcaggagttgccccaagactgtccaggagcgccgaactgatcagaaagcttgatggcagtgaaagtcattctgtgttgggatcgagcattgagctggatctaaatttgctcctggacatgtaccctgagacagtccaacctgaagaaaagaagcaggt

SEQ ID NO: 99045 - DNA, 700 bp, Homo sapiens
ggtctgggacgccgagagcccggcaacacctcagcccgagcccggcgaggtctctgggctcctggagcgagggcgactttgtgaagaatgtcccgatgaaccacggcgtgtacacgtggccggacggcagcatgtatgaaggcgaagtggtcaacggcatgaggaacggattcgggatgttcaagtgcagcacccagcctgtgtcctacatcggccactggtgcaatggcaagcggcacgggaagttataaatctggaaatatatacgaaggccagtgggaagacaacatgcgccacggggaggggaggatgaggtggctgaccaccaacgaagagtacaccgggcggtgggagaggggcatccagaatggctttggaacacacacatggtttctaaagagaatccgcagttcccatttttctgtctgcagggccgattaactttcaagaacgggcgtgtgtacgaaggcgcattctccaatgaccacatagctgggtttccggatcttgaagttgaattcatcagctgcctggacctgtcttcaggagttgccccaagactgtccaggagcgccgaactgatcagaaagcttgatggcagtgaaagtcattctgtgttgggatcgagcattgagctggatctaaatttgctcctggacatgtaccctgagacagtccaacctgaagaaaagaagcaggt

SEQ ID NO: 99046 - DNA, 272 bp, Homo sapiens
gagcaactcttgcaaactcaacaaagtgtgaagaaccaactaaatgtctctcctaatcccacttcccagccataaccactgttaacacgttaggttttctcctggcccttttcctctgtctttaaatattttcaaatatatgtcgtgtaactttttcaaagacaatgaaaagattatcatataaaatattgagttcagttgtcccactggacagagaggcaaactgagcctatgcagaggatcagagttggccagggctgcacatcaacctg

SEQ ID NO: 99047 - DNA, 299 bp, Homo sapiens
gaaaccgtcagtaaggagctctttatctttaccttcccactccaaacctacttgctagctgttcttatcattgcctcctttttctctgtcacaaaaatgtgttccatcttaatgaacacatttcattaatgtccttcttaatgaaggacagtccctttccctgtgctgtgaatcccatagtaatgacattagcttaagttttctgagcacttgctatctgccagttcctcccatgaattatcttgcttaagctttgcagtatacctgtgaaataggtggcagtagttgtcccaccatac

SEQ ID NO: 99048 - DNA, 381 bp, Homo sapiens
cccaggtatccagagctatcataaagccagcctagccttgagccaggaggccacccagcccaacactccctcccgcaagcatcctctcacagatccagccctccatgcttaaaacaattcagaggcccccagaagcgggaaggagagagaacaagtggagtcagtgttgagtctgctcgaggccattatctgctaccctggggacaactcaaggaagtttctcagatcacctgttgttggtgaaggacttaactagagaggcttggtccagggcactgatgaatgaacttacactcccgcacaggtggcagatatgcctatacagctgtactcacagcagagtaggctggggctaaaacaggtcccaacaatttgctatta

SEQ ID NO: 99049 - DNA, 151 bp, Homo sapiens
ttcctcgggcttccacaccaccagcctggtgtgatgcctggctcccaggctccaagccatgtgcctagtcagcaaatggggccccttgactagcccccagcatggctgctgtctgcacctgcaagtccattgcaccagtgcatcagttgtt

SEQ ID NO: 99050 - DNA, 191 bp, Homo sapiens
ttttataatatccctcacttcacatttttcctatttgtaccactgtgttttacaatgcagacacagaattataattacacaatttgtaaacatatacacatatcgaaaatacatgtttttaactgacaagcagtataaaattaacttgagaaccattattctagatcactgagggactttcaagctgtgct

SEQ ID NO: 99051 - DNA, 391 bp, Homo sapiens
cctttcctgaacacccaagcaatgcatcaggtacagagcaaaacaccatctgggtacaaatggcaagtccctaactttcctttcttttcatgaatagggtaggtgcacccttgattagttaaccatacccacaaatcaagtacctagatatgcattcgtttcctctaagggccatctcaaagtacagagctgctcacctccctttagagaatccagtttaaagaacacgtattgtaatcctggagagcgtcctagaaactcacaaataggtgtaactgaacacttctcccaggacttactggatttgacagatctaattcaagattgtaggaaacatcttttctctagcgggttgttgttgaaaattgaaacaatttctctagtctcacca

SEQ ID NO: 99052 - DNA, 766 bp, Homo sapiens
cttcttatggatttataaatatgatacttaaggatattaacctttgtcattataagtattttttcccagttgaaattagccttttatttttccttatacttggattttttggcggcagttgaggggagcatgttttaaaaatacgtagccctatgctgggattacaggagtgagccaccacgcccagcctatgttggttcacttttaaacactgttggttcacagtttaaaaagtattgcaaatttaacaaagcaactcttggcaacaggacagtttctgatctccttagacagctctcagcaatttagaatgttttatgaatttaacaggaggtacttctgagtgagaaagcagatttaaagtgaggaaccctgaaaatgttccttatttcggattttaggcttaattttgtgttgcctccgaagggcagagataaccaagccttctaaaacattaacggtggaaacagttacaagctggctaagagttttcttttttatagattgccttttcaattaaccagttacttactttcctgatttcctggtgtttggaattaaataataagatcattttggccagctgtggttgtttaggcactgtcgatagctgtttaaatcgagactaacacttagccattcacagcctaacaagtccccctcccacccaactgtttaaatttctctgatgttattgttgctgctgtattcaaggcaaattagaaaaccagtgtgaatggcttttctctcgttatagagataacac

SEQ ID NO: 99053 - DNA, 141 bp, Homo sapiens
cattcttcagagtttactacatgtactacatgttcatgtactcctaaacaatatataacactgctttgtatgttttaaaattttatataaatgttggctgggtgcggtggctcatgcctgtaatcccagcactttgggagg

SEQ ID NO: 99054 - DNA, 535 bp, Homo sapiens
taattaggagaaagacttgccggagtggcaggcagtgggattggtgctgctgtatcctgctgaccttggggagaacttagaactgggctcttaactcttaccaagttcatgtttactttctctgcaaagccctgtaggcactagtcccctgagctcactcttccatgaggttttaaggcaacagagaaggctcccttccccccggagtgtcctcttgcccaccccagcatctggaattctgaccatgagggctgtcgtatggggcctgctggggatgcagaaagactttctactgtcctggaggtcagcaggcacaggagtcatcttgcatgtgacgcccaccatctggagctagcaagaggatttcagggtagtgtcatcttgacagttggaggaagaaaaagtcccaagcccaagcagtgcttgaagcaagagagtagaaattagtgtgacccagtgaattctattgctgccatgatgaaaagtgctggtgcattcttggaaagattaggaacataacgagccagagaaacag

SEQ ID NO: 99055 - DNA, 812 bp, Homo sapiens
tgcactaatggattctacttcacattatataggacatgggacttcggagcttaatgggatatcgatcttcatcatgcttaatacttacttttcaagagaaagcaattgtagaccagtgtggttaagtgacggttacaagccctcatatccagtaagcagaagatgaaatataatttgatgtttgcccttgtttgaatactccatgaagatgaggaaaatacatgtttgtgtctaacagtgtctggcatgtgtgatttctattgagatggactcaatctcagagattctattctcagctgtgtccagtctactgagaggcccatcaaagattactcaaggagccgtctcatgtagaaagatgccctcataggctctcacaaactgttgcaagcatctcaaattttattgactgctgggtcttacaattcctcaccagatggctttgaacacagttcgatcatcaatctcattgatgctactgataattctgttggaacagcaggagatggctctagctcctaaacctgccactcgaaacacctgtcatcacctccaaagatctttccaatacccactggtacagttgtaactcaatcacttcgcaagacagataattgcatgtggccaaagatgtacctggtcaacaggacaggttagactatctgctctcaggtagtccctccaaatcaatggctggactcggttgttcaaaatgaataggaaatcctaaggcttatcagcaaattggaaagtcatgttcgaggtcctatcaagctaggctcctaaaagatatagtccccacctggaggagg

SEQ ID NO: 99056 - DNA, 862 bp, Homo sapiens
agcagatctgcggctgcttctgggaagtgggttgactaggaaagggcatgagaaaactatctgggatgatgaattttttctttgcttttcttttttgaggtggggtcttgctctgtcacccaggctggagtgcagtggcgggatctcagctgacggcagcctccccctcccaggctcaagtgatcctcacacctcagcctcctgagtagctgggaccacaggcatgtgctaccacatccaactagtgttttgtattttttgtagagacagagtcttgccatgttatccaagctggtcattaactcttgggctcaagcgatccaccccttgacctcccaaagtgctgggatcacaggagtgagccaccacctgcaccacctgctggaaatgttttatatcttgatatgcagttatccaagttgactgaatgcttcagatctgagcattttgttatgtgtaagttgttttttcctaaaatatttttctaggctgaggcgggaggatcacttaagcccaggagactagcctgggcaacatagtcaggccctgtctctattaaaaaaataaaaataaaaaactttaaaaaacttttcctgtgggtcaggacgtaagctatgtgtttgggacacagtatgtcatttaacttgtaagcaaattcattaaggtagatattattgtctctgccttacagatgagaaaactgaagctcagaagggttaaacaatttgctcattaagaaaggtgggattaaaacccagcactatggccgggctcagtggctcacgcccgtcttggctcccaaagtgctgggattacaggcatgagcaatgggcccagcaaattctacttcttaaaaatcaca

SEQ ID NO: 99057 - DNA, 343 bp, Homo sapiens
atgtcagttgtggcctaatactccagcctaccaagatatttttatatcttgagattgtcactcctgtcccttcaaaagtttgttccatctgaatatttcaccatacaaattttcaatatcttcatctaagatgttgacaagtttttgaagagctcagagccccattttaggcctcctgagaccaccttctaggtggacctgagctcaccaatcagccccacttaaatattataattcacttcattgttctagtatctagcccacattttcctatcttattcccaaaggtattatgagaggcctttttggataatgcattactgaaatctgtaaagaaccacac

SEQ ID NO: 99058 - DNA, 405 bp, Homo sapiens
tttagtagtgtaaggtttaaattcaaaaatgctccagggagacgccaggttagactaatgaatcaacagagtcatatattttgccctgcattctttggcaaaacgtgcttcctttggcacaaagagaaacatgcagacagtgaaagcggtcttctgggagtcctgaaaactggcctgagatcatgggtcaggtggtttgtactctagcaataaaagcacttgacttgtttctcagacaattatgagctctcattctgtgcagttccgtgggcagccttccatagggtgatcaagaaagagaaagaacagcctctgttttcaagctttctcagctagaaagcttcatctccttctaaccttcctagttgaaatcaaagggctaatgttgcctcgcccaagccaggg

SEQ ID NO: 99059 - DNA, 344 bp, Homo sapiens
tggggtaggaaagggccacccaggccaggaacagcaaaagcacggggcacctttgggagccagccctcccagagctccctcctgtttccacacatgctcctggctgttaagggagggtgtgtgtgaggaagatcggggctgaaaaaaaggttgggtgccaggacggaagcctggaataccttgaataccatgctgggaagctgggccttgattttataggcaaggaaggaggctggagagggaaggaagcaatcagaaggtgtagagcaatggagtcacaggagcagatgtgttttaatcaattcatccaataaatattttagggactccagacactgtgcatc

SEQ ID NO: 99060 - DNA, 631 bp, Homo sapiens
cctgcctctgcctcctgagtagctgggattacagccacacgccaccaagcccagctaatttttgtatttttagtagagactgggtttcaccatgttagccaggatggtctcgatctcctgacctcgtgatccgcccacctcggcctcctaaagtgctgggattacaggcgtgagccaccatgcccggcctatgattttctaataacattttttcattagcttattttaagaatacagtatatatttaacatatgaaatacatgttaatagatggttttctttttttttttttttagagaaaaggtcttgctctgtcaccctggctggaaagcagtggcactatcacagctcactgcagcttcaaactcctaggctcacatgatcattctgcctcgagcatcctgagtagctgggactacagatgtgtgccaccattcccagcttaatcaactatttatgttatcagtaaggcttccattcaacagcaggctcttaaggttctgaggagttatacgtggatctttgactgaggggtagtcagtccccctaataactgcgctgttcaagggttaatggtacttaacattgtcaactactggtacaagctgaacatcccaaatccaaaaatcca

SEQ ID NO: 99061 - DNA, 100 bp, Homo sapiens
cacattcctttagctcccagctactcagtaggctgaggcaggagaactacacaaaactgggaggcagaggttgtagtgagcattccagcctgggcaacag

SEQ ID NO: 99062 - DNA, 348 bp, Homo sapiens
aactaaaacaaacaaaaaaatacattagcagctccaaatccaccactgtgatgcacctcaataaaattatgagtcaagcaatgattttaaaaagttttccacagatctcagaaatgctcaagaatggaagggatcactctctctgagggcagaactgtggagtagggttaaaaatggagatttgtagaaatttgtacaaggagttgccataacccaaaattgcccttcctaacgcatgcagctaggtggctgcccctagtccagtagaagacctagctcaggagaagagacatagaggtctggcaatttgaagtccccagtgaaacagccaggtccgcctgatcacgc

SEQ ID NO: 99063 - DNA, 288 bp, Homo sapiens
agatatgatcagattgctttgaggactgaagttgacttttgtggagccgataaaatgtcccttggagagactggccttgtaccttgtctacatgactcccttacaagcttcctgattttgtgtctcagctctgtcaacctgcttgaagctgcaaggaatttggtgctcggggacaggcctccacaagtccaatgaagttggctgcgtttctgattcacttctctatccaagaataaaaataggggctgatctactcaaacgatcctgggagattaaaagattttgaag

SEQ ID NO: 99064 - DNA, 328 bp, Homo sapiens
gcttagtcctattttttacaatggttttagtgttaatgttccttcattaaatatattgttaacttgtttggccaatattgtcattatacttttttttgtgaacaccgagggagattgaaatccttaggaagcaaatatttactttcacccggtaaaaaatcttgtgcccaagagctacataattatgttggagttattctttcaccatttctaccgcctattccgaagtgttcttccaccatttctaccccctattccaaagtgtcagaggacattgatactctcccagaggaagcattttacctagtgggtgtgtatggcttcttag

SEQ ID NO: 99065 - DNA, 248 bp, Homo sapiens
attgaatcagtaattagaaaaaaaaaaaaaaaaaagaacacctcacaagaaataataggactagacggttccactagtgaattctaccaaacagttaatgatgaattaacaccaatcctactaaaactattccaaaaaaacagaagaaaagggaatgtttctaacatattctgaggccgtctttacccttatacaaaaatcaaacagataccagaagaaaactatagactactatttcttgtgaagag

SEQ ID NO: 99066 - DNA, 374 bp, Homo sapiens
atcctactcaatcttgcttctcccctcaccttagctactctccatcttgccagctatgctccagccacaccagcctcatttctgtccctcaaacatgtccaactcttttccatcttgggttgtttttttgttttgttttgttttttgacagctttattgagatgtaattcacataccagaaaattcacccttttgaagcttccaagtcagtggtttttagtagactcagggtcattcaaccaatgtcactcgtttttttcttgcctaatttttagaacattttcattacctctctctcccagaaaaaacgcacatccattatcagaaaattcccattatcctctctcctccagcctatggatttgcctattttg

SEQ ID NO: 99067 - DNA, 850 bp, Homo sapiens
cggcaactgtgacacccaggcgctggcaatagagttggcagcctgatcccgggacaaaggtactgatggacatccagatactccccgccacaatcactggcaaacccactcccaaacacacagacgcacaggggcgcacgcgcgggaacacaagcacacacacagacacacaaagacacagacaacttgaaggagagcaagggacagagggatggagagatagaaacggaaggagagagagaaacagccatcgagagagagatagagaggaactggggagattgagagagagagagagagagagcaaggtggagaaggaagcagagaaagggaaagggtgagggagctacagagggagagcaacagagccttggagagggaggctctatctggtagacagggtcccctttgccagggtagggtggagggtgactgggccgggctggaacaggggggcagggcgccactgcgggaaaatcaacggagccctgagacgtgtttttacttggattggttggtggccttgggggtgcgtttcgtagcgtcattctttttttggctcctccctgtcctcttggtgctgtgggccctgaaagttgtagagtgcgcccctcactgtggcaggagcagtggcgctgagcgtgcccacgggccgcggcttgggtctctcgttttccgggtggtatggccttagacaatggcagtggcgcctggctggcccaagagcccggtccagctacgcccgcctgattccaggcgtcaccaccaacccggggccgcgacgtgggatcaggcaccccggagccgcttgcccgtggccgggctgctctccccctctacgcccaagcac

SEQ ID NO: 99068 - DNA, 157 bp, Homo sapiens
cacagggagagaaactgagacacacggagattaacaaagatagagaggaagagagagaaaggggaagagatagtaagacccagagagagagagagacagggagacagagagaaacagagaaggatgggcatggaggtttatgcctgtaatcccagca

SEQ ID NO: 99069 - DNA, 450 bp, Homo sapiens
cctctgaattgaaatgtattcatttgttcttgtagagtttattatttgttttaatcatctaaatatcttgatttttcagttcatatcatccttactaggattcaacttgattttacgaaaaacactggattaaatatgcataaaagactccaatgtgggatgtgtgctgattccagtgtatcctccagacattactgagaccaaaagtgatgcaattacattttccttttgttgcttttgcatttcttgtagtgaacctaagtccttcagatcccaataaacatacaacctaaattcttcacataccataaacacagaccttgttgtttcctgacttaaatccagttttcaaacttaggcagtgggtgaaaggagagagaagtctatgccaataatattggaaaatctcttttatgccattaatttcagttcctcaaggatcttcaatct

SEQ ID NO: 99070 - DNA, 387 bp, Homo sapiens
taaaggattctggactttggcaaaggagggaatcacccacagatctgaagcagatttgccttctgaaaagactgctctggtttcagtatagaagacatatgggatggggtcagagctgatgtggtaaaatcagttaggctacctgtgctgtgtagaggtattagtggaaatgggagaagttcatagatttaacagatttgatatttatgaggtaaaattgggaggactggaggtataattagaggtgaaagtcaaaggtagtgctttggtttccattttgtgcaactgagtagaagatgggttaggaaatagcagaatggggccacttttgagggtgaaatcaggaaggtagccttgaacatgttgaggttgagaaaggtgtgagaa

SEQ ID NO: 99071 - DNA, 386 bp, Homo sapiens
acctcctacatgcaggagcaagagagagagatgggggtagatgccacacacgtccaaacaaccagacctcgtgagaactcactatcacgagaacagcaatggggaagtctgtccccatgatcccctctccttcctccaggcccctcctccaacactagggattacagtctgacctgagatttgggtggggacacaaatccaaaccacatcacctgggctcacctgtgtcaccaaagtcacaaccatctcccatctcctcagcttccatatgcagtgaccttcctgggcctggcacagaggaagtgcctagcacctggatgggtgtgctggacagatggcggggcaggcagctgagtgggtgggtagatgggtggatggacggttgg

SEQ ID NO: 99072 - DNA, 151 bp, Homo sapiens
actacactccagcctgggtgacagagcgagaccttgtctcgaggaaaaaaaaaaagtgaataggactggatgatggattggttgaggaaaaccaagaatggttcccagagtactgaagtggtgacatttactgaggtgggaaaggtgagga

SEQ ID NO: 99073 - DNA, 214 bp, Homo sapiens
agaaggaacagtgagggcaaatgcatagaattgtgcatagatggggaacagttaagtggtcccatttgactagagcttagaatgtatggagaggggaatatgagacactgattggaagatagcccagggcagtgttgtaaaatgaaagtgaatggactacagaacggttggtctttgtagggtagtagtaggggattggttatgaggctagcat

SEQ ID NO: 99074 - DNA, 727 bp, Homo sapiens
aggggtgtgatgagacggtggggagccgcctctgccggcaacagggagactgagggaggagacaggcccagatgcacccctgtggagggaatgggaatgtggaacaggagccactgggagaccttgcgggaaggagactgagacccagcttgtctgtgaaagaggacggtgtgcgcgaatggggaagccgtgtgagcctgtgcatcagttgagattaggctcagccgtgagcaacataaacccccaggaacagcggctgaggccgtggcaaaacagcctgtttcattcttcccagtgttatctgagtctggaagccagtcagggctggtgtgacagccccgctatcccctgggatccaggggctccctccccaccctcagtgctgagcacaggatgtctgcccaggggtgctctgccgtctctcagcgcattcccccagtgcagctgaaccagagcagccttccctctggagacacaggtggatcccagtcagacagcatggctgggatgggcacagggaggaattgagtatctggacaagggctacggaggggagccaggacaagcatgaagatcactggactcagagtcaggaggtctaggcttctggccctggctctgccactgtgtgactcatgaaggttacttccctgctggaacctcactgggccatgaactagatgatcccctaaaccttctagatgccaaaatagcagctgtagcacta

SEQ ID NO: 99075 - DNA, 124 bp, Homo sapiens
taactggaaggaaagcaggtagggtgtcagctgtgtgatcttcctgggccctcaggccatgctgattgcaaccacaacctattaaataccaggtcccatctctatgctccccgactgcagacca

SEQ ID NO: 99076 - DNA, 601 bp, Homo sapiens
acatgtacatatatatttgataaaataaaaagtaatttaagagatttggtactgatacaagaataaacacatcaatgaataaaaagagagactaaaaatttaaatccaaatacattaagatttgagtatacagttgtctctcagtagctgtggggaattagttccagcaaccccctgcagatacaaaaatgcagatgctgaagtcccttatataaaatggcacagtatttgcatattatttagacatatcttctagcatatccttccatatactttatatctagattacttacaatgcctaatacaatgcctatacatcacttcatttgtgtggattcactcaatggacagcaaattcaagtttgttttttggaactttgtggaatttctttttctaaatattttggattcatagttggttgaacccatggatgtgctgggccaactgtactataaaaatggtatttcaaaccagtgaaaaagaaatatatcattcaacagtgggcagacaactgatacactattaaagaaaaaaagcatcatcccttggtgccttggtccataactcgatcttgagactaaaataaattcaagaatgatt

SEQ ID NO: 99077 - DNA, 659 bp, Homo sapiens
tgcaggggaaatcaaagcctcgaatcgtgaagaaacatgtggaggtgacacaacaattatttgctgggagtgagagaggtactcacatgctcttttcacttattgtccagaagaagaacatcacgatggaaacatacctttcactggagtcattgaatcttaactactgaataccttacccaagaagtcaatgctgaatgtcatcaacaaaggccgcaacaaccatagctgtggataagaagaatccttctcttaagacatgttgattttttgagtgtgcagggtatggagacatgaagccttaaactcgaatacaaaatccactctaagtcctcattttctcttctgtaaaatggacttatgaactgcctccctccctatgagttaatgagataacagttaaatagaatgcagggcgtaacacaggacctctcacagggactgtactcaacacgttagatgtcttaacttcatccctttctgactccagggaaagtgaaatgccagcatttttaagtagatgttacatttctacagcgaacaatcttgtctttctctgatcgtttttggttgatttttatgtatcatgtcaatggttggagcagctagttttaatgcataacacagcgctgccaattttatgctttaaacagtaaact

SEQ ID NO: 99078 - DNA, 448 bp, Homo sapiens
gctaagagatacgcatatacgaccgaggaaataggtcgaaggaattcaactcctactgcacacaaaaagagacggaggcttcaaatgactgaaattcttcagatggtttcttgtgaccactcgtaaagaaagtatttttctccagagtccaaaggcaagataaaaagtctctgacttgaaatcagaaccgatctgctgatctgctagccacagctcgtatattgccataaaccttggaaggaggatttcccaagattaggttgcaaacggcagttcttgccatcttgatgttttggaaggagccaaagatgtgaactttcacatcagccaaaactgtccgcgtccatgtcacattctctatggtaacctactcttgagccaatcactgagtttcaaccaatgaaaggcagccaattatttaaactgtgttcaaataaagcaaatgcca

SEQ ID NO: 99079 - DNA, 574 bp, Homo sapiens
attttaagctacatcaataaatcactgacatagcttactccatgacatagaatcattcattcatctgttcatcaaaatgtgccaacattgtctcctgcacagcactgacctgggggctacaccatgaacattatgaacagattacaggtccttgatgttgatgagtccacagtctaaggcaaaggaggacatttttcaacaatatgtggtggagtctataacacacatgagcacaggggaccaggaagaggaagggcctctactacactctaatggtgagagaaagacagaaatagaaaaagcttccagcaagagacagtagctaagctgataacttatagaatactgtacattttaattgggccatccataggagaatgtttacttaaagaaatactgtacatgtgtctttgtctcctagaatgagtgaactagatgaaatgaacaattagatctgtgtgtaaagataaatctcaaaatcataatactaaatgaaaaatcaaagttacagactgatgtatacattacagtgccatttaagtaagtttaaaaacatacaatagcaacacttgtt

SEQ ID NO: 99080 - DNA, 547 bp, Homo sapiens
gcaggctgaatctcaggcaggcccctccacagtcccttccgtgtctgacttccagggtcttcccagccagaaagcagccgatcaggatcccagccaatccctacccagcagtgagggcgtgctcagtaaactgtagagtgtcgtgccgagggaacgccatggcgccctgccactcacctgtgcctcctaagtaccccaggaggaagctgcacaggctccccacagtgttaacacagctctcccagcacagtctctgcccctgtccaggcccctgacgcccccaggatgatttccagcagcctcttcgttggtcttcctccctctactcctgccccaacaagtcagagggaatctatcaatacctatgtcaggccacatccctcctctgctccacgtcctcccagggctcccgctccccggccaacacggcccttctgaccctgccattcagactcacttttaagagcgagggggtgccaattagtaaacacacaggtgaacgggtgtaaaggggaagtgttctgggcaggctgcgggtgcgggcgcc

SEQ ID NO: 99081 - DNA, 442 bp, Homo sapiens
catgacagaagtacagtgggccttgtggaggttatttgtgatgcatcctggggcaaaagttcgggggtggaagagccatcaattttaaggaagaaatcatttagaaactgaaatttgggctgtgaaggtgctaagagaagaaagatgtgttccaagtattggagggagacctcttgggcctcaaagggcctctgtacagaggatgtttaacatggagtctggtgataagaatggggtagcagagctgggtgcagtgctgggcagtgttgaatgggacttgtattcagagcccaggcatcagtttacccttctaccacaggagggtgaggatgtacccggatgtgaaaggagtactctctcaccttacgtgatgcattatttcagacatttcttgagtagtaaaggcacagccaaaagggctttcctgtcatctcaggccttg

SEQ ID NO: 99082 - DNA, 353 bp, Homo sapiens
cttcaatccacatttctgtcctgctttccattaagtttacctgattagttgtgatgaatcagcccttaactatttcatggtttgtggagattggttcattcctgagtacaataggatggtgggatttttgctttaatgttcattttaaacagaattctagacgcagatctaacattcaaactgaattatgttttctgttaaaagacggtgaaatgtcttggatatatcctcaggatatgtcagtgctttctcataaaataatgtaagcaatagcatttcttatttgtagagcattttgttctgggtggaatctgtgtggtggttctaggggctggacctagggaaggtaataa

SEQ ID NO: 99083 - DNA, 367 bp, Homo sapiens
gccaactaacttgttagcttgcaagtagagtaaaatcttatactcttcactgttcttgacagtattaaaagctttaaagctcctgtccttggactcaacaattccactttaacaaatttatccaaaagaattaatctgtgttcaaaggtatatgtatcaagtatttgtttgcagcattgaaaataaatggaaccaatgtataaaagagtaaatcatggcctaaccttaaagtgtaatgcagtataccaagtgttgtcttagttctgtttgacttggaaaggtgctcgtgatgcattaagtgtaaagagcaagatgatagaattcttcccttcagctccccctgtaactgcaaatctaaatatgtgtg

SEQ ID NO: 99084 - DNA, 370 bp, Homo sapiens
tggtaggagatgggggacaagaagttagagaggcaggtaggagttcgcaccttgagatatgaaattgggttgtagagattttaaatctaaaaagacacctgtggactttgtcttagaagaatgaacaaacaaattcacaacaagtcttcctgcaggtgagattcctagtgaagtggctgagtaaaagacatgcaaatttaaaattctgatgggcaataccaaattgtactacaaaagaataacataactgatcagtgatatacaccttgggtattttattcatttaaacaaatatttgattagagggacaagaacagaaggttaaccacaaccctgactcatgagcttttgcatgatattttccttgttg

SEQ ID NO: 99085 - DNA, 190 bp, Homo sapiens
tctggggagagccagccaccttgttagtgagtccctcagtcctcatctttatatttcaggagtgtcagcttcggaaatcttgtagctcgcctcctcaattactttgcccattttcttctgactctcatggagacgatactctccaaatgtgagtctgacccaagatttggaccagtcttgacacctgaag

SEQ ID NO: 99086 - DNA, 553 bp, Homo sapiens
tgagaggattaagcatcaaagttctcaacctaggaggctgttggaaattagtgatctgatattactggatattagataaaagtttaaacatattatttaatgcattgaaggattattaagaaaataaggaaaatccccaaaaagagaaagagagaagcagtgggttgaaatgagaatagagagcagtgatttataagtgtacaagaaagcccaagatgttcagggaccaaatttaaccaccagcactgcaatcaggaatctaaaatgcaggagtacatgcacatttgcatatatgccccacatatatatttgtacacacatgtacatgtgcacacactcacacacaatgggatagctaaattcgaaactcttctatttagccagtacacttgaagagggttaaaatagtcctaggtaaatcatgcctactggcttccagaaaaaaataaacaaattttcttctggaggaaagcatccctaaattaggctctctggattcctatacattaagttcaacaaaatatgagcttattaaaaagatttaccaaacata

SEQ ID NO: 99087 - DNA, 825 bp, Homo sapiens
accctgatttattttcatcctagcacatttcagtcactacctgaagttatttgatttactttcttaatttccatttctccactctagggaatggtttttgggaaaagcattacatgatgaagaagctacaataattcaccattatgccttttccgagaatcctacagtttttaagtatccagactttgctgcaggctgggccttaagtattccacttgtaaacaagcttaccaagagactaaagagtgaatccttgaaatccgactttacaatagatttaaaacatgagattgccctctacatctgggacaaaggcggaggacctcccctgaccccagtgcctgagttttgtaccaatgacgtggacttctactgtgctaccacattccattcttttctaccgctttgtagaaagccagtgaagaagaaggatatttttgttgcagtaaaaacatgcaagaaatttcatggtgacagaattaattgagaagaaacacccgtgttctttaataaacctattagagcgaaaaaggactgaaagcctaaaggctgaggaaattgaaagcaaaatttgcacagcctgcaggacccttgctggggactgaggaaagttcttgacctttcctcacagcttcttccagcattatgcaatggaggatattttacccaacagtgtgaacttttagtggctgcaagctgcagggagccctttctgggtacctattgttaagcagacttgggagagccaggcaagtctcattgaatactatagtgactatactgaaaattccattcctactgtggatttgggaattcctaatacag

SEQ ID NO: 99088 - DNA, 855 bp, Homo sapiens
cgcggcggcagggcggcggcggcagcggcgcagctccgctccccgcgcgtctcccttccccgcgcccaggtagggcgctcagcctccgccgccaggatgcggccgcccgcctgctggtggctgctcgcgccgccggcgctgctcgcgctcctcacctgctccctggcttttggtttggcttctgaagatacaaagaaagaggtcaagcagtctcaggatttggagaaaagtggtatatcaaggaaaaatgacatagacttaaaaggaattgtattcgtcatccagagtcaaagtaattcttttcatgcaaagagagcagagcagttaaaaaaaagcatcttaaagcaggctgcagatcttacacaggagctccccagtgtcctcctccttcatcagctggctaaacaagaaggtgcatggaccatacttccgttgttaccgcacttttctgtaacatatagcagaaattcatcttggattttcttctgtgaagaagagacaagaatacagattccaaaactcttggaaaccctcagaagatatgacccctctaagcattatgccttttccgagaatcctacagtttttaagtatccagactttgctgcaggctgggccttaagtattccacttgtaaacaagcttaccaagagactaaagagtgaatccttgaaatccgactttacaatagatttaaaacatgagattgccctctacatctgggacaaaggcggaggacctcccctgaccccagtgcctgagttttgtaccaatgacgtggacttctactgtgctaccacattccattcttttctaccgctttgtgtgagtaacagaagaaaaacttctttgcat

SEQ ID NO: 99089 - DNA, 906 bp, Homo sapiens
cgcggcggcagggcggcggcggcagcggcgcagctccgctccccgcgcgtctcccttccccgcgcccaggtagggcgctcagcctccgccgccaggatgcggccgcccgcctgctggtggctgctcgcgccgccggcgctgctcgcgctcctcacctgctccctggcttttggtttggcttctgaagatacaaagaaagaggtcaagcagtctcaggatttggagaaaagtggtatatcaaggaaaaatgacatagacttaaaaggaattgtattcgtcatccagagtcaaagtaattcttttcatgcaaagagagcagagcagttaaaaaaaagcatcttaaagcaggctgcagatcttacacaggagctccccagtgtcctcctccttcatcagctggctaaacaagaaggtgcatggaccatacttccgttgttaccgcacttttctgtaacatatagcagaaattcatcttggattttcttctgtgaagaagagacaagaatacagattccaaaactcttggaaaccctcagaagatatgacccctctaaggaatggtttttgggaaaagcattacatgatgaagaagctacaataattcaccattatgccttttccgagaatcctacagtttttaagtatccagactttgctgcaggctgggccttaagtattccacttgtaaacaagcttaccaagagactaaagagtgaatccttgaaatccgactttacaatagatttaaaacatgagattgccctctacatctgggacaaaggcggaggacctcccctgaccccagtgcctgagttttgtaccaatgacgtggacttctactgtgctaccacattccattcttttctaccgctttgtgtgagtaacagaagaaaaacttctttgcat

SEQ ID NO: 99090 - DNA, 387 bp, Homo sapiens
cttaaagtataataataataaaattaaaaaaaagtcaaggaagtgaattagaggtccctagaacctccaaaaagtaatgcaaccctggatggcatcttgatattagcctggggagacctgtgtcaaacttctatcctgtagaactgtaagataacctgtgtttttcttgtaaaagatttcaacatttgctttagattcagggggttacatgtacaggtttgttacatggcatcacctagatagtgagctagtacccagtaggtagttttcctgcttttgcccccttccgtcttccccctcagtagtccccagtgtctgttgttcccatctttatgttcatgtgtatccaatgtttagctcccacttataagtgagaacgtgtagtat

SEQ ID NO: 99091 - DNA, 320 bp, Homo sapiens
ccattttgcagaccttggctaaagtgaagcattccacgggggtttgggcccttagaaacagcctgtccaactgcctccctgactttatcacactctgctgggaaaaagtccaaggaacatcagcatcacattctgcgggaacaagggccaaaatgcctcattatgggaacatcttcccaggcagcaagccatactgcccagacccgtcctgctcatacctacaagtaccccaacctgtacgaagcagtgggcactggcattaagctagtcccccacctctgtaggtcttatgctagacagaaagcctggatttgatgtag

SEQ ID NO: 99092 - DNA, 492 bp, Homo sapiens
gtcttgaacttctggcctcaagtgatctgcccgccttggcctcccgaagtgctgagattacaggcgtgagccatcacacctggccaccattgatctttctgataaaggtactttttaaaaacttacattagcagagttctttgtgtagtttattaggcactttcatgtttatgatagcatttgatcacatgtaaacttggtaacattgacaaaatcactttcattttcttttacagatatggaaattgatctcagagaggctgagatctgctcagggtcagcaagctctcaaaactgttactagtactttttcttcaaaatatgtgtgtcgagcgtttttggctgagcctggatggattgccattttgtatgtgactttttgaagtctggacagcagaagaatgtgtttggtggttgcagtcagtaactttttctattcaactttatttctgaaattaaggcagcaagtactgctgactggtcttatcattt

SEQ ID NO: 99093 - DNA, 756 bp, Homo sapiens
acgtgagggggcggggctgcctgcggaaggggccgtgcgcgtggggtcgctccgcagctgcgagttcatggcgtcccggtgctccgagccctacccggaggtctccagaatccctaccgtcaggggatgcaacggctccctgtctggtgccctctcctgctgcgaggactcggcccggggctcgggcccgcccaaggcccctacggtggccgagggtcccagctcctgccttcggcggaacgtgatcagcgagagggagcgcaggaagcggatgtcgttgagctgtgagcgtctgcgggccctgctgccccagttcgatggccggcgggaggacatggcctcggtcctggagatgtctgtgcagttcctgcggcttgccagcgccctggggcccagtcaggagcagcacgctattcttgcttcctccaaggaaatgtggcactcgttgcaggaggatgttttacagttgacgttgtcgagtcagattcaagcaggtgtgccagaccctgggacgggagcgtccagcgggactcgaaccccagatgtgaaggcgtttctggaaagtccttggtccctggatccagcgtcggccagcccagagcccgtgccgcacatccttgcgtcctccaggcagtgggaccccgcgagctgcacgtccctgggcacggacaagtgtgaggcactgttggggctgtgccaggtgcggggtgggctgccccctttctcaggtgagtcctgggtgtgcatgtggggtgc

SEQ ID NO: 99094 - DNA, 204 bp, Homo sapiens
tatgaaaatcttcccttatgatgagatgggaatcagatgacattcatgaagggttttttgaaaatcaaatagcatcatgcaaatattaaggacttagcattttaagataataacaaaaatatgattattgattcttaagaaagcatcttgtatttgcatgctatgtgaatagttacataaatgaataaagtaaaactgctatac

SEQ ID NO: 99095 - DNA, 602 bp, Homo sapiens
cttggcaattcttacttacttacatacatcctttctaaagtgtaaggtagtaatttaccacaagcacaggcacacttttcctcattcgttttcccagtataatttttcataatatttgcctaaattaatttgcagtattttctttattgtggctacgtaaatatttgtaagccacttgaatactgtgattgtttttcctttttcgtgtacttgtttattatattttgctgaagtattcattcgtttttaccatttgcttagttttctatatacctatcaccaattcattcctaaattatcctgtagaaatattgtaaatcctggccaggcatggtagcacatgtctgtaatcccagcactttgggaggccgaggtgggcagattaccttaggtcaggagttcaagaccagcctggccaacatggtgaaaccctatctctactaaaaatacaaaaattaaccaggcatggtggtgttcctgtaatcccagctgctcaggaggctgaggcaggagaatcacttgaacctgggaggcagaggttgcagtgagtcgagattgcgccattgcactcccgcctgggtgacagagtgagtctccgtctc

SEQ ID NO: 99096 - DNA, 688 bp, Homo sapiens
cccgcgaattcggccattatggccgatgaattcatataaaatataaccttacaccataagtttttttaaaaaatcaatgtactgttctctctaatataaaagaaaaataaaagggaagtaatttataataaaatttatttcagtatttaatgatgtggcacaactatgccataaagcataagatcaagtgtttgcatctatctgtaaatagaatcatcgtgtaatttagaaagtatgtctgctgcctatacagttgtgtgcattgttgactcatgttgtgttgccattagtggtgtaatttcttcctgaaattgcagacaactcttaggaaagctctaaacaaagaataatcaatactttctgagttggaaaagattttttaaagtcacttagtagtccaagcactcatcttattgaatcaagatatattccctgtttatcataatttcaaagatccttacttctgttgtgtgaatattattgcacatgtgatcagtagagtgggaagtgttactgggactcctaattttttcttccaggtattgcttatggctttcagctgtgtgatatctgaagcgatactctttctcaattattcaaattgaatttgtcctttcaatccttttttttatggcaacccttgaaggtccccattaggtacacccgtgggttacccccccggttatct

SEQ ID NO: 99097 - DNA, 742 bp, Homo sapiens
cccgcgaattcggccattatggccgatgaattcatataaaatataaccttacaccataagtttttttaaaaaatcaatgtactgttctctctaatataaaagaaaaataaaagggaagtaatttataataaaatttatttcagtatttaatgatgtggcacaactatgccataaagcataagatcaagtgtttgcatctatctgtaaatagaatcatcgtgtaatttagaaagtatgtctgctgcctatacagttgtgtgcattgttgactcatgttgtgttgccattagtggtgtaatttcttcctgaaattgcagacaactcttaggaaagctctaaacaaagaataatcaatactttctgagttggaaaagattttttaaagtcacttagtagtccaagcactcatcttattgaatcaagatatattccctgtttatcataatttcaaagatccttacttctgttgtgtgaatattattgcacatgtgatcagtagagtgggaagtgttactgggactcctaattttttcttccaggtattgcttatggctttcagctgtgtgatatctgaagcgatactctttctcaattattcaaatgattggccttcatctttttttaaatgcagcctgcagtaaccaatagaataccagtagtaaccagtagacacattcttcccatcgtgaacgtgagagctatatttaagtctattcaatgcctaacttaatggcacaatttt

SEQ ID NO: 99098 - DNA, 688 bp, Homo sapiens
cccgcgaattcggccattatggccgatgaattcatataaaatataaccttacaccataagtttttttaaaaaatcaatgtactgttctctctaatataaaagaaaaataaaagggaagtaatttataataaaatttatttcagtatttaatgatgtggcacaactatgccataaagcataagatcaagtgtttgcatctatctgtaaatagaatcatcgtgtaatttagaaagtatgtctgctgcctatacagttgtgtgcattgttgactcatgttgtgttgccattagtggtgtaatttcttcctgaaattgcagacaactcttaggaaagctctaaacaaagaataatcaatactttctgagttggatatattccctgtttatcataatttcaaagatccttacttctgttgtgtgaatattattgcacatgtgatcagtagagtgggaagtgttactgggactcctaattttttcttccaggtattgcttatggctttcagctgtgtgatatctgaagcgatactctttctcaattattcaaatgattggccttcatctttttttaaatgcagcctgcagtaaccaatagaataccagtagtaaccagtagacacattcttcccatcgtgaacgtgagagctatatttaagtctattcaatgcctaacttaatggcacaatttt

SEQ ID NO: 99099 - DNA, 732 bp, Homo sapiens
actagcaaataacataatgtgaggccaaattatattggaaattttttttaagtctaacaggattctaaggctgtgatgctcttagagggaacacaacagtattcattaactattgacagtagtgcttgatgtatttgagtttgggttttttttttgtttttttttttttactttgcagcttgagatttaaaaggtgtattctggactttagtgagcccttagtgaacacctgcctccttttcagataattgtgacataccatcattttagcagcatgattttaaaagtacattaacatctgtagccatgctctctaaatgtgtttgacttaattagatcaaacctgaagataccatgaaagcctggtggccaagagagagctgtaagtaagttttggggtgcttgagtacagatgttaatttattcacacaaaataaaaatatttgtcttttggaatagccgaaattagtaggcaggacaaatctcatttttttctaaatatacaatctgatatacaaaaataatttttagtcaaggcatgggcaactaatgtcagactactcattatgtactttggctttaaaatgaataatttcctttcttcgttttgttttaacagataatcccagatccagctggaaagctgaagtatttcgataaactgaattgagaaatacttcttcaagttatgatgcttgaaagttctcaataaagttcacggtttcattacca

SEQ ID NO: 99100 - DNA, 405 bp, Homo sapiens
gcggccgcctactactactactgctactgctcgaattcaagcttctaacgatgtacggggacatgctctgttgattcacagtttacccatttggcctggattaatacccctcgaagacaaggaggacttgggccaataaggattccacttctttcagatttgacccatcagatctcaaaggactatggtgtatacctagaggactcaggccacactcttagaggtctcttcattattgatgacaaaggaatcctaagacaaattactctgaatgatcttcctgtgggtagatcagtggatgagacactacgtttggttcaagcattccagtacactgacaaacacggagaagtctgccctgctggctggaaaccttggtatgaaacaatatattccgattccact

SEQ ID NO: 99101 - DNA, 1318 bp, Homo sapiens
gggaggagctggtctcgcgaggccgcgccccggttcgcgcgggcgtcgtgcacgcggttgtagctgcccggcggcggcagaagcggcgctcgcgccaagggacgtgtttctgcgctcgcgtggtcatggaggcgctgccgctgctagccgcgacaactccggaccacggccgccaccgaaggctgcttctgctgccgctactgctgttcctgctgccggctggagctgtgcagggctgggagacagaggagaggccccggactcgcgaagaggagtgccacttctacgcgggtggacaagtgtacccgggagaggcatcccgggtatcggtcgccgaccactccctgcacctaagcaaagcgaagatttccaagccagcgccctactgggaaggaacagctgtgatcgatggagaatttaaggagctgaagttaactgattatcgtgggaaatacttggttttcttcttctacccacttgatttcacatttgtgtgtccaactgaaattatcgcttttggcgacagacttgaagaattcagatctataaatactgaagtggtagcatgctctgttgattcacagtttacccatttggcctggattaatacccctcgaagacaaggaggacttgggccaataaggattccacttctttcagatttgacccatcagatctcaaaggactatggtgtatacctagaggactcaggccacactcttagaggtctcttcattattgatgacaaaggaatcctaagacaaattactctgaatgatcttcctgtgggtagatcagtggatgagacactacgtttggttcaagcattccagtacactgacaaacacggagaagtctgccctgctggctggaaacctggtagtgaaacaataatcccagatccagctggaaagctgaagtatttcgataaactgaattgagaaatacttcttcaagttatgatgcttgaaagttctcaataaagttcacggtttcattaccaaaaaaaaaaaagaaaaaagaaaaacccagaaaaaaaaaaaaaaaaaacacaaaaaccaaaaaaaaaaaaagggggggggggccaataaagatcccgccggcaggggggcccaccagtagttgacggcagacgggcatgttgtctaccaagcaaggggccccctcatagaggaggggccatcaataaaaacagcagagcgacgcgggccccaccctctaaaagaaccggatgagcggacaacacagcgccactgcgcaatctgggggaaaacacccaatcaggggggcggacaaagaggggacaacaccccgagga

SEQ ID NO: 99102 - DNA, 1340 bp, Homo sapiens
gggaggagctggtctcgcgaggccgcgccccggttcgcgcgggcgtcgtgcacgcggttgtagctgcccggcggcggcagaagcggcgctcgcgccaagggacgtgtttctgcgctcgcgtggtcatggaggcgctgccgctgctagccgcgacaactccggaccacggccgccaccgaaggctgcttctgctgccgctactgctgttcctgctgccggctggagctgtgcagggctgggagacagaggagaggccccggactcgcgaagaggagtgccacttctacgcgggtggacaagtgtacccgggagaggcatcccgggtatcggtcgccgaccactccctgcacctaagcaaagcgaagatttccaagccagcgccctactgggaaggaacagctgtgatcgatggagaatttaaggagctgaagttaactgattatcgtgggaaatacttggttttcttcttctacccacttgatttcacatttgtgtgtccaactgaaattatcgcttttggcgacagacttgaagaattcagatctataaatactgaagtggtagcatgctctgttgattcacagtttacccatttggcctggattaatacccctcgaagacaaggaggacttgggccaataaggattccacttctttcagatttgacccatcagatctcaaaggactatggtgtatacctagaggactcaggccacactcttagaggtctcttcattattgatgacaaaggaatcctaagacaaattactctgaatgatcttcctgtgggtagatcagtggatgagacactacgtttggttcaagcattccagtacactgacaaacacggagaagtctgccctgctggctggaaacctggtagtgaaacaatcaaacctgaagataccatgaaagcctggtggccaagagagagctataatcccagatccagctggaaagctgaagtatttcgataaactgaattgagaaatacttcttcaagttatgatgcttgaaagttctcaataaagttcacggtttcattaccaaaaaaaaaaaagccactcccccctctcgacgtagacacgtacgaccaccactactaagtgtcacagacccgacagcgagcacacccaacgcaaccaggagcggggccacaaattaacaccacggaggagaaaagttgcacaccactcgtcaagagggcgccacataggtcgataatccagcagcccgcccacacagcgcacgcaacacctgctactcgaaaacccactggggaaacgcaccacgcgggcccgcgaagacagcgccgacacgtcggaacacgtaaccaacca

SEQ ID NO: 99103 - DNA, 1286 bp, Homo sapiens
gggaggagctggtctcgcgaggccgcgccccggttcgcgcgggcgtcgtgcacgcggttgtagctgcccggcggcggcagaagcggcgctcgcgccaagggacgtgtttctgcgctcgcgtggtcatggaggcgctgccgctgctagccgcgacaactccggaccacggccgccaccgaaggctgcttctgctgccgctactgctgttcctgctgccggctggagctgtgcagggctgggagacagaggagaggccccggactcgcgaagaggagtgccacttctacgcgggtggacaagtgtacccgggagaggcatcccgggtatcggtcgccgaccactccctgcacctaagcaaagcgaagatttccaagccagcgccctactgggaaggaacagctgtgatcgatggagaatttaaggagctgaagttaactgattatcgtgggaaatacttggttttcttcttctacccacttgatttcacatttgtgtgtccaactgaaattatcgcttttggcgacagacttgaagaattcagatctataaatactgaagtggtagcatgctctgttgattcacagtttacccatttggcctggattaatacccctcgaagacaaggaggacttgggccaataaggattccacttctttcagatttgacccatcagatctcaaaggactatggtgtatacctagaggactcaggccacactcttagaggtctcttcattattgatgacaaaggaatcctaagacaaattactctgaatgatcttcctgtgggtagatcagtggatgagacactacgtttggttcaagcattccagtacactgacaaacacggagaagtctgccctgctggctggaaacctggtagtgaaacaatcaaacctgaagataccatgaaagcctggtggccaagagagagctgtaagtaagttttggggtgcttgagtacagatgttaatttattcacacaaaataaaaatatttgtcttttggaatagccgaaattagtaggcaggacaaatctcatttttttctaaatatacaatctgatatacaaaaataatttttagtcaaggcatgggcaactaatgtcagactactcattatgtactttggctttaaaatgaataatttcctttcttcgttttgttttaacagataatcccagatccagctggaaagctgaagtatttcgataaactgaattgagaaatacttcttcaagttatgatgcttgaaagttctcaataaagttcacggtttcattacca

SEQ ID NO: 99104 - DNA, 1043 bp, Homo sapiens
gggaggagctggtctcgcgaggccgcgccccggttcgcgcgggcgtcgtgcacgcggttgtagctgcccggcggcggcagaagcggcgctcgcgccaagggacgtgtttctgcgctcgcgtggtcatggaggcgctgccgctgctagccgcgacaactccggaccacggccgccaccgaaggctgcttctgctgccgctactgctgttcctgctgccggctggagctgtgcagggctgggagacagaggagaggccccggactcgcgaagaggagtgccacttctacgcgggtggacaagtgtacccgggagaggcatcccgggtatcggtcgccgaccactccctgcacctaagcaaagcgaagaaagtctgtaagcttcaccagactgccaaagagatctaaagtttccaagccagcgccctactgggaaggaacagctgtgatcgatggagaatttaaggagctgaagttaactgattatcgtgggaaatacttggttttcttcttctacccacttgatttcacatttgtgtgtccaactgaaattatcgcttttggcgacagacttgaagaattcagatctataaatactgaagtggtagcatgctctgttgattcacagtttacccatttggcctggattaatacccctcgaagacaaggaggacttgggccaataaggattccacttctttcagatttgacccatcagatctcaaaggactatggtgtatacctagaggactcaggccacactcttagaggtctcttcattattgatgacaaaggaatcctaagacaaattactctgaatgatcttcctgtgggtagatcagtggatgagacactacgtttggttcaagcattccagtacactgacaaacacggagaagtctgccctgctggctggaaacctggtagtgaaacaataatcccagatccagctggaaagctgaagtatttcgataaactgaattgagaaatacttcttcaagttatgatgcttgaaagttctcaataaagttcacggtttcattacca

SEQ ID NO: 99105 - DNA, 777 bp, Homo sapiens
gggaggagctggtctcgcgaggccgcgccccggttcgcgcgggcgtcgtgcacgcggttgtagctgcccggcggcggcagaagcggcgctcgcgccaagggacgtgtttctgcgctcgcgtggtcatggaggcgctgccgctgctagccgcgacaactccggaccacggccgccaccgaaggctgcttctgctgccgctactgctgttcctgctgccggctggagctgtgcagggctgggagacagaggagaggccccggactcgcgaagaggagtgccacttctacgcgggtggacaagtgtacccgggagaggcatcccgggtatcggtcgccgaccactccctgcacctaagcaaagcgaagatttccaagccagcgccctactgggaaggaacagctgtgatcgatggagaatttaaggagctgaagttaactgattatcgtgggaaatacttggttttcttcttctacccacttgatttcacatttgtgtgtccaactgaaattatcgcttttggcgacagacttgaagaattcagatctataaatactgaagtggtagcatgctctgttgattcacagtttacccatttggcctggattaatacccctcgaagacaaggaggacttgggccaataaggattccacttctttcagatttgacccatcagatctcaaaggactatggtgtatacctagaggactcaggccacactcttagaggtctctcattatgatgacaaaggaatctgactactctgatgtcttcctggg

SEQ ID NO: 99106 - DNA, 245 bp, Homo sapiens
tgccttgactaaaaattatttttgtatatcagattgtatatttagaaaaaaatgggcaactaatgtcagactactcattatgtactttggctttaaaatgaataatttcctttcttcgttttgttttaacagataatcccagatccagctggaaagctgaagtatttcgataaactgaattgagaaatacttcttcaagttatgatgcttgaaagttctcaataaagttcacggtttcattacca

SEQ ID NO: 99107 - DNA, 696 bp, Homo sapiens
catggtggctcacgcctgtaatcccagcactttgggaggccgaggcaggtagattgctcaagtccagcagtttgagactagcctgggcaacatggcgaaaccctgtttgtacaaaaaatacaaaaattagctgggcgtggtggcacacacctgtagtcccagctactcagtaggctgtggcgagaggatcacttgagcccaagaggttgaggctgcagtgagccgagatcatgccactgcacttcagcctgggcaacagagtgagatcctgtttgaaaacaaataaaaaatttattatttattttcaaaataatacatgtacatatgcacatagtttttaaaggtcagattatcttcaacaactgtaaatactctggtacatttcttagccaaaaacaaatttttaaagctgcagttttacagtgataattccaaattatacattagattgagggagggatgtccacaggtgtgtgtacgtgtgtgtgtgtgtgtgtgtgtataccattggagtaggtaggtagtgtggtgtttgttctgtatagcatccttttgtgtggatggtataggaattcacaatacataaatgagaagaaatgacctcatctctaccattcttctgttttacagaggtctcttcattattgatgacaaaggaatcctaagacaaattactctgaatgatcttcctgtggg

SEQ ID NO: 99108 - DNA, 1003 bp, Homo sapiens
gggaggagctggtctcgcgaggccgcgccccggttcgcgcgggcgtcgtgcacgcggttgtagctgcccggcggcggcagaagcggcgctcgcgccaagggacgtgtttctgcgctcgcgtggtcatggaggcgctgccgctgctagccgcgacaactccggaccacggccgccaccgaaggctgcttctgctgccgctactgctgttcctgctgccggctggagctgtgcagggctgggagacagaggagaggccccggactcgcgaagaggagtgccacttctacgcgggtggacaagtgtacccgggagaggcatcccgggtatcggtcgccgaccactccctgcacctaagcaaagcgaagatttccaagccagcgccctactgggaaggaacagctgtgatcgatggagaatttaaggagctgaagttaactgattatcgtgggaaatacttggttttcttcttctacccacttgatttcacatttgtgtgtccaactgaaattatcgcttttggcgacagacttgaagaattcagatctataaatactgaagtggtagcatgctctgttgattcacagtttacccatttggcctggattaatacccctcgaagacaaggaggacttgggccaataaggattccacttctttcagatttgacccatcagatctcaaaggactatggtgtatacctagaggactcaggccacactcttagaggtctcttcattattgatgacaaaggaatcctaagacaaattactctgaatgatcttcctgtgggtagatcagtggatgagacactacgtttggttcaagcattccagtacactgacaaacacggagaagtctgccctgctggctggaaacctggtagtgaaacaataatcccagatccagctggaaagctgaagtatttcgataaactgaattgagaaatacttcttcaagttatgatgcttgaaagttctcaataaagttcacggtttcattacca

SEQ ID NO: 99109 - DNA, 1011 bp, Homo sapiens
gagagagagagagagagagagagagagagagagagagagagagagagagagagagagagagagagagactcgcgccgaattcggcacgaagcggcgctcgcgccaagggacgtgtttctgcgctcgcgtggtcatggaggcgctgccgctgctagccgcgacaactccggaccacggccgccaccgaaggctgcttctgctgccgctactgctgttcctgctgccggctggagctgtgcagggctgggagacagaggagaggccccggactcgcgaagaggagtgccacttctacgcgggtggacaagtgtacccgggagaggcatcccgggtatcggtcgccgaccactccctgcacctaagcaaagcgaagatttccaagccagcgccctactgggaaggaacagctgtgatcgatggagaatttaaggagctgaagttaactgattatcgtgggaaatacttggttttcttcttctacccacttgatttcacatttgtgtgtccaactgaaattatcgcttttggcgacagacttgaagaattcagatctataaatactgaagtggtagcatgctctgttgattcacagtttacccatttggcctggattaatacccctcgaagacaaggaggacttgggccaataaggattccacttctttcagatttgacccatcagatctcaaaggactatggtgtatacctagaggactcaggccacactcttagaggtctcttcattattgatgacaaaggaatcctaagacaaattactctgaatgatcttcctgtgggtagatcagtggatgagacactacgtttggttcaagcattccagtacactgacaaacacggagaagtctgccctgctggctggaaacctggtagtgaaacaataatcccagatccagctggaaagctgaagtatttcgataaactgaattgagaaatacttcttcaagttatgatgcttgaaagttctcaataaagttcacggtttcattacca

SEQ ID NO: 99110 - DNA, 960 bp, Homo sapiens
gggaggagctggtctcgcgaggccgcgccccggttcgcgcgggcgtcgtgcacgcggttgtagctgcccggcggcggcagaagcggcgctcgcgccaagggacgtgtttctgcgctcgcgtggtcatggaggcgctgccgctgctagccgcgacaactccggaccacggccgccaccgaaggctgcttctgctgccgctactgctgttcctgctgccggctggagctgtgcagggctgggagacagaggagaggccccggactcgcgaagaggagtgccacttctacgcgggtggacaagtgtacccgggagaggcatcccggtttccaagccagcgccctactgggaaggaacagctgtgatcgatggagaatttaaggagctgaagttaactgattatcgtgggaaatacttggttttcttcttctacccacttgatttcacatttgtgtgtccaactgaaattatcgcttttggcgacagacttgaagaattcagatctataaatactgaagtggtagcatgctctgttgattcacagtttacccatttggcctggattaatacccctcgaagacaaggaggacttgggccaataaggattccacttctttcagatttgacccatcagatctcaaaggactatggtgtatacctagaggactcaggccacactcttagaggtctcttcattattgatgacaaaggaatcctaagacaaattactctgaatgatcttcctgtgggtagatcagtggatgagacactacgtttggttcaagcattccagtacactgacaaacacggagaagtctgccctgctggctggaaacctggtagtgaaacaataatcccagatccagctggaaagctgaagtatttcgataaactgaattgagaaatacttcttcaagttatgatgcttgaaagttctcaataaagttcacggtttcattacca

SEQ ID NO: 99111 - DNA, 1098 bp, Homo sapiens
tgccagggagctccaacagaactgagggacgaacagtaggtgcctgagagctggccgatctggtcactctctccagtgggccacaggggcccacttggtgggcagtctctgctgccagctagggcatctcagctcagcccagagcaaagacgtgtagggacataacgctttcctcaagcttcctttcccaggtccaaacttagaggcccagttttgggcctagaattcactgaggtttgtggctgtttgtccaacagtcaccatggatcaccgaagccgactacggggcacaggcctgaaccgaatccctgggactcagtcccgagccccccgagtcccactccccttccacgtgcaacaggaggccagggaaggagaagactgggagcgagagccacctcgtcagaggcctcctatctatgagccaccagaaagtgaagagctgccagataatgttatggtttccaagccagcgccctactgggaaggaacagctgtgatcgatggagaatttaaggagctgaagttaactgattatcgtgggaaatacttggttttcttcttctacccacttgatttcacatttgtgtgtccaactgaaattatcgcttttggcgacagacttgaagaattcagatctataaatactgaagtggtagcatgctctgttgattcacagtttacccatttggcctggattaatacccctcgaagacaaggaggacttgggccaataaggattccacttctttcagatttgacccatcagatctcaaaggactatggtgtatacctagaggactcaggccacactcttagaggtctcttcattattgatgacaaaggaatcctaagacaaattactctgaatgatcttcctgtgggtagatcagtggatgagacactacgtttggttcaagcattccagtacactgacaaacacggagaagtctgccctgctggctggaaacctggtagtgaaacaataatcccagatccagctggaaagctgaagtatttcgataaactgaattgagaaatacttcttcaagttatgatgcttgaaagttctcaataaagttcacggtttcattacca

SEQ ID NO: 99112 - DNA, 958 bp, Homo sapiens
gggaggagctggtctcgcgaggccgcgccccggttcgcgcgggcgtcgtgcacgcggttgtagctgcccggcggcggcagaagcggcgctcgcgccaagggacgtgtttctgcgctcgcgtggtcatggaggcgctgccgctgctagccgcgacaactccggaccacggccgccaccgaaggctgcttctgctgccgctactgctgttcctgctgccggctggagctgtgcagggctgggagacagaggagaggccccggactcgcgaagaggagtgccacttctacgcgggtggacaagtgtacccgggagaggcatcccgggtatcggtcgccgaccactccctgcacctaagcaaagcgaagatttccaagccagcgccctactgggaaggaacagctgtgatcgatggagaatttaaggagctgaagttaactgattatcgtgggaaatacttggttttcttcttctacccacttgatttcacatttgtgtgtccaactgaaattatcgcttttggcgacagacttgaagaattcagatctataaatactgaagtggtagcatgctctgttgattcacagtttacccatttggcctggtcagtatcttacacttatattcgtagaaaaaaaagaatggatttactcttaaagcatggacagataactcttgatatgatataagaatatagtcatttatcagacaattcaggaatagctttatctaagagtaatacatgtaactacacattttccaggttaaaaaaagagagaagagtaatataatcagctgctataataaaaatgcttaaggattttataggacatttcaaaataaggggaaaagttaaatgcaatagatgtgatttctatagcgaaaaccactgaattatatgcttatgataaattgggttaccataatctggaggaaaaaaatctttaaaatatgccatttc

SEQ ID NO: 99113 - DNA, 2323 bp, Homo sapiens
ggaattagcctcctcaatgaaaaagaaagagggggaggaagaggaagagaaaagaagaagaaaaccctgaacatggtttcattggatattcacccgaactgctacagaacaacacgctgcccgattacagcccgggggaatcttttttcactgtctttggggttttcttcccagcggctacaggagtcatggccggcttcaacatggggggcgacctcagggagcctgccgccagcattcccctgggctccctggcagctgttggcatctcgtggtttctgtacatcgtcttcgtcttcctcctgggcgccatctgcactcgagaggcccttcgctatgacttcctgatagcggaaaaggtatccctcatgggcttcctgttccttttgggcttatacatctcgtccctggcttcctgcatgggaggactttatggagctccccgcatcctgcagtgcattgcccaggagaaagtgatccctgcacttgcctgtctgggacaagggaaggggccaaacaaaacacccgtggctgccatctgcctgaccagcttggtgaccatggcctttgtttttgtgggtcaagtgaacgttctggcccccatcgtcaccatcaacttcatgctgacatacgttgcagtggactactcttacttctccctgtccatgtgttcctgcagcctgaccccggtgcctgagccggtgctcagggagggcgcagaaggcctccactgctctgagcacctgctcttagagaaagctcccagttacggctctgagggacctgcccaaagagtcttggagggcacgctactggaattcaccaaggacatggatcagctcctccagctaaccaggaagcttgagagtagccagcccaggcaaggagagggtaacaggaccccagaaagtcagaagaggaaaagcaagaaggccaccaagcagaccctacaagatagcttcctcttggacctcaaatcccctccttctttccctgtcgagatctctgacaggttgcccgctgcctcctgggaggggcaggagtcctgctggaacaagcagacttccaagagcgaagggactcagcctgagggaacatatggagagcaacttgttcctgagctgtgcaaccaatcagagtccagtggagaagatttcttcctgaagtccaggctccaagaacaagatgtctggagaagatccacttctttctatacccacatgtgcaacccctgggtctccctgttgggggctgttgggtcccttctcatcatgtttgtgatacagtgggtgtataccctggttaacatgggtgttgctgccatcgtgtatttctacattggccgggccagtccagggcttcaccttggatcagcctccaacttcagctttttccggtggatgaggtctctcttgctcccctcctgcaggagcttgcagtccccccaggagcagatcatcttggcgccgtccctggctaaggttgacatggagatgactcagctcacccaggagaatgcagacttcgccactcgggatcgctaccaccactcctccctcgtgaaccgggagcagctgatgcctcactactagatgcagtgctgggaccttcctcttttggagctgtcccatgtacagtggacccaagctcaggaccttcgtggagctgcttctccaacctgagaaactcaagacccatcctcccgctgtcactttggacaatggaaatctacattttcttttccctttttttttttttgagacagagtctcgccttgtcacccaggctggagtccagtggcacaatcttggctcactgcaacctctgcttcccgagttcaagcaattctcctgcctcagcctcctgagtagctgggattataggcatgcaccaccacacccagctattttttgtatttttactggagacagggtttcaccatgttggccaggctggtctcgaactcctgacctcgtgatccacccgtctcagcctcccaaagtactgggattacaggcgtgagccaccatgcctggccagaaatctatgttttcttagaacatgtggaagaaggaaaaagacaaaaaaggaagtctggattctgaggaccacgtctcacccagggtgacatcaggaatggtgctagcctctgcaacacgacacccagtctgaagagctctatacaggtactaagactagcaggggacaccaagactctgcacaaccagattgcttgtgcagagggccacaataagtgtatgttttatattttattgtattatttattcaaaaataaataatacactcacatgtttccacaccc

SEQ ID NO: 99114 - DNA, 2616 bp, Homo sapiens
caatccatatgaaatgtggtggtggattcagctgaaaccatggaatgaatgggggcgaggctggggatgtggaaactgtatcccagggatcagatctagacgactcagtggatgattgcatggggtgcaggtatccctcatgggcttcctgttccttttgggcttatacatctcgtccctggcttcctgcatgggaggactttatggagctccccgcatcctgcagtgcattgcccaggagaaagtgatccctgcacttgcctgtctgggacaagggaaggggccaaacaaaacacccgtggctgccatctgcctgaccagcttggtgaccatggcctttgtttttgtgggtcaagtgaacgttctggcccccatcgtcaccatcaacttcatgctgacatacgttgcagtggactactcttacttctccctgtccatgtgttcctgcagcctgaccccggtgcctgagccggtgctcagggagggcgcagaaggcctccactgctctgagcacctgctcttagagaaagctcccagttacggctctgagggacctgcccaaagagtcttggagggcacgctactggaattcaccaaggacatggatcagctcctccagctaaccaggaagcttgagagtagccagcccaggcaaggagagggtaacaggaccccagaaagtcagaagaggaaaagcaagaaggccaccaagcagaccctacaagatagcttcctcttggacctcaaatcccctccttctttccctgtcgagatctctgacaggttgcccgctgcctcctgggaggggcaggagtcctgctggaacaagcagacttccaagagcgaagggactcagcctgagggaacatatggagagcaacttgttcctgagctgtgcaaccaatcagagtccagtggagaagatttcttcctgaagtccaggctccaagaacaagatgtctggagaagatccacttctttctatacccacatgtgcaacccctgggtctccctgttgggggctgttgggtcccttctcatcatgtttgtgatacagtgggtgtataccctggttaacatgggtgttgctgccatcgtgtatttctacattggccgggccagtccagggcttcaccttggatcagcctccaacttcagctttttccggtggatgaggtctctcttgctcccctcctgcaggagcttgcagtccccccaggagcagatcatcttggcgccgtccctggctaaggttgacatggagatgactcagctcacccaggagaatgcagacttcgccactcgggatcgctaccaccactcctccctcgtgaaccgggagcagctgatgcctcactactagatgcagtgctgggaccttcctcttttggagctgtcccatgtacagtggacccaagctcaggaccttcgtggagctgcttctccaacctgagaaactcaagacccatcctcccgctgtcactttggacaatggaaatctacattttcttttccctttttttttttttgagacagagtctcgccttgtcacccaggctggagtccagtggcacaatcttggctcactgcaacctctgcttcccgagttcaagcaattctcctgcctcagcctcctgagtagctgggattataggcatgcaccaccacacccagctattttttgtatttttactggagacagggtttcaccatgttggccaggctggtctcgaactcctgacctcgtgatccacccgtctcagcctcccaaagtactgggattacaggcgtgagccaccatgcctggccagaaatctatgttttcttagaacatgtggaagaaggaaaaagacaaaaaaggaagtctggattctgaggaccacgtctcacccagggtgacatcaggaatggtgctagcctctgcaacacgacacccagtctgaagagctctatacaggtactaagactagcaggggacaccaagactctgcacaaccagattgcttgtgcagagggccacaataagtgtatgttttatattttattgtattatttattcaaaaataaataatacactcacatgtttccacacccaaaagatatatagagtgaaaagtctccctccaatccttattctccacctgctcagttcctgtctaccctggcctagaggtaaccactattctcatccgtacatccagcatttctttatggatatacaagcaaatgggaatgtagagtctcacattctctctttatacacaaaagttagcacgttatacacatgttctgcaccttgcttttttcccttaacaatctatcttggagacatttcatatcaattcatatgccatttgttcatttttttcattgtataaatgtgttataatttatttcgccagttccacaatgatgagcatttggattctttccaatcttttgcaatgacaatcagctctgcagtgaataatcttgtacaaatgtgcaagcataaagtgtatctctaggataaattcccaaaagtggaattgcaggatcaaaaggtacatgcatttgtaaactattattgtttagtgagggtctttttaattaaagaattaacatgaattgcctaat

SEQ ID NO: 99115 - DNA, 790 bp, Homo sapiens
gatgggagatgtctggaggacgtggagttctgggacggggagatgtctgaggaccacgtctcacccagggtgacatcaggaatggtgctagcctctgcaacacgacacccagtctgaagagctctatacaggtactaagactagcaggggacaccaagactctgcacaaccagattgcttgtgcagagggccacaataagtgtatgttttatattttattgtattatttattcaaaaataaataatacactcacatgtttccacacccaaaagatatatagagtgaaaagtctccctccaatccttattctccacctgctcagttcctgtctaccctggcctagaggtaaccactattctcatccgtacatccagcatttctttatggatatacaagcaaatgggaatgtagagtctcacattctctctttatacacaaaagttagcacgttatacacatgttctgcaccttgcttttttcccttaacaatctatcttggagacatttcatatcaattcatatgccatttgttcatttttttcattgtataaatgtgttataatttatttcgccagttccacaatgatgagcatttggattctttccaatcttttgcaatgacaatcagctctgcagtgaataatcttgtacaaatgtgcaagcataaagtgtatctctaggataaattcccaaaagtggaattgcaggatcaaaaggtacatgcatttgtaaactattattgtttagtgagggtctttttaattaaagaattaacatgaattgcctaat

SEQ ID NO: 99116 - DNA, 2732 bp, Homo sapiens
gcaagacgtgactttgcttctccttccccttctgccatgatttgtgatgcctcctcagccatgtggaactgagtcatggccggcttcaacatggggggcgacctcagggagcctgccgccagcattcccctgggctccctggcagctgttggcatctcgtggtttctgtacatcgtcttcgtcttcctcctgggcgccatctgcactcgagaggcccttcgctatgacttcctgatagcggaaaaggtatccctcatgggcttcctgttccttttgggcttatacatctcgtccctggcttcctgcatgggaggactttatggagctccccgcatcctgcagtgcattgcccaggagaaagtgatccctgcacttgcctgtctgggacaagggaaggggccaaacaaaacacccgtggctgccatctgcctgaccagcttggtgaccatggcctttgtttttgtgggtcaagtgaacgttctggcccccatcgtcaccatcaacttcatgctgacatacgttgcagtggactactcttacttctccctgtccatgtgttcctgcagcctgaccccggtgcctgagccggtgctcagggagggcgcagaaggcctccactgctctgagcacctgctcttagagaaagctcccagttacggctctgagggacctgcccaaagagtcttggagggcacgctactggaattcaccaaggacatggatcagctcctccagctaaccaggaagcttgagagtagccagcccaggcaaggagagggtaacaggaccccagaaagtcagaagaggaaaagcaagaaggccaccaagcagaccctacaagatagcttcctcttggacctcaaatcccctccttctttccctgtcgagatctctgacaggttgcccgctgcctcctgggaggggcaggagtcctgctggaacaagcagacttccaagagcgaagggactcagcctgagggaacatatggagagcaacttgttcctgagctgtgcaaccaatcagagtccagtggagaagatttcttcctgaagtccaggctccaagaacaagatgtctggagaagatccacttctttctatacccacatgtgcaacccctgggtctccctgttgggggctgttgggtcccttctcatcatgtttgtgatacagtgggtgtataccctggttaacatgggtgttgctgccatcgtgtatttctacattggccgggccagtccagggcttcaccttggatcagcctccaacttcagctttttccggtggatgaggtctctcttgctcccctcctgcaggagcttgcagtccccccaggagcagatcatcttggcgccgtccctggctaaggttgacatggagatgactcagctcacccaggagaatgcagacttcgccactcgggatcgctaccaccactcctccctcgtgaaccgggagcagctgatgcctcactactagatgcagtgctgggaccttcctcttttggagctgtcccatgtacagtggacccaagctcaggaccttcgtggagctgcttctccaacctgagaaactcaagacccatcctcccgctgtcactttggacaatggaaatctacattttcttttccctttttttttttttgagacagagtctcgccttgtcacccaggctggagtccagtggcacaatcttggctcactgcaacctctgcttcccgagttcaagcaattctcctgcctcagcctcctgagtagctgggattataggcatgcaccaccacacccagctattttttgtatttttactggagacagggtttcaccatgttggccaggctggtctcgaactcctgacctcgtgatccacccgtctcagcctcccaaagtactgggattacaggcgtgagccaccatgcctggccagaaatctatgttttcttagaacatgtggaagaaggaaaaagacaaaaaaggaagtctggattctgaggaccacgtctcacccagggtgacatcaggaatggtgctagcctctgcaacacgacacccagtctgaagagctctatacaggtactaagactagcaggggacaccaagactctgcacaaccagattgcttgtgcagagggccacaataagtgtatgttttatattttattgtattatttattcaaaaataaataatacactcacatgtttccacacccaaaagatatatagagtgaaaagtctccctccaatccttattctccacctgctcagttcctgtctaccctggcctagaggtaaccactattctcatccgtacatccagcatttctttatggatatacaagcaaatgggaatgtagagtctcacattctctctttatacacaaaagttagcacgttatacacatgttctgcaccttgcttttttcccttaacaatctatcttggagacatttcatatcaattcatatgccatttgttcatttttttcattgtataaatgtgttataatttatttcgccagttccacaatgatgagcatttggattctttccaatcttttgcaatgacaatcagctctgcagtgaataatcttgtacaaatgtgcaagcataaagtgtatctctaggataaattcccaaaagtggaattgcaggatcaaaaggtacatgcatttgtaaactattattgtttagtgagggtctttttaattaaagaattaacatgaattgcctaat

SEQ ID NO: 99117 - DNA, 2659 bp, Homo sapiens
  misc_feature (1)..(3): n is a, c, g, or t
nnngaaaaaaaaagaaagaaaagaaaaaaaaaaggattgaacacagaaagactagagtagacaagaatcacttctccattcttggttatatttccttatctttatacactactgaaatcagtttgtttcaagtattttacctgggattcttgcatctacatgaaattggcctgcagtctgcctttcttacacttttttggtcagtttatggtgtcaagattataactccattaaatgaattggaaagtgttgccttttttcctgttctccataagaatttgcgaaagattggaatgatctgtttgttaaaagtttataaagctgtctggccctggtatttattggtgggaagactttaactactataattagactattcaggaattctatttttttcttgagtcaattttgaaaaaaaatctaagcatttacccattttacaatttattagcataaagtagcttaaggaattttcttatttctaaacctctcctggatatgcatacttccttttccgatactgtttgtatcttctcactttcttttccttggccgttttaccagaagtttgtctattttatttttttaaagaaccagtcttagctttgttcattctctctgcccttctcttttatgttctgctttctgatggtttgttctgttgttttctcatttcataaattggacatttaactcattcatgttcaaggttttttctatttttagtaagtatctgagtttatttgaattacctcctttgcctcaccccatgattgagtgtatgcatgtatacaaacatgtatatatacacatttttattgcttttccattcatatctttacattatgatttatttgacctgttaattattttacagtatttttaaatgcacagacttaagagttttataaatgtatttccttttcaaaaaaattttgtaatgttaatatcactattaataagacaattttatattttgtgaatcctgataaaatgtgctgaagacacaacattaattatgtgatattcctgccaaaaatgcataacatgaacatagtagagagaaatatcagaaaaagataaaatgaggaatatcctacaaagttaccagcctatacttctcaaaaatttcaagttaaaggagactaaagtgacgtgacaagtacctgcagcacgtgtttctggactggatcttggtcaagaaagcattttttaaacttttgttctttcggacatttttgagacattcggtaaaatttgagtaaggtctgtaaattattaatagcattatatcagtgtgacttcctgattttgataataatgtcatggttccttgaaaaagtccttgttttttaggaaatagacactggagcgtttagggttaacggaatattgatatgcaactgaatcacaaaaggtttaggaaaaattatagagagagaaaatggtagagtaaatggggtcagatgttaacctttggaaaatctatgtggaggtatatggatactttgtactgttttgcagatttactgtaaatctggaatcatttcagaatagaaagtttaaaaatagcttttgttctaactaattgcatgtggtcaaagaacatgcgagtatgataaagcctgggcaaatttttatagcctttctctgcctcagctttaccatctgacttaaagtactgagaactcatccaggcacaagtatataaatatatgttgtagtaggctgaataatggcccccaagacatcaggtcctaatccatgaaccctatgttaccttacgtggaaatgaggtgtttgcagatgtgattaaattggagatcttgagatggggagattttcttggattatctaggtaggtcctaaatgcaatcacaagtgtctttaatcagaggcagggagattgcagacagaagaggagaaggcagtgtgatcatgaaggtgaggactggagtgatgcagccacaaaccaaggaatatcagtagccacaaaaaaaaaaaaaaaaaaaaggaagggtcaaggaacagattctctcctagaaattctggaggatgaagcatcccaccaacaatttgattttggtgtagtaacactcattttggacttctggtctccagggaactgtgagaataaatttctgttgttttaaaccactgagtttgtgataaatttgttccagcagccccaggaaacacaaatgtaaattgtattacctattagaggttttgtttgtttgtttagtgtcagggtctctctctgttgcccagactggagtgcagtggcgtgaccatggctcactgcagcctcaaactcctgggctcttacaagtgatcctccctcttcagcctcctgaatagctaggactataggcactggctttataatttttatttttaaagatgggggtctcagtatgttgcccaggctggtcttgaacacctggcctcctgcaatcctgcctcagcctcccaggtagctgggattctaggcatgagtcatcacacctagctagaaaatttttgagacttgttttacgtccaggtgtggccacttttttttcctttttttttttttttttgagacacggtcttgctctgtcgccactgcacttcaacctgggcgacagagtgagacaccatctcaaaaagaaaaaaa

SEQ ID NO: 99118 - DNA, 2713 bp, Homo sapiens
  misc_feature (1)..(3): n is a, c, g, or t
nnngaaaaaaaaagaaagaaaagaaaaaaaaaaggattgaacacagaaagactagagtagacaagaatcacttctccattcttggttatatttccttatctttatacactactgaaatcagtttgtttcaagtattttacctgggattcttgcatctacatgaaattggcctgcagtctgcctttcttacacttttttggtcagtttatggtgtcaagattataactccattaaatgaattggaaagtgttgccttttttcctgttctccataagaatttgcgaaagattggaatgatctgtttgttaaaagtttataaagctgtctggccctggtatttattggtgggaagactttaactactataattagactattcaggaattctatttttttcttgagtcaattttgaaaaaaaatctaagcatttacccattttacaatttattagcataaagtagcttaaggaattttcttatttctaaacctctcctggatatgcatacttccttttccgatactgtttgtatcttctcactttcttttccttggccgttttaccagaagtttgtctattttatttttttaaagaaccagtcttagctttgttcattctctctgcccttctcttttatgttctgctttctgatggtttgttctgttgttttctcatttcataaattggacatttaactcattcatgttcaaggttttttctatttttagtaagtatctgagtttatttgaattacctcctttgcctcaccccatgattgagtgtatgcatgtatacaaacatgtatatatacacatttttattgcttttccattcatatctttacattatgatttatttgacctgttaattattttacagtatttttaaatgcacagacttaagagttttataaatgtatttccttttcaaaaaaattttgtaatgttaatatcactattaataagacaattttatattttgtgaatcctgataaaatgtgctgaagacacaacattaattatgtgatattcctgccaaaaatgcataacatgaacatagtagagagaaatatcagaaaaagataaaatgaggaatatcctacaaagttaccagcctatacttctcaaaaatttcaagttaaaggagactaaagtgacgtgacaagtacctgcagcacgtgtttctggactggatcttggtcaagaaagcattttttaaacttttgttctttcggacatttttgagacattcggtaaaatttgagtaaggtctgtaaattattaatagcattatatcagtgtgacttcctgattttgataataatgtcatggttccttgaaaaagtccttgttttttaggaaatagacactggagcgtttagggttaacggaatattgatatgcaactgaatcacaaaaggtttaggaaaaattatagagagagaaaatggtagagtaaatggggtcagatgttaacctttggaaaatctatgtggaggtatatggatactttgtactgttttgcagatttactgtaaatctggaatcatttcagaatagaaagtttaaaaatagcttttgttctaactaattgcatgtggtcaaagaacatgcgagtatgataaagcctgggcaaatttttatagcctttctctgcctcagctttaccatctgaaaaatggaaataatagcacctatgtcatatattgtttgagaggaagttaagacacttaaagtactgagaactcatccaggcacaagtatataaatatatgttgtagtaggctgaataatggcccccaagacatcaggtcctaatccatgaaccctatgttaccttacgtggaaatgaggtgtttgcagatgtgattaaattggagatcttgagatggggagattttcttggattatctaggtaggtcctaaatgcaatcacaagtgtctttaatcagaggcagggagattgcagacagaagaggagaaggcagtgtgatcatgaaggtgaggactggagtgatgcagccacaaaccaaggaatatcagtagccacaaaaaaaaaaaaaaaaaaaaggaagggtcaaggaacagattctctcctagaaattctggaggatgaagcatcccaccaacaatttgattttggtgtagtaacactcattttggacttctggtctccagggaactgtgagaataaatttctgttgttttaaaccactgagtttgtgataaatttgttccagcagccccaggaaacacaaatgtaaattgtattacctattagaggttttgtttgtttgtttagtgtcagggtctctctctgttgcccagactggagtgcagtggcgtgaccatggctcactgcagcctcaaactcctgggctcttacaagtgatcctccctcttcagcctcctgaatagctaggactataggcactggctttataatttttatttttaaagatgggggtctcagtatgttgcccaggctggtcttgaacacctggcctcctgcaatcctgcctcagcctcccaggtagctgggattctaggcatgagtcatcacacctagctagaaaatttttgagacttgttttacgtccaggtgtggccacttttttttcctttttttttttttttttgagacacggtcttgctctgtcgccactgcacttcaacctgggcgacagagtgagacaccatctcaaaaagaaaaaaa

SEQ ID NO: 99119 - DNA, 131 bp, Homo sapiens
gaaaagtggtctggtaagtataaaatctgaaaaagggagtgggaaaaatcaagtatttaataggatcatgccaagatcatgcaaaaagtaaatgtcaacctaatatatggctgtcacataaacttttcccc

SEQ ID NO: 99120 - DNA, 304 bp, Homo sapiens
cgtccttagttggtttgagacttactctgtatgttgcataacaagttttggcaagagaacagacctgactatgtcaacatccagctgtacctcagtcaaacagatgggatacagaagataattggagaaaaatatcatgcactgaattcaagactgtttcttggacgtcctcggtggaaacttttgtttgatgaaatagcaaaatataacagagggaaaacagttggtgttttctgttgtggacccaattcactatccaagactctccataaactgagaaaccagaacaactcatatgggacga

SEQ ID NO: 99121 - DNA, 423 bp, Homo sapiens
tttttttcctgtgaaaacaggtttcactatttgcctacgctcatctggaactcctgggctcaagcaaaatgccttggcctccaaaaatgctatgattgcaggcttgagacaccatgcacaaccttgagaaatttaaatgagaattgttttttctttgtgtgtttagaagacacatagggattttagtaaattttactaggtagagataggatattgtgattattttaaaaattgatacataaaaatataaacctattcaggattaaatcaccatggtaactgtaattttcaaaatatggcaaaatgttcatagttattaactctagttgctagatatgagaaggttcattattcagttctcatttttggtgacttcaatttctcataataaataacaaatatttcctcaaaaagtgagttcat

SEQ ID NO: 99122 - DNA, 208 bp, Homo sapiens
aagagtaaaacttctgtgtaatactagttccctgttccacccaggttttgtattcacttgcttttaggtctaggactggagaatgcagtacatgccaataattctagtcttctctgatctgtgaacatataccttcactgacatttgtgtagttacttggagccaaaaggaaaattgtcacttagccagatttcactctcaacatttc

SEQ ID NO: 99123 - DNA, 176 bp, Homo sapiens
gccagacattgtaaattttaccttgttgggtattggatatttttgtattcctataaatattcttgagctttgttctggggcacagttcagtgacttggagacagtttaatcctcttgggtcttgcttttatgatttgttagacaggtctgctggagacccgtctgcctcacaccaa

SEQ ID NO: 99124 - DNA, 279 bp, Homo sapiens
actgccctgagaaggtggcagagagagcgcccaagccaggttctcagcccagttcttcttccgcattcaggtgcgattccaggcaagactcgtcctcccgctgtgcctcagtgtctgcctctggaaaacaatgagttgggccagtcagtctttaagactctacaaatcctaatgttctcttcatccaagaggacacgggtaggaaggggaaggtgccgcccgggccttccccctgcccactgaccctgcagccagctcatcctcctttccctcgtgccg

SEQ ID NO: 99125 - DNA, 898 bp, Homo sapiens
agccaagcctcctccctccacacacgtgttctcatccagatcagtttcgattcctgctggtggaaagcagcctcaggcagggccactgtgcaggaagagccggcctgggtgcaggcggggctccgggagtcaccccaagatgcccggctgcccttcattgtcctccgcatgacgccggtgccagagcccacgtgagcctttgccaaggagagattcagagacgtgagcagaagagcctgaagagggacttcttcaataaggcagcaggagggtttggctgatggaagatgtttcccggaggcctgttcacgctccaccctgaaagccccagggccctgaaagccccagggccgtcccctccaggttgcaggatgatccaggaacttgttctcctcagcactgtgtagatttcagcttatgagttctgtccatgttttgtgagatttatagctaagtatttaatttttcgagtgattataaacaacatagcagttttaattttagtgtctacttgttttttattactatatagaaatacaatcggttttcatatatttatgttgcatgctgtgcgcttctaaactcactagtttcggaagctgttttttgtttttagattccttaaaattttatataggggcaatcatgtcatttaaaataggaacagtttgataataatcaacctgcatgccttttattgtaagaaaatccctaaatgctgggattacaggtggtgagccaccgtgcccaaccagaaacttttttggtgatttcagatgaacttgacttttactgtaattatacctgaagtgtttgtaaacaattgtttagaacttctatttgtcatggacttatgagtttattctttggatcacatagtaagactttttttgtcttt

SEQ ID NO: 99126 - DNA, 365 bp, Homo sapiens
gcggccgcctactactactaaattcgcggccgcgtcgacgggggtggaatctttctacttgctacatgctaataactaaggtttttacagtttactgccaattagtagtgttagcagcatgcattttttaaagagtgcttctaatggtccatatatgagaacattttgtctaaaagtgtattccctgtagccataatgtattcactggcttgtgctaagagctatggtaaaacgccaaacgaaatgaaaaaggcacagggaaataaatttttgtttactaaatgggggatgcctattttaaagtcagctcttgtcagcagatgaacttgctaaactaaaaaaaaaaatccttcagtaagtcaaat

SEQ ID NO: 99127 - DNA, 136 bp, Homo sapiens
catatatattgttgcatgtatttatatatcattcatttatgttgctagaaaaacattccattgtatgaatatattagagtttgtatccattctcctgttgatgaacatttgcattgttttcagttttggatatcat

SEQ ID NO: 99128 - DNA, 417 bp, Homo sapiens
tgcgtaacttgacaagctgattctaaaatctatacggaaaatcaatgtacacagaagagtcaaaacaattttgaaaaaaaagaacaacattggagtactcacaccctaagatttacggtcttactacaaagctacaataatagagaaagccaacattgcactgtagttcctatagaggggtgaagggagggagtgggacatggtgtgaggatagtcatatagatcaactgaacagaattcagagtctagaaataacctttatatttaggtcaattgattttcaacaagagtacaaagaaaatacaatggaataatagtcttttcaacaaatggtggtgggacaactgggtatctgcctgcaaaaggaaggtggacccctacatcacaccatatgtaaaaagtaactcaaaatgaatc

SEQ ID NO: 99129 - DNA, 268 bp, Homo sapiens
gcctgtgatttgggagctacatccaaaaaatcaccactgagactgatgatacaaagctttccctctgttttcttctagtctttttacagtttcaagtcttaggttttagtgaactacattttaagtccaagtcaaagatctgaaactggaaaaggagagttatgagtggacaaagagataaacccgtttaaagaagtacagaatagctcatgatattaaatgatgttcgttgctttatttttaaaaattgtgcctgttggacatggaa

SEQ ID NO: 99130 - DNA, 329 bp, Homo sapiens
gcttacagtctagaacaagcttttccagcccacagcccaggatggctttgaatgtggcccaacacaaattcataaactttcctaaaacattatgagatctttttgtgatttgtgttttagttcatcagctatcattagtgttagtgtattttgtgtgtggcccaagataattcttccaatgtggcccagggaagcaaaaagattggacacccctggtctagaaggaaaggcaaatattaaataacctcagaaagtgatattacaaattgtggtgagttataaacacactatcaggtgttataaaggaagtgaaggaagtggtgaggaaa

SEQ ID NO: 99131 - DNA, 280 bp, Homo sapiens
acagtcacgcctccctttcctaagaaatgtggataattgtttggcagctttctcacattgcacatgtaagacaacctgttgaattgtgtactgattccaaactgtcatggatcggaatggagaactaggaatggaaaatggaatcagggactgcgtctttaaggacaaaatcaggaatcagggtgtaagactcagacgacaagaatttgcaccctatcccagtgtgaaaccagagcaagagaaaaccagctaaatagtcagaactcggacagagagcaag

SEQ ID NO: 99132 - DNA, 1187 bp, Homo sapiens
aagttgttttctttaaaggaacacctacacagaaggctgtacttaattcccaggatgctaagagtaagagacatgagctcacacacacgtagaataatgaatgtttgtctttcctagtaaggttttttcacctccctccaaattatcataaattttaaaatttgaaatataagtattcaataccctttgttgccactgtcggagcagttactgagagatgataaataataaaatgagtctggactgctatggtggttcctgtgattaaaatattatcaagacctgacagaaataatgtgaaatataattgtcactagaattatccttgatgatagggtctgtattttattcaaccttgtatctctaaagatctagttcaagtcactatacagaataggtactcaaatatttaattaatgctttgttgaaataaggggagagtacacaaaagtaacacatggaaaaccaaaattcaataatagaatgaaaaggaaagcattattagtcagaaaaaaatattttctaatgcaatcttagagaaaataaagaggcacttataattcatcatacaactaaaatcattcagtacaggactctattccctaaagtggcactaaaaacatttcaaggcagctgttctttttttttttttttttgatgggagaaggggatcaccaaatccttcacaaatctaataactatggatcttctccctagaaaaaaatggacatatgtacatgcacacaaacccacaattttgtgtgtactctcaaaaatctgggctccaggttaaaaattcctatgttaagggaaaagctagtcactttataaaggttaagggtgtaaaagtatattaagtttcccttgcacatgatgcatcatgcaggaatttaacaacaacaacaaaaaaaacctgaagcttttaaagaatttctcattcttctgtcattttgatttcaatttgcttgctatgtgaagtagtggcttcttttatgtgttgtataatttcttctgtcctttagtgtaaaattaattatgactatgattttaaagcttcaggttttttaaaaaaccatgtttaaataaaatattaggtaagcaaaaggtgaagcttacaaggaaggtgtaggaattacaaagtgaggcaaaagatcatgtttagccattctatgcaaaaatttagaaga

SEQ ID NO: 99133 - DNA, 405 bp, Homo sapiens
atgaagtctgagaaccactgttccaaaccgaggcttctaactggatgttcattcccagccatttggaaggctcagctgaaagccagtgagccagaagccagctccactgatcctgctttccagactggccattctcacaatgttccattaggcaatagggctcttcggggaaattaatagaatgtaggcttcaggaatcatcagaaagctgcagcttccctcgtcagggaagctgacgtctacatcgtcctcagtctagaacaagaataataggtgtaccttagaaaaatgtgctttcagtccatcagtaaaaagccaatattgtaaaatcctattatctttgcttcaagtgttatcaaaaaaataataataataaaataaaggcttagaagtttcactgttcaa

SEQ ID NO: 99134 - DNA, 808 bp, Homo sapiens
gcgagttttggccaacgctctaagggttttgtttgttcttccttttgtaaaatgttgccttcgagtaacacaaaggcctgtggtctgtgaacactcagcgtgcaaggatttctttgtttttcatggactctgtgtgtgtgtgcgcgtgtgtgtgtgtgtgttggttgtgggggcaagaactaggggaaaagggatgccaaaaaatgtaagcatgtagtttttctccgctttgttgtgaaaacaaaattgataatgtaacttttggaatcaagtcttttgtatttagattggaacgttctaataccttattgttacaaatagacaatgtgtctgaaaagctgaatttttgagagtggatggattatttaaaataatgattcttaacccatttgtacaattctgtgttctgttacaaatgtcttttctttgtccatgtaacagtcaattcctgttctctgaaggaggaattctctcggtaatttctgagcccttctttaggtggttggccaccagggggcaagcgaagaatggcagaagccatctgacgtagccccttcatcactgcagataaactggtgatgctttcctgacacacttaatggcaaccagaggttttctgcacgtttgtgtttgtgtgtaagtgtgtggggtgagtgtgtggcagtggttatttgctgtattttgactgcataaaattgccatgctttcccctcggtctcctagaaatccttgtaggataattataacacaagaaacagatttgatggaaattctcataattctcatactctgaagcttagctcatatg

SEQ ID NO: 99135 - DNA, 458 bp, Homo sapiens
tataggttcagctggaacttgaggcactgggcaactctctggacgtcagtggcaagcccggccagaccgatgtacaaccaaccacccatgggaaagatctcctggaagtccgtggtcaccatctgggcctggatcccgaagtgcctgtctgcagcgatggccacacggttcttccccttcatggccatgatggctcctccgttataggacataatagacatgattgtgtggtatacgaggacccctccattgccggagcaattccagtaaaccgggtctagccttcactcctgcccatcatttctgacatttagactctacatagagggtcctgagattccaggcctttactcatcctgcatcccctacctacttggatgaatattaatatttacaataacagagaaaagttctccagaatgtctgggaggtgaaagaagttaaataaatggaaagtg

SEQ ID NO: 99136 - DNA, 203 bp, Homo sapiens
tgaagcgtctggtaaagaacttaaaatgagagcatcaccattgaaatcttagcaagagaagcagaatgtagtcatttgctccatgccctcattttgaagatttcaaagtttgagaaaaaaacccactatgattatgattgtatcaaataaatgagccagagcataatgtgccctggaggttgggccttgctgtacctcactgg

SEQ ID NO: 99137 - DNA, 205 bp, Homo sapiens
ggatccaagccaccacatggatgtgcaatacagcagagacacagcagatctgtagtttcaggacaggccattgtataacacagtggccataaactctcccaagagtactgaacaatccagtaagattgtacttcagtacaaatccatggtctctgtacagacctattttattttatttattttgagacagagtctcgctcttgtc

SEQ ID NO: 99138 - DNA, 165 bp, Homo sapiens
acctttcccaaatccaaaaatgtttgaatcccaaaacacagctggctcagggtttcagataaagcattgtggacctgtataatattattctaggaatcctaatttaggcaccctatacttaactttcttcctgatactctctcttacctgactccatgcatctca

SEQ ID NO: 99139 - DNA, 445 bp, Homo sapiens
cttagagtgacagatcccggtcccgcccatcttccaggtccatctaggttccaggggtctgactcagtacctcacatcaggggcaacaggctgtctatgccttgccattgtgcgttgatgctggcgtctgtttccctgtccccagtcattcatccccctagtcattgccgtgctggcccacgttccccacagcaagacagcttaaagtctggctctctctaagttattttcatgatacgcttgatgcatatggatcatccttctttccagaaggaaacttggcaggctgcataagccttattcccattgatgcgccgcctttggggcctgcgggaatcattcacctgttcttgtgatgtgctggggcactaggacccacctgggttgtctcagtcattggcgcaggcacaccaagcagacgtatccaccctgacacctccctgtc

SEQ ID NO: 99140 - DNA, 542 bp, Homo sapiens
aggcctagcccaatgcctgggcacagaggttgctggcactgagggagctgcgatgggacagcccctccccaaaggcccatgcccctcagacccgtctatgcaggccagcccatgggggagggactcgggacaatggcaacttcgtcttcgagaatgatggcttgggcgtctatcacagggcagggactggtggccgtccaggctaagcctgatgctattccgacccaggcttcatgttgtgtagacagcaacaggagtttggcccctcagccccccgcaggagtcgggtggggaagcaggtgagggatgtggctgtcacacagcagccaccagccccgagaccctgtgtggccagtggcctgcctggagcccagggcaaggcaaacacggctgggctggggaggcagggtggagcgcaaggaaggacaaagccagggccccccaaatcccacagggttccagatgtgcctggggcttggagacaggaacgggtctccctaaaggctctgcaggccaccctgtgcctctgcccatgcggccgc

SEQ ID NO: 99141 - DNA, 744 bp, Homo sapiens
ctggaggagcctcaccccacagacttttgccatcacctccttctcagttgcgccaggccctcactacctctcagcctggaagagctcaacctctttctgatccctgccacctttatttttttatttttattttattttacttttgagacggagtttcactctgctgccccagctggagtgcagtggcatgatcacactgcagcctcaaccttctggtctcaagcaattctcccacctcagcctcccgagtagctgggactacaggtgcacaccaacatacccagctaatttttgtatttttgtagagacagggtcttgctatgttgcccaggctggtcttgaactcctgggttcaagtgatccaccgtgcccttgacctctgccacctttatttgatattcaagaaagcacctggttggtggggtgctattcatttatcaagtgactgctttgtcacttgactgctattctctgctccttgtatttcatctctacaactagagacgccctggccactatgccagcatggcccttgttccttccagatgaacaggagcagagcaaatagcagaggatgaaaactggcagagtggaggggctgtgcacagtgagcctccgcttaataaacacttatggaaaaatgaatggacagagtgaccgggaaggtgagagctgcagggaggaaagcagcatgacctcagcctccttctgcagccaggctggcacctgtggaccccgggggtg

SEQ ID NO: 99142 - DNA, 691 bp, Homo sapiens
ggaaaacaaagcaaatatcaggtgttggaaaaagataatttaagacctttcccaggattaaaaataggcaatcatagattcagatcacttcagtctaacaaatatgtgatctttgtctgctctttgccaaagaatgtaaaggaatgcttgcactaggctttaccttttaagatcggctaaggagtcatgacaattacaggtttttattcctaaagctttgccatctaagcagaattgaacaagagggaagagattagtcagtgactgataaaagttgaaaattctctttatcccaaatcccacatttttttttctgaagttcaactaaggatttactctctccatgaatcactgttaggttaacatatcccagagtagcattttctttattttgattttctgaagtatatattttcccaaaacttatattctagatatttgatatgtgtgtattttgtttcctaaagtaaaaattcaaaggagattattttctctatttctctatgtactgaaatgcttagcctttacaattctaggcacaatattagcatataaagtgctgttaaatgaatagctgaataactgacaagctcatcagtgcaaacagataattagaaaaatttaggacagatggtgtttttatctatttgggaatcattttacctagagaatatgtcttgttatatgtaaa

SEQ ID NO: 99143 - DNA, 498 bp, Homo sapiens
ctctggcaaatatcggcaatttattttaaaagtattaagaccctgagtgggctaaataaatcatgtccacaggcttaatctggcctttggtacccttgtatgacctctgatttctagaaacctcaggaatttcacatcagttgcatgagtcactaaggaatcataaatgagccccaaaccaatgaattataagaaagagctcatctcacatttgaggcgtaccctacctccaagaagaaaactcttctgttaactctgcagtgacaacctggcaaagaattttcccctctcgctcatattcttgtttttttgtttctcacaggggtcatcaatcagttaggaggtggccaggtcttccaaggaaatcgggatgtcaggagtcactggaactccaggtgttggttgtatctttaatagtggcagatggctttcttctcctctgcagttcttgatctttttggtgattgccagttagcttcacagcttttagtcctggag

SEQ ID NO: 99144 - DNA, 176 bp, Homo sapiens
tcctatctctaaaaaaagaaaaaaaatcaaaacttagctgggcatggtgatgtgcagctgtagtcccatctacttagaaggttgaggttaagaggatcactagagtcagggaattcaaggttgcagtgagctatgactgtgctactgcactcagcatggttgacagagtgagaatc

SEQ ID NO: 99145 - DNA, 364 bp, Homo sapiens
gcctgggagacagcgagactctgtctcaaaaacaaaaaaacaaaaaaacaaaaaaaaacaaaaactagctggatgtggtggcaagtgcctgtggtcccagctactcaggaggctgaggtgggaggatcacctgagcctgagaaggttgaggctgcagtgagctgtgattgtgccactgcactccagcctggactacagagtgagagcctatctcaaaaaaaaaaaagaaagaaaagaaaagaaaaaaagaaacctgcctgacagtacaaccaccttttaaatgatttgatgttctgcctcagatctgatcatttgcctgtgacccagcaaacccacctcgggtacaaacccatgagaagcgttc

SEQ ID NO: 99146 - DNA, 548 bp, Homo sapiens
acagcctggccacaaccccatctctgttcccctgtaccccacactgccctgtgataggatgtgataagatggtaggattgcctatactgaagccctgggtgccactgctggcccagcagggaggaggttgctgctgctcgggctgaagtgaggtgtgggtctggctgggcctccagtttcccacctgggccttgattgtgaggaaggcctggcctggctgcagaagcccagaagcacctgagtaggagagttcctttgtcccacctgcagctcattcaagcctgtgcatgggggttggggtcctcaggatcttgctttcctgtttaggggaggcagccccaaagagtgctgggaccagtttggagagtgctaaggaatgctggtctgcagcgaccctacttgtgctctgcgtcctctgccaactgcagcatgggtgaacatctgtacatctgtccccataatgaaaatggcctcagcaaataacaaaaatattaccatttagcaatcaggcacttattaaaagcctggcccaataaacttaaaaaaaa

SEQ ID NO: 99147 - DNA, 793 bp, Homo sapiens
ggttaaggaggaggatggcgccgtcctgcagatgtgcggggacgcgcgcccgccgcaacgtgaggctcataggccacacgcaactctgagcattggccaggacctgtagtagccaacaggacacttaataactgatgtataggtgcgcactgtgtgtccagagctttacgttaaccacctcactgtgtcatctcgctgaggttgtgtggtttactattactgctattagcgcatttttaagcgggaaacctgaggcatgaggaggctggagtgcagtgacgtgatctcggctcgctacaacctccacctcccagccgcctgccttggcctcccaaagtgccgagattgcaacctctgcccggccgccaccccgtctgggaagtgaggagcgtctctgcctggccgcccatcgtctgggatgtgaggagcccctctgcccggctgcccagtctgggaagtgaggagcgcctcttcccggccgccatcccgtctaggaagtgaggagcgtctctgcctggctgcccattgtctgagatgtggggattgcctctgaccccactggccccgtctgggatgtgaggagcgcctctgcccggccgcgaccctgtctaggaactgaggagtgtctctgcccgatcgccacccagtctgcgaggtgaggagcgtctctgcccggccgccccgtctgagaagtgaggagcccctccgcccggcagccaccccgtctgggaagtgaggagctcctccgcccggcagccgccccgtctgggaagtgaggagcccctccgcccgg

SEQ ID NO: 99148 - DNA, 917 bp, Homo sapiens
ggttaaggaggaggatggcgccgtcctgcagatgtgcggggacgcgcgcccgccgcaacgtgaggctcataggccacacgcaactctgagcattggccaggacctgtagtagccaacaggacacttaataactgatgtataggtgcgcactgtgtgtccagagctttacgttaaccacctcactgtgtcatctcgctgaggttgtgtggtttactattactgctattagcgcatttttaagcgggaaacctgaggcatgaggagggtttcgccgtgttgaccgggctggtctccagctcctgaccgcgagtgatctgcctgcctcggccccccgagatgccgggattgcagacggagtctcgctcactcagtgctcaatgttgcccaggctggagtgcagtgacgtgatctcggctcgctacaacctccacctcccagccgcctgccttggcctcccaaagtgccgagattgcaacctctgcccggccgccaccccgtctgggaagtgaggagcgtctctgcctggccgcccatcgtctgggatgtgaggagcccctctgcccggctgcccagtctgggaagtgaggagcgcctcttcccggccgccatcccgtctaggaagtgaggagcgtctctgcctggctgcccattgtctgagatgtggggattgcctctgaccccactggccccgtctgggatgtgaggagcgcctctgcccggccgcgaccctgtctaggaactgaggagtgtctctgcccgatcgccacccagtctgcgaggtgaggagcgtctctgcccggccgccccgtctgagaagtgaggagcccctccgcccggcagccaccccgtctgggaagtgaggagctcctccgcccggcagccgccccgtctgggaagtgaggagcccctccgcccgg

SEQ ID NO: 99149 - DNA, 381 bp, Homo sapiens
caagactaatctcttgatcttctggtggacatctggctctcctccggtgttatgggagttaccccattatctattgctatcagacatctttgacacccttattccagtccctcacccacttctgctggatatgtatctgaatgattcctcctttccagtgcacggcgcctaccttgcttatatctcgtctagcctggactcctatgtggccttcctactggttttgccacaagaatcagggtgttagactacctcctcgtatcagtaatccagaatcaatctggaaatggttaatatatgtaatgatattatctctattctgggtaaatgtgcttctgtgagctaggttggcaacccaactactgtttatagacttgtttc

SEQ ID NO: 99150 - DNA, 165 bp, Homo sapiens
cacaggaagcaagaagaatagagggactgcttatttatagatttgcagatgaatgagataaccaaaatgcacttctcgcgtatgtgaaggagcaattccattttcagacttggaaagttctccataattaagtatcacccaaccctgaaagcacactgcatccca

SEQ ID NO: 99151 - DNA, 560 bp, Homo sapiens
ccgctggttgcatcctgtttgctaatatcaaaattgccaatgtcacatcagtcaacatgtctaggactagattcagtttgggaagagctacagaagatataaatatcaggtggtgtggtacattggagccaccaaaataagtctgccatcagataaacaattaattcctcgcttttatgagcatggaattggtgctagatcataaactgactatcctcattttaccaactttccgttaattgttttctgtgtcagtttttcatatttccaagttgaaaccccctaaacacaacatttttttccactgctcattttttaccaaaattcaaacttcatgaaaccctggcatttcatcctttgccttccatcctcatggccaccatcaaagtccacatctttattatcttacatgtgaacagctgtaataacctttccagttattaattctttaaacaccacttttagcctgatgcatttcttttcaagaacctatggtatgtttatagtccagattgcattaaacctaacctttctgttatagggcccttttctgaggccct

SEQ ID NO: 99152 - DNA, 226 bp, Homo sapiens
ctcttcatatcagaactgatttggggccattggggaggagatgctgaccttctaactgtaatccaactgcacgcaactattctaaagaagatgaaagcatttttcacccctttgttgtgtaataaatacagtctttatattttgttgcattttaagtttgattttataatgatctgtgaaacaaaattgttttcaataaacagacttagttgttggttactttctt

SEQ ID NO: 99153 - DNA, 186 bp, Homo sapiens
ctcttcatatcagaactgatttggggccattggggaggagatgctgaccttctaactgtaatccaactgcacgcaactattctaaagaagatgaaagcatttttcacccctttgttgtgtaataaataccgatgcggccgaaagagcagaatgaggggttatatgtagcataaaaacagatagatc

SEQ ID NO: 99154 - DNA, 408 bp, Homo sapiens
ccctgtcaggcagaataatcggaaacaggctggcttctccgccatgacgctcaccgggctttcagggcaggggctgtcacgaagatatctggggtgtggggcaaaaggaaaaacagttcccccgggacaggagtcttgtcctctctgccgtgtgactcttgacagagggcagagaccctgcatctggagtgtgcctgtgcctctctcacctccatggtcttgctgagccgctaatgcctcagaaggcctggctcactggaaagatgaaaccaggacacagtgttcaggtctcgtttcctgggataaagtgggtactcaggtaagcagaactggataacctaggaacaagttatcaaaggcttacgcatgagaacaggccaagcagacctgcatataatttcatcagta

SEQ ID NO: 99155 - DNA, 629 bp, Homo sapiens
agactatctgtgtcagaattctaaagctcagagattctccatgctgcatcccccataccatctatatctaaggctggggtgtaaagtaagaaatggttttcaacaagcatgctagggccaccacaactaatcccactgccctgcaagcatctccagatgattttgatgcagttggtccacaggtcacagcctgaaaaactctaagaccgtcagctgatcaactacaataatattctctccagcattccagacaatggctttccaacccctttaaggactggggtttactacctactcaagcagtccatttgtcttcagtcagatgactattaaaaagttctttcatatactgggtccaaacaggactttctgaactttctggctattgttaccagttctcttttgtgcagctcagagtatttcgaggccaatggcctgagctacaagtgattgaaagggcaacttaggttcaggtgattcctcgaaagatttggtccacatgactgctcactcaccggtaaaagggcttaatgtaagccagctatattgctgactgtgcaaggatgtggggttgtctgagaatagccttcaatggcactgactgactaggagagcctcaagaatacttt

SEQ ID NO: 99156 - DNA, 337 bp, Homo sapiens
ggggggcaacatatttatgagacagcatggtctaatgaaaagaccggaagtgtgaagactggacttactggagtgattcttaactccagtgtctctgtcactccacctgtaaaatgattatttttcctaaatgtgaaatggcccaaaaaatacttcacttacagtgctattgtgcaataaattagacaaatggatgtggaagtgcagtatagaacaaaaagcactggctctgagatctacatgacgggatgatgtatatatggggtgcactggcaaaagccccagattaaaagccactagaggccgggcacggtggctcacgcctgtaatcccagca

SEQ ID NO: 99157 - DNA, 189 bp, Homo sapiens
tttttcatatatgacttttactgttttgagatagttttcttatatttttagttgaatgttttcattataaaagggtgttgaatttgtcaaatgctttatgcaccatttgatataattgtgtgggggtattttcctcttcattctgttgatgtggagtattaccttgatttttgtatgcttaaccatcct

SEQ ID NO: 99158 - DNA, 451 bp, Homo sapiens
ggcagcaccacacctgccatggcaatttgcaagtctttttaaaaaaattttattgattgattgtagagatggggtcttgctttgttgcccaggctggtcctgagctcctggcctcaagtgattttccttccttggcctcccaaatttttgggattacgtacataagccaccatgcctgaccacaatttgtggttccaagagtgtgatttttatcatcatttgggaggatgttggggcctctggcatgactgatgactgtctctgagtggagtgggctttggaagggcgatggggcttgctggacaccccattggaccgtcattttgatgtagaggcctgtggttgtcttgccctttaaatgtggtggtggaacaaactctggtttgtcacaggcatatagaatgcttttgcccctgcacagtgggtaggtatttcctgttctccctccacc

SEQ ID NO: 99159 - DNA, 758 bp, Homo sapiens
tgcccaaggcccatgtacctttcttcctccaactaggaagacccagaaagaccccgctcatgcatggacctcagagaaccaaatataatgacaatgattgttagttttttgagacagagtcttactctgttgaccaggtggaaggtcagtgatgtcgatttggctccctgcaacttccacctccagagctcaatcgatctttctacctcagcctctgagtaggtgaaaccacaggcaccagcaaccacaccacctaatttctttttggagaggaagttttgccaagattcctggcctggacaggaactcctgagctcaatcgatctgcccctgtcggccacccaaagtgctggaattagaggaatgagccattgtgcctggtctgaaatataaacatgatttgaagggattctgaaaccagctgctgccttcatctgggtgataccaatatcttcccagaggaagatgatgatttttttttgtactggatgttggggaaacagtacctgggttgtcccctgtgaaaggcctttttccaatgtccggggtgtaactggggcttcttcccacatctcacacacgtccagggcttctcctaccacctccccgacaaagacctgggtcattacagccatgtccacggcagtaacctggttctaggacactgacctgcacctgatggaatgcatcagacttttacaggatgcctctctccctttcccaccacagacacacccacactggttattctgccaacc

SEQ ID NO: 99160 - DNA, 269 bp, Homo sapiens
ggagggggatgtggaactgactctgacggggaacgggaatactgaggggacgacagaccggccaggagaaggatctggggcaatgggagactgacccagtagagaggggatactggggtgatgaggaacccaagcggtagggggggatgctggagggtgggggaattccggagaccggccggggaggaggaaggtactggggggacgtggaaccgaccctgttgaggaaacggataatgggggcggggtgataccggccgtcggagtga

SEQ ID NO: 99161 - DNA, 588 bp, Homo sapiens
  misc_feature (16)..(16): n is a, c, g, or t
cacaggagagagaaancagatgagcgacatgggagttgaactggctccaccaagaatttttaaaagggaccagggcacagtggctcacacctataatcccagcgcttggggaggtcgaggcaggtggatcacttgagtccaggagttcgagaccagcctggccaacatggtaaaacccccatctctagtaaaaatacaaaaattagcagagcaattttttttaactgctgattagtattccttcgtgtggacataccactgtgtgtttaactcttcttccattgatggacatctgggctgtttctgtttttggccattatgaataaatctgatatgaacatttaagtacagattatggtgtggacattccaatatgacattttgtttatcattttcaagagaaaaaatacattgttctttgtagagaaattctcataaaaagactgacccctgacttaccttttacaacccaccccacatctcctccttctctcctccctgttagagtcattcacttaaaacactttcattgagcatctgttgtaagtgaggttgtttcacaagctgtaacaaatcctgcttcctgaa

SEQ ID NO: 99162 - DNA, 136 bp, Homo sapiens
ctaatgtaacaatagtaagaggtgttacctttgagaggtgattaggggactctgccctcatgaatgaggttggcacccttgtgaaaaggctcagggttggccaggcgcggtggctcacgcctgtaatcccagcagt

SEQ ID NO: 99163 - DNA, 245 bp, Homo sapiens
cctcagatatcttaaagcagtcctgtggttggaaaaaattgaacactcccctaattttcttatttagtaggctgagatttgtaccaatcagtcattcttttctcatggcatacagatagaaagtgatggacagtttaatcccccaggagttagtactgcagaatcagacttcagctgagcactcatcattcttaaactcattgcaaaataagtttgtttgaaatgccaactccccaaacccgatg

SEQ ID NO: 99164 - DNA, 585 bp, Homo sapiens
ctgagcagcattcctggcctccatccacaagatacctgtagcagtgtcctgccaacggtaacaatcaagtatgtcatcagacattgcccaatgtccccagggggcaacacccctctcttggacttcagggtcaagagaatctctgctggctaccccaggacttctcattatagatttcctggagcacgcagcagaaactttgcctagcccagtggttgtttccattatctgctgccaaagtgggatttgagggtgtccgggggagggggcatggggagggcagtatgctttcaaaaacccctcccaggccaggcgtggtggctcatgcctgtaatcacaggactttgggaggccgaggctggcagatcacttgaggctgggagttagagaccaacctggctaacatggcaaaacctcgtctctactaaaaatacaaaaatcagcccggcgtggtggcgggcatctgtaatcccatctactcgggaggctgaggcaggagaattacttgaacccaggaggcagaggctgcagtgagccgagatggcaccactgcactccagcttgttgacagaatgagaccctgtg

SEQ ID NO: 99165 - DNA, 409 bp, Homo sapiens
ccccctgagtagctggaactacaggcgcatgccacccatgcccagcctaaattttgtaattttttagttgagatggggtttcaccatgttggcccaggctgatctcaaactcctgacctcaagtgatacacccgccttggcctcccaaagtgctgggattacaggcatgtgccactgctcttggccttgtttgatttattttgaaacaatgttgctaacttcatacaaacttaaaactgggtttctaccaatacttttctaatccttatttgcacaattctggctcacaagtcaaagaaggctctggcttgccttcctctgggcctgttcctgccacgaatattaaggtaattttagatggttcactgtaaaatataatacatgctaggttactctttcgttatgcaaa

SEQ ID NO: 99166 - DNA, 473 bp, Homo sapiens
gatgctcatcaatgatttataaattaatgaactcaaatagttgtagaagatttcatagggaaaaaatgcatttctcttatttggccaattgcaagccatcatatgcaataatgagaaatgttgactatgttcggacaaattaaatacagtaagaaaagaaagagccatctcagaataacggtagattgattccaatttttgtaatatagataatattgcaatagacattcatggaaaaaaatgttaagtgcatttctggttatagttgtaatgttcatttcatagaaataaattactggaccaaagaaggatataaacctcacttttgcacattttcattagcattgcctattgcaattaagcatattaataataggtgaatgtaacatctttttgttttagcatgctcactctctctctccatatatatatgcatgtgtatatgtatgtacatgtatgtgtatatataggtg

SEQ ID NO: 99167 - DNA, 327 bp, Homo sapiens
gttcttcagtgacgaaaatgtaagatttaagaaagacatattagaatttagaattattttttaaaaattctatatgagagtcatatcattaaaaagaacaggtggaaaaaagaaaggataaaaagtacctctacctctttttcctaactgccctgagaaatacgttcttcctcagaggagtggaacgccatgtgctggttgtgtaattctgaacactgcgtgagtctgcacatttaaataaagtggctagagacaaccaagaagtagagccaggccgggcacggtggctcacgcctgtaatcccagcactttgggaggcaaacacag

SEQ ID NO: 99168 - DNA, 411 bp, Homo sapiens
gagcggaaggtaaatcagccatcttaggaggtacagactacagggggccgtggcattcctcttaaccgtggcagctgctgataaatactgtgactattaacagtgaggcccgacgtcatttccttatgagagggcttctttacgtctcttcatcccaaactgggaaatgtttgggaggccgaggcagtgtggatcacgaggtcacggagatggagaccgtcctggctaacatgattgcaggtgaggatattgtggctcagagaagtaattcgacttgtccaacatcatatgcaattggtggtggagctaagtggctcagaaatcaaagatggggaaatagaggccagaagtagaagaaaatagaagaaacacacttggtgaaatgaaaattagaccctgaataaaaactgt

SEQ ID NO: 99169 - DNA, 764 bp, Homo sapiens
gccgctcactcaaggacagacggaatggcagatttagaacctggcgtccattctcaaatcccattcaacaacatgggcgggggacagtggaggggaagccatctgtcctcccttctcaccaggctgagaaaagtgggtgttgaaggtgggaccgagagaagagcccacagaccccactcagggagacttctctggggacagtggcacagagcctgctaacctgctggagcggctggagcaacggcccagtccctctgcacactgtgaatcctggcagccagggcagagatgtggaccaaagggaagtctgattaccgactatgtggcctcagagtgcccttctcctctgacgagctcccagtgctttcgtggacgtgacctcatgaggccctcacactcattccataggtattttctcaggcaagtcacagacggcatcccagcacacagggagagctgagagcctcagttctctctaaaacatgaggaagcatgcacccatcccagggtgtcggcaaagaggccatcctagacgctgcgcttctcacagctgttctggctagcagcatcggctgcttctcaaaaatgattctgagagcttaggaaaaagcgaatacctccaaagtcccaaaataagtttctagaattccacagaacagagtaacagtcctgcctcacctcctcacagatcaagggcccatgttgccttaaatcatttctaagataaaccaaaaaaggaataaaggtggcagggaagaaggaag

SEQ ID NO: 99170 - DNA, 682 bp, Homo sapiens
  misc_feature (128)..(128): n is a, c, g, or t
gcccaaaacctaaaattgaaaccaacctaagtgtccaccaacagatgcctggataaaatgtggtaccatgtaccataaaaatggaatttaatttggagagaatcagtcccaactatacagttatatgncaattaaacatgctcctgaatgacttcttagtagataatgaaaattaaggcagaaaaccagaactttatatgaaactaatgagaacaaagataccacatactagaaatctctggggcacagattattggcaccattaagagggaaatttctggcactatacactcacatccaaaattagaaagttctcaacctaatgtcacaactagaagaactagacaggtaagggccaaccaacctcaaagctagcagaagaccaaataaatataccaaagtcagagctgaactgaaggagattgaaacatgaaaaactggccatcctagacgctgcgcttctcacagctgttctggctagcagcatcggctgcttctcaaaaatgattctgagagcttaggaaaaagcgaatacctccaaagtcccaaaataagtttctagaattccacagaacagagtaacagtcctgcctcacctcctcacagatcaagggcccatgttgccttaaatcatttctaagataaaccaaaaaaggaataaaggtggcagggaagaaggaag

SEQ ID NO: 99171 - DNA, 837 bp, Homo sapiens
agcagaggccggaggaagcgccacgggcggctcagacctgaggccgcaagggcgcgccgggcgggcagggcggagggtccgatttcctccctctgaacggaaaaaaagccactttccctgggaagaactcgaagaagttggatgtctgatcttcaccttggatttgtggtctcggcccgcgggcgactcaccccacccaccaggatcccacgaagccgggccggctcagcccgctggcgccatctagtgtcgaatgaggaggcggccctctgcggctggaggggacgcttgggcgtgtgaaatctgaacggagaggattaaccaaataccatttggacttaaaagcagcttgaggccgggcgcggtggctcatgcctgtaatcccagcactttgggaggccgagacgggccgatcacgaggtcaggagatcgagaccatcccggctaacacggtgaaaccccgtctctactaaaaatacaaaaaaattagccggtgtggtggcgggcgcctgtagtcgcagctactcgggaggctgaggcagaagaatggcgtgaacccgggaggcggagcccagatcgcgccactgcactccagcctgggcgacagagcaagactgtctcaaaaaaaacaacaaaaaacagcttgaaacctcttccagccactctcccagagtgacggacatgcagaaatctgtattccagcctcaattcaagacagccttctagctgcagtcccattttcaacatttcatcagtgaaaatcctttcatttaaaaaatacttcagtgccttagtcttctcaccacaacaaaaccacacagctgtggcatggttgaa

SEQ ID NO: 99172 - DNA, 539 bp, Homo sapiens
agtttatggaaattgtagaaatgaccaatttccttattttataaatagggaagcagtgccttaacatctatgtagagctttgctcttaaagtgctttaatatattttttttgtgctgcccaaggtcacacaacccactggtactccatatttaagctcccaggagattactgtagtatctttcactacatcttatgtgcatttatttttgtggaacttgtatttaactttgcctggtactataattagctatttatttctttttgaccttctgaattgtaaactcttgaatttgggactataccttgttttctagttctgtggacaaaacagtatttgtaaatattgaataaataaaccaaatttcaatttttccttagatttaaaaattagtacagtaaagcagaagttctatatactttgactttagtttttttcttttcaaaatagtcttattgatatataattcatgtaaaagtgacttttacatgaattatatatcaatagtcgacgcggccgcgaattaatagtagtagtagt

SEQ ID NO: 99173 - DNA, 365 bp, Homo sapiens
tgctttaaagttccctggaaggacaaggacctggctctctgactccccaggctgtctcttgaaaggtccacactccaggtcaggtttttgagaagttactttaatgttttatgaaaagagaggtgtcttcacttcaactttttaatgaaaagattcatcataatgattattatctccctttcatcatacctctctccttagctctatatactttgagaatgacattattcacctttttaagtaaataggtcacatagcacagttatgagcacatgctatagaggcagccttcctggcttacatgctgccttccctacttaccagctatataattttggccatgttacttaacagtttctcatgta

SEQ ID NO: 99174 - DNA, 224 bp, Homo sapiens
ttcgagctcggcaccccagcgcactagccccattttgtaacatgctggctgcagcccactaaatagatcttgcattcccactaacaggctgtggcccacaatgtgaaaaactgctcccactgcgccttgggggtctagtggatgcaggaaggtcacctggatcctctcaagtccagccctacagtggccccagggctcacagaataagccctcagcgtagcttc

SEQ ID NO: 99175 - DNA, 308 bp, Homo sapiens
gcttggtccagagctgagttcaagtcctgaatatcctttttaattttctgtctcatcgatctgtctaatactgaccataaagtgttaaagtctcccctacccaagggaatccaggagggactgagcctgaggaaccttgcactctgacccagatactgtgcttttcccacagtcttcgcaacccgcaggccaagagactccctccagtgcctaccccagcagggtcctgggtttcaagcacaaaactagggggccgtttgggcagacaccaaactagctgcaggagttttgtttgttttttttttttt

SEQ ID NO: 99176 - DNA, 892 bp, Homo sapiens
  misc_feature (22)..(22): n is a, c, g, or t
  misc_feature (45)..(46): n is a, c, g, or t
ggggggaaaaagaggggagagnggagggagagaaagaagaaaggnngctctgatgcagctatggacattcagtcttcaactgcactttgtgctgatggtgtccaactcaagcccacacatgatacttttccttattctcccagaagtctctacactgctgaagtatggggttaaaatagaagattgttgacagatagcatactggatgtaaaggagcacatcttgggacaaaaagaagagctctgaagaataatatttcttgacagataaaaattatctgaaatgcaagtttctgtgtccataaatgttttattgaaacacagtcatgcctcttcatgtctatattgtctgtggttccctctacactacaacatcaagtccagcagttgcaatggagatatctggcctgcaaagttcaaagtatttactattttgtcatgtaagaaaaagttcactgattccttgcctacaatgctcaccaggaaagcattgtttatattgagttgggcatataaaattaacacgtttttattttgcacatagataacaattattgtcaaagaatcctgagggatataaaatataggacagaaatctgggccttgaattacacctcaaaactagcaattattaacaaatgagaacagctaacaactaaaatatgagtattgattttatatgcaatagcgtttaaaataaaggatcagatcaatgttgaaatatacgaggaaaatttcatgcagaggaaatggttgtgcttttaggctgggatcttttgttagatgtaggaagggataggtgtgatttcattgtgtagcaggaaactcaaggaaaggcaaagaggctgggtgcagtttctcacacctgcagtccaggccttttgggaggctga

SEQ ID NO: 99177 - DNA, 1037 bp, Homo sapiens
  misc_feature (53)..(53): n is a, c, g, or t
ttaatggttaagatgggtaaggtagtggataaaaagttatattttaatttttnagtctattctagaaaataggaaagtgacaatgaacattaaagctgaactcctgcattctctctcaatggagcatgaaataaggcatgtcatcatgtcagcgtatgctaggaaggatttgcttagaccccggtccttttagtatgatgcagctatggacattcagtcttcaactgcactttgtgctgatggtgtccaactcaagcccacacatgatacttttccttattctcccagaagtctctacactgctgaagtatggggttaaaatagaagattgttgacagatagcatactggatgtaaaggagcacatcttgggacaaaaagaagagctctgaagaataatatttcttgacagataaaaattatctgaaatgcaagtttctgtgtccataaatgttttattgaaacacagtcatgcctcttcatgtctatattgtctgtggttccctctacactacaacatcaagtccagcagttgcaatggagatatctggcctgcaaagttcaaagtatttactattttgtcatgtaagaaaaagttcactgattccttgcctacaatgctcaccaggaaagcattgtttatattgagttgggcatataaaattaacacgtttttattttgcacatagataacaattattgtcaaagaatcctgagggatataaaatataggacagaaatctgggccttgaattacacctcaaaactagcaattattaacaaatgagaacagctaacaactaaaatatgagtattgattttatatgcaatagcgtttaaaataaaggatcagatcaatgttgaaatatacgaggaaaatttcatgcagaggaaatggttgtgcttttaggctgggatcttttgttagatgtaggaagggataggtgtgatttcattgtgtagcaggaaactcaaggaaaggcaaagaggctgggtgcagtttctcacacctgcagtccaggccttttgggaggctga

SEQ ID NO: 99178 - DNA, 367 bp, Homo sapiens
tcaaattattttcactaatattccatttggttcctgagactgttatctcatttttattgataaagaaactcaagtcagagaagttaaataactttcttaacaacttagtgacagaatgggactaaaaactcatgccttcttatttcggtacttatattatcatatattttaaaggtttctcaggttggtagtttcccaattccaagtttcatcgtaatataatagcacctttgctactatagctgactagatggcttaggaaactagataaattactgttctaaagagtgttttttctctagctccacatgcctacctattaaagattctaataaactacccttttccctaatatcctttgagataa

SEQ ID NO: 99179 - DNA, 530 bp, Homo sapiens
catagagaaaattaaaagaaaaaaattttttagaagtgcgatctcgctattttgcccaggctggtcttgaactcctgggctcaggcttagcctcccaaagtgctgggattgcagacatgagccacagcatctggctgaaagaatgttaacatgaatacctgtgtatctccacctagattcaacatttgttaatacttttgccacatttgctttatctttacctattactgaaccatttgaatataagtagcaggcatcctggcccttcatccctgaagacctcagcacgtgtctcctaaggaatacattgtgtttccaaccacaataccattatcccacctcaacagttaatactgtttctatccatcatctcatattcaatccatattcaaatttccccaattagtccccaaatgtcttttatagagttggtattttgctacctactgggttttgatacctactgggttttatataccaggatggaatcaggtgtcttgcgttacatttgattctgtctcttggaattt

SEQ ID NO: 99180 - DNA, 2905 bp, Homo sapiens
gaacgctagatcggggaagtgggtgccgtgcgtgtgggcacagaaacaccatgaagattattttcccgattctaagtaatccagtcttcaggcgcaccgttaaactcctgctctgtttactgtggattggatattctcaaggaaccacacatgtattaagatttggtggtatttttgaatatgtggaatctggcccaatgggagctgaggaacttgcattcagatttgctgtgaacacaattaacagaaacagaacattgctacccaatactacccttacctatgatacccagaagataaacctttatgatagttttgaagcatccaagaaagcctgtgatcagctgtctcttggggtggctgccatcttcgggccttcacacagctcatcagcaaacgcagtgcagtccatctgcaatgctctgggagttccccacatacagacccgctggaagcaccaggtgtcagacaacaaagattccttctatgtcagtctctacccagacttctcttcactcagccgtgccattttagacctggtgcagtttttcaagtggaaaaccgtcacggttgtgtatgatgacagcactggtctcattcgtttgcaagagctcatcaaagctccatcaaggtataatcttcgactcaaaattcgtcagttacctgctgatacaaaggatgcaaaacccttactaaaagaaatgaaaagaggcaaggagtttcatgtaatctttgattgtagccatgaaatggcagcaggcattttaaaacaggcattagctatgggaatgatgacagaatactatcattatatctttaccactctggacctctttgctcttgatgttgagccctaccgatacagtggtgttaacatgacagggttcagaatattaaatacagaaaatacccaagtctcctccatcattgaaaagtggtcgatggaacgattgcaggcacctccgaaacccgattcaggtttgctggatggatttatgacgactgatgctgctctaatgtatgatgctgtgcatgtggtgtctgtggccgttcaacagtttccccagatgacagtcagttccttgcagtgtaatcgacataaaccctggcgcttcgggacccgctttatgagtctaattaaagaggcacattgggaaggcctcacaggcagaataactttcaacaaaaccaatggcttgagaacagattttgatttggatgtgatcagtctgaaggaagaaggtctagaaaagattggaacgtgggatccagccagtggcctgaatatgacagaaagtcaaaagggaaagccagcgaacatcacagattccttatccaatcgttctttgattgttaccaccattttggaagagccttatgtcctttttaagaagtctgacaaacctctctatggtaatgatcgatttgaaggctattgcattgatctcctcagagagttatctacaatccttggctttacatatgaaattagacttgtggaagatgggaaatatggagcccaggatgatgccaatggacaatggaatggaatggttcgtgaactaattgatcataaagctgaccttgcagttgctccactggctattacctatgttcgagagaaggtcatcgacttttccaagccctttatgacacttggaataagtattttgtaccgcaagcccaatggtacaaacccaggcgtcttctccttcctgaatcctctctcccctgatatctggatgtatattctgctggcttacttgggtgtcagttgtgtgctctttgtcatagccaggtttagtccttatgagtggtataatccacacccttgcaaccctgactcagacgtggtggaaaacaattttaccttgctaaatagtttctggtttggagttggagctctcatgcagcaaggttctgagctcatgcccaaagcactgtccaccaggatagtgggaggcatttggtggtttttcacacttatcatcatttcttcgtatactgctaacttagccgcctttctgacagtggaacgcatggaatcccctattgactctgctgatgatttagctaaacaaaccaagatagaatatggagcagtagaggatggtgcaaccatgacttttttcaagaaatcaaaaatctccacgtatgacaaaatgtgggcctttatgagtagcagaaggcagtcagtgctggtcaaaagtaatgaagaaggaatccagcgagtcctcacctctgattatgctttcctaatggagtcaacaaccatcgagtttgttacccagcggaactgtaacctgacacagattggcggccttatagactctaaaggttatggcgttggcactcccatgggttctccatatcgagacaaaattaccatagcaattcttcagctgcaagaggaaggcaaactgcatatgatgaaggagaaatggtggaggggcaatggttgcccagaagaggagagcaaagaggccagtgccctgggggttcagaatattggtggcatcttcattgttctggcagccggcttggtgctttcagtttttgtggcagtgggagaatttttatacaaatccaaaaaaaacgctcaattggaaaaggaatcttctatttggttagtgccaccataccatccagacactgtttagtaatcttttgaaacttactaaaagaggtttttaataatgaggtccttctgtagtgccatggtagaagaattgaggatgtccctgaagtgccagcgtcggttaaaacataagccacaggccccagttattgtgaaaacagaagaagttatcaacatgcacacatttaacgacagaaggttgccaggtaaagaaaccatggcataaagctgggaggccaaacacccaagcacaaactgtcgtctttt

SEQ ID NO: 99181 - DNA, 1518 bp, Homo sapiens
tttaattgatgctaaccatagtgatgggagatccttgcttatacaggagaacataatttattatcttattttaaaataaacattacactaaaaccccacatcatttcaagaaatgtgggcaatagtagttattttattattatacgtaacttttaaaaataacaagatagacaaaatgtttgagctacatgcacatgaaaagtgaaatttacaaaaagcttaagaaatggatccaaaagtatatttaagcacttcctctgaaaccctcataactaacaaaatatgaaaaaacaataaatgtggtttataaaccagaaagcctaaaaaatctcttctaatgctatttttattaaaaatgtttactcattaatattttaattggaactttgcatcatctcaggtagaacgtgagtctcctgtcactatatttaaacaagaatgtcctaaaagattgtctattttctgaaaatagcctctgctttcccaatggttgttgcttgcttactaaagaaatatgtaaatctttgatttaagcttttattacacagtgattccattctgccactgtgacaaaaagtatctgattgctgatcaaattctctatattcgtttcacctttcccccactctctgttaggttctgagctcatgcccaaagcactgtccaccaggatagtgggaggcatttggtggtttttcacacttatcatcatttcttcgtatactgctaacttagccgcctttctgacagtggaacgcatggaatcccctattgactctgctgatgatttagctaaacaaaccaagatagaatatggagcagtagaggatggtgcaaccatgacttttttcaagaagaagaaaaaaaaagaatgaggaggaataagaagaggaggaggaaggaaagaagaacagaaacacaaaatcttactgtgtcattacatgacctatgattaatctcttccatcttatttacattttggataaataggtgactctattttctcaaagtaaaaaggaagatatatttacttacttgccaattatcttattgaagtgttaaagttttatttttctctggattattttaagatgtacttactattaattcattttattgaaagttgacatggtaaactatatttccaggactatagaagattcaaagatgataaaatatgtatggccttttcttcacaggctttaaaatctaatgacaatttcataagcaaccataaatttgaacatttttgatatctgtaacaatatagtactttatgtaaatggttatagcaaaaataatgccatagttctatgaggaaagaaattttaaaattcctgattcttctcctttagaaatatgtacatatttatctatctatgcatagatactatttcttgaaatatagttaaatctattatacttccatcatattaggctatatatgcatgcttctatatatatattaatatatatgttaacatacagaataaaaataaatatatatgttctactagc

SEQ ID NO: 99182 - DNA, 536 bp, Homo sapiens
gataaggacagggatctttaaaatcgaacacttgcaggcacgtatatgaaatcttgtaaaaatgtctgtttctgctttctacttaaacttatctgtctttttgtttcttttgcagcaaaaaatgctggatagaatttcttcccactgcaatttaaatgtattcttttttctgtcaattaccacaggtttagtccttatgagtggtataatccacacccttgcaaccctgactcagacgtggtggaaaacaattttaccttgctaaatagtttctggtttggagttggagctctcatgcagcaaggtatacgattcagcctgctatttcctttgggcaccatgtcccactctttgctgggggtgacagctcttgctggcacaagtcgcttgcatgggtgcctctgtgcatgtaaccataatccagcttttccatcgacctaatgcatttaggccttctcaaatcccattcaagagagattctgagaaaataattagcttttgcaaatccacatagagtatactcatctatttttttc

SEQ ID NO: 99183 - DNA, 2320 bp, Homo sapiens
gaacgctagatcggggaagtgggtgccgtgcgtgtgggcacagaaacaccatgaagattattttcccgattctaagtaatccagtcttcaggcgcaccgttaaactcctgctctgtttactgtggattggatattctcaaggaaccacacatgtattaagatttggtggtatttttgaatatgtggaatctggcccaatgggagctgaggaacttgcattcagatttgctgtgaacacaattaacagaaacagaacattgctacccaatactacccttacctatgatacccagaagataaacctttatgatagttttgaagcatccaagaaagcctgtgatcagctgtctcttggggtggctgccatcttcgggccttcacacagctcatcagcaaacgcagtgcagtccatctgcaatgctctgggagttccccacatacagacccgctggaagcaccaggtgtcagacaacaaagattccttctatgtcagtctctacccagacttctcttcactcagccgtgccattttagacctggtgcagtttttcaagtggaaaaccgtcacggttgtgtatgatgacagcactggtctcattcgtttgcaagagctcatcaaagctccatcaaggtataatcttcgactcaaaattcgtcagttacctgctgatacaaaggatgcaaaacccttactaaaagaaatgaaaagaggcaaggagtttcatgtaatctttgattgtagccatgaaatggcagcaggcattttaaaacaggcattagctatgggaatgatgacagaatactatcattatatctttaccactctggacctctttgctcttgatgttgagccctaccgatacagtggtgttaacatgacagggttcagaatattaaatacagaaaatacccaagtctcctccatcattgaaaagtggtcgatggaacgattgcaggcacctccgaaacccgattcaggtttgctggatggatttatgacgactgatgctgctctaatgtatgatgctgtgcatgtggtgtctgtggccgttcaacagtttccccagatgacagtcagttccttgcagtgtaatcgacataaaccctggcgcttcgggacccgctttatgagtctaattaaagaggcacattgggaaggcctcacaggcagaataactttcaacaaaaccaatggcttgagaacagattttgatttggatgtgatcagtctgaaggaagaaggtctagaaaagattggaacgtgggatccagccagtggcctgaatatgacagaaagtcaaaagggaaagccagcgaacatcacagattccttatccaatcgttctttgattgttaccaccattttggaagagccttatgtcctttttaagaagtctgacaaacctctctatggtaatgatcgatttgaaggctattgcattgatctcctcagagagttatctacaatccttggctttacatatgaaattagacttgtggaagatgggaaatatggagcccaggatgatgccaatggacaatggaatggaatggttcgtgaactaattgatcataaagctgaccttgcagttgctccactggctattacctatgttcgagagaaggtcatcgacttttccaagccctttatgacacttggaataagtattttgtaccgcaagcccaatggtacaaacccaggcgtcttctccttcctgaatcctctctcccctgatatctggatgtatattctgctggcttacttgggtgtcagttgtgtgctctttgtcatagccaggtaacatgctcacttttgtgatttttttggcaattgttacctcctttatctaactaataattgtcaaaagtcacaatcaattttactttttctgttctttattttccatggggtgctgagaaataatgaaattttaagaatcacattcatttattaaaatgtactgtcctgtctttgtgggcagagagcatgctggttgtgtcagtaagctataagtgttatagggattactgttttcttaaccagaatataaaagctttttaaatcaatatgataaatgaatcattgcctcacttcgaagatttctgatgaaccaaaactaaaataacatgttttactaacttgagttaataattcagttataagaaaaaccaaagtactaaaatttaaaaggaggccttttttaaggaaccaagacatttataataaacattctaactataaaaggactaccttagtattctacataatatttgtggtttttttcttgttttttcacagaataaatgtcattaccaaaag

SEQ ID NO: 99184 - DNA, 2818 bp, Homo sapiens
gaacgctagatcggggaagtgggtgccgtgcgtgtgggcacagaaacaccatgaagattattttcccgattctaagtaatccagtcttcaggcgcaccgttaaactcctgctctgtttactgtggattggatattctcaaggaaccacacatgtattaagatttggtggtatttttgaatatgtggaatctggcccaatgggagctgaggaacttgcattcagatttgctgtgaacacaattaacagaaacagaacattgctacccaatactacccttacctatgatacccagaagataaacctttatgatagttttgaagcatccaagaaagcctgtgatcagctgtctcttggggtggctgccatcttcgggccttcacacagctcatcagcaaacgcagtgcagtccatctgcaatgctctgggagttccccacatacagacccgctggaagcaccaggtgtcagacaacaaagattccttctatgtcagtctctacccagacttctcttcactcagccgtgccattttagacctggtgcagtttttcaagtggaaaaccgtcacggttgtgtatgatgacagcactggtctcattcgtttgcaagagctcatcaaagctccatcaaggtataatcttcgactcaaaattcgtcagttacctgctgatacaaaggatgcaaaacccttactaaaagaaatgaaaagaggcaaggagtttcatgtaatctttgattgtagccatgaaatggcagcaggcattttaaaacaggcattagctatgggaatgatgacagaatactatcattatatctttaccactctggacctctttgctcttgatgttgagccctaccgatacagtggtgttaacatgacagggttcagaatattaaatacagaaaatacccaagtctcctccatcattgaaaagtggtcgatggaacgattgcaggcacctccgaaacccgattcaggtttgctggatggatttatgacgactgatgctgctctaatgtatgatgctgtgcatgtggtgtctgtggccgttcaacagtttccccagatgacagtcagttccttgcagtgtaatcgacataaaccctggcgcttcgggacccgctttatgagtctaattaaagaggcacattgggaaggcctcacaggcagaataactttcaacaaaaccaatggcttgagaacagattttgatttggatgtgatcagtctgaaggaagaaggtctagaaaagattggaacgtgggatccagccagtggcctgaatatgacagaaagtcaaaagggaaagccagcgaacatcacagattccttatccaatcgttctttgattgttaccaccattttggaagagccttatgtcctttttaagaagtctgacaaacctctctatggtaatgatcgatttgaaggctattgcattgatctcctcagagagttatctacaatccttggctttacatatgaaattagacttgtggaagatgggaaatatggagcccaggatgatgccaatggacaatggaatggaatggttcgtgaactaattgatcataaagctgaccttgcagttgctccactggctattacctatgttcgagagaaggtcatcgacttttccaagccctttatgacacttggaataagtattttgtaccgcaagcccaatggtacaaacccaggcgtcttctccttcctgaatcctctctcccctgatatctggatgtatattctgctggcttacttgggtgtcagttgtgtgctctttgtcatagccaggtttagtccttatgagtggtataatccacacccttgcaaccctgactcagacgtggtggaaaacaattttaccttgctaaatagtttctggtttggagttggagctctcatgcagcaaggttctgagctcatgcccaaagcactgtccaccaggatagtgggaggcatttggtggtttttcacacttatcatcatttcttcgtatactgctaacttagccgcctttctgacagtggaacgcatggaatcccctattgactctgctgatgatttagctaaacaaaccaagatagaatatggagcagtagaggatggtgcaaccatgacttttttcaagaaatcaaaaatctccacgtatgacaaaatgtgggcctttatgagtagcagaaggcagtcagtgctggtcaaaagtaatgaagaaggaatccagcgagtcctcacctctgattatgctttcctaatggagtcaacaaccatcgagtttgttacccagcggaactgtaacctgacacagattggcggccttatagactctaaaggttatggcgttggcactcccatgggttctccatatcgagacaaaattaccatagcaattcttcagctgcaagaggaaggcaaactgcatatgatgaaggagaaatggtggaggggcaatggttgcccagaagaggagagcaaagaggccagtgccctgggggttcagaatattggtggcatcttcattgttctggcagccggcttggtgctttcagtttttgtggcagtgggagaatttttatacaaatccaaaaaaaacgctcaattggaaaagaggtccttctgtagtgccatggtagaagaattgaggatgtccctgaagtgccagcgtcggttaaaacataagccacaggccccagttattgtgaaaacagaagaagttatcaacatgcacacatttaacgacagaaggttgccaggtaaagaaaccatggcataaagctgggaggccaaacacccaagcacaaactgtcgtctttt

SEQ ID NO: 99185 - DNA, 2590 bp, Homo sapiens
gaacgctagatcggggaagtgggtgccgtgcgtgtgggcacagaaacaccatgaagattattttcccgattctaagtaatccagtcttcaggcgcaccgttaaactcctgctctgtttactgtggattggatattctcaaggaaccacacatgtattaagatttggtggtatttttgaatatgtggaatctggcccaatgggagctgaggaacttgcattcagatttgctgtgaacacaattaacagaaacagaacattgctacccaatactacccttacctatgatacccagaagataaacctttatgatagttttgaagcatccaagaaagcctgtgatcagctgtctcttggggtggctgccatcttcgggccttcacacagctcatcagcaaacgcagtgcagtccatctgcaatgctctgggagttccccacatacagacccgctggaagcaccaggtgtcagacaacaaagattccttctatgtcagtctctacccagacttctcttcactcagccgtgccattttagacctggtgcagtttttcaagtggaaaaccgtcacggttgtgtatgatgacagcactggtctcattcgtttgcaagagctcatcaaagctccatcaaggtataatcttcgactcaaaattcgtcagttacctgctgatacaaaggatgcaaaacccttactaaaagaaatgaaaagaggcaaggagtttcatgtaatctttgattgtagccatgaaatggcagcaggcattttaaaacaggcattagctatgggaatgatgacagaatactatcattatatctttaccactctggacctctttgctcttgatgttgagccctaccgatacagtggtgttaacatgacagggttcagaatattaaatacagaaaatacccaagtctcctccatcattgaaaagtggtcgatggaacgattgcaggcacctccgaaacccgattcaggtttgctggatggatttatgacgactgatgctgctctaatgtatgatgctgtgcatgtggtgtctgtggccgttcaacagtttccccagatgacagtcagttccttgcagtgtaatcgacataaaccctggcgcttcgggacccgctttatgagtctaattaaagaggcacattgggaaggcctcacaggcagaataactttcaacaaaaccaatggcttgagaacagattttgatttggatgtgatcagtctgaaggaagaaggtctagaaaagattggaacgtgggatccagccagtggcctgaatatgacagaaagtcaaaagggaaagccagcgaacatcacagattccttatccaatcgttctttgattgttaccaccattttggaagagccttatgtcctttttaagaagtctgacaaacctctctatggtaatgatcgatttgaaggctattgcattgatctcctcagagagttatctacaatccttggctttacatatgaaattagacttgtggaagatgggaaatatggagcccaggatgatgccaatggacaatggaatggaatggttcgtgaactaattgatcataaagctgaccttgcagttgctccactggctattacctatgttcgagagaaggtcatcgacttttccaagccctttatgacacttggaataagtattttgtaccgcaagcccaatggttctgagctcatgcccaaagcactgtccaccaggatagtgggaggcatttggtggtttttcacacttatcatcatttcttcgtatactgctaacttagccgcctttctgacagtggaacgcatggaatcccctattgactctgctgatgatttagctaaacaaaccaagatagaatatggagcagtagaggatggtgcaaccatgacttttttcaagaaatcaaaaatctccacgtatgacaaaatgtgggcctttatgagtagcagaaggcagtcagtgctggtcaaaagtaatgaagaaggaatccagcgagtcctcacctctgattatgctttcctaatggagtcaacaaccatcgagtttgttacccagcggaactgtaacctgacacagattggcggccttatagactctaaaggttatggcgttggcactcccatgggttctccatatcgagacaaaattaccatagcaattcttcagctgcaagaggaaggcaaactgcatatgatgaaggagaaatggtggaggggcaatggttgcccagaagaggagagcaaagaggccagtgccctgggggttcagaatattggtggcatcttcattgttctggcagccggcttggtgctttcagtttttgtggcagtgggagaatttttatacaaatccaaaaaaaacgctcaattggaaaagaggtccttctgtagtgccatggtagaagaattgaggatgtccctgaagtgccagcgtcggttaaaacataagccacaggccccagttattgtgaaaacagaagaagttatcaacatgcacacatttaacgacagaaggttgccaggtaaagaaaccatggcataaagctgggaggccaaacacccaagcacaaactgtcgtctttt

SEQ ID NO: 99186 - DNA, 757 bp, Homo sapiens
tgagaatgaagacaaaatatatccagacttatgagacacagtgaaagcattgtttaaagggaaatatatagttgtgaacacatatgttaaaaaaagaagaaagagctcaaagcagtaacctaagcttctactttaacacactggaaaaagaagagcaaacaaagcaggcagaaagaaaacaataaagattagagcagaaattaatgaaatagaaaattaaaaaaatggagaaaataggtgaaataaaaagttggttctttgacaagattcacaaacctttagctaggctgagaaaaaaagagggaagtctcaaattactaaaatgagaaatgaaagaggaggatattactatcaaccttacagaaataaaaacaattaggaccatgagcaactatatgccaaaggatgacttagatgaaatagacaaattctagaaagacacaaacttatgaaatggaagatctaaataaatttatatcaaaataagattaaaatagaaattaaaagaactactcacaaagaaaagcccagacccagatggcctcactggtgaattctatcaaacatttaggcactagttaaaaagtgatgtcagcaaaatggtggaataggaagacccaggcccttattccctcacagagaaacccacttaacaaaaatttatgaccaaactgcttttgtaagaacttcagaaactttgtaagaacaccagttaagaggttgtagcacaaagccaagaagagacatattgaagtgt

SEQ ID NO: 99187 - DNA, 394 bp, Homo sapiens
ctcttcttgctctctcttagtgggttcagagctccagcagaaaaaatgggacactgtggattgatctccagaaaaccccaaaaccagcactgaaggctccaggagattatgcctttagattgtatacaggcaccagaatgacttttgcctttataaaaatgcgtgcaagagcatgaaaactaatatttgaggaatttttttttctcactgtactttctggtcctcactgaaagcattggcagttttaaaaaatgaaatgtgatactgttatagacgtagcaaacctcacgtttcattttttccaattcattctatatctaggaacttacttagaaggagaaacaaactgtacccagaaaaaggaatgaaactggagaattcttcctcatgattc

SEQ ID NO: 99188 - DNA, 220 bp, Homo sapiens
caatctcaattactgcagaactaagagcaagcccagctaagaatacaaaagcaccctattctcatcagccattcaagaaatttaagagttcatgtatgatctgaaatcttccccagagactccacatgctacattcgtcagcctggttaccttattccttcatcagtaggaatattccaatgtggaaattaaacagctaaaaactacatcatgctcacag

SEQ ID NO: 99189 - DNA, 143 bp, Homo sapiens
cagacagttgaacttgaattaggttgtggttttgccaggtgattgtggcagaggagaaaaagcagtggcagtgccacttatatccttctgtgaaatcttcctttttttgtgtggtgtagagctagcaaatgccatttacctat

SEQ ID NO: 99190 - DNA, 402 bp, Homo sapiens
cttgcccaagggcctgagctggtggaggcagagcaggagttggatccaggcctgtctgaggcatcctgccacctccatccagacctggagcaatccctgagaagggtggctaccaccagagatgtggcagctctggtctcaggaagcatagccggaggatgtcccaggcaaccaaacagccattcatcagtaaggagccagagtgagggctgctagttcagcccccggaaggtggtccaggggcagccagtgcagaactcagcaggagctcagttccaactgagcctgatttcactccagtgtccacaagggacatcctgacctggaggtcctcggctactcaccctggggcctgctggcacagcccaggagctagcccaggcctgcctctgatggttcccc

SEQ ID NO: 99191 - DNA, 175 bp, Homo sapiens
gctgatagacacaactcagggtgctaatataccaagtgcagaggtaacacagaaggaaatgtttattgacgcacgggtaaaggaagacttctcagaggagatagtttcccatgtgcatttgttttgtttttaagtaagagacctctgctgtagttttcttgaggaggtggcaaag

SEQ ID NO: 99192 - DNA, 663 bp, Homo sapiens
aggctggagtgcagtgttacaatcatagctcactgcagcctcaaactcctgggctcacatgatcctcctgtcccaggttcctcagtagttgggactacgggtgcaagccaccacatttgactaattaaaaaaaaattgtgaagatggggtctcactatgtttcctaggctggtctcaaagaaaaagtttttatgtatgcatgaaatatccctggaaagctagacaaaatttaataacattgtgtctagggagataaactggatttctggaagtcatggatgggaggaaaaattttcactgtaaaacatttttacgctttttgatttatgaaccatatgaatctactacttgtcctaaaattttttaaaaactaaagtaagggctaggcacggtgcacatgcctataattccagcactttgggaggctgaggcagcaggattgcttgaactcaagagttcaagaccagcctgggcaacatagtgaaaccccgtctctgcaaaaaaatacaaaaattagctgggcatggtggtgcatgcctgcagtcccagacacttgggaggctgagggggtaggatcacttgagcctgggaggcggaggttgcagtgagctgagactgcgccactgccctccagcctgggtggcagagtgagaccctgtctca

SEQ ID NO: 99193 - DNA, 794 bp, Homo sapiens
ggtttcttaagcagatgaatgatgactgcataaatataatgatgtagtatctttgaaggaaatgacagaggaagaatcttttactgaaatatcaatgtaaacattttttgggggaaagttttcagttgtattatagttgattctgactatttgccataactgtattctatacacttgctgaaaacattgaattagggaatactgaatcatggctcctaagggaaagacagggttaggttcctggaagcctctggtcacaacattttcaccaactgatcaatagataaccttgttttgtttatgtttgtgtttagagacatttaatatatattgttgacttactaacatcgaactcatggccaatagcactataacctacggctgaacaaagcttatcaagtcttttctctataaggcacatcccagccttcttgcacttaggagcactagacggcatttctcagcactatacaaggggctatttaaaacagaataatcacccacaaaaagcacaacaattcaaaaaaaaatctggtactaatttagactacaaaagggacatatgtttacagtatgatagtttaaacgagtaggaagaaagtcacctgactgacctctggtaggaatgcacgtgtatgtcgggcaactcaacatttttcactgctctgtacatgttactgaatgactacaaaagtcagaaattgtgagtattgattttggggttaacaaataaattttagcaggcaggccgacttaaaaatatggaatccacaatgggaacgagattgactgta

SEQ ID NO: 99194 - DNA, 216 bp, Homo sapiens
ctctctcctgccatgtaaggtttttgctaagaaatatgctgctagccttattggaactctcatatatgtgatttatttctattctcttgctgcttttaggattctctctttgtctttgatttttgatagtttgattataatacattttgttatagtcttgtttggatagaatctgattggagacatttggtccttataccttgatattattcccca

SEQ ID NO: 99195 - DNA, 378 bp, Homo sapiens
cttttagcatcttcttacattgacgactaatcacttccaattgaagtcaggagaaagctgctcaactacactatttaatggattttgaaatatgtaaatttcctctgcacttgcatggaaatctgaaaaacacttctggaactataggttgggcttggaaaatatatctgctgcagatgtcttctgttttttttttttcatgtattcattcttttattgtccattgttttaacttgactgaatacatgatcaacaagagcactgtactcctggcaattattagaacatggactttgcatagtagaaaacattttacaccagtctatggggtactgcattgctttgtataaagttcaaaataaagatttattttcaaac

SEQ ID NO: 99196 - DNA, 263 bp, Homo sapiens
catcgaacccctctgcaactcttttcagttctatattgacaatgtcctttaattgttttgttccatctatacccactcaaccaatctagcacaagccaccacgatttattgaatagagaataggatggacaggctccttaatagtgtccccattttctctcttcctctcctaacctatgctttacccaacagagagacttatgtgcttaaaatcctttcgtggcctctgattgtgcatcaaataataaaatctaaactccttg

SEQ ID NO: 99197 - DNA, 468 bp, Homo sapiens
gtaacatggcaagtccctgtctctacaaaaaaaaaaaaaaaaaaaaatttagaactagccaggcatagtggcatacctgttgtcatagctactcaggaggctgaagtgggaggatcgctggggcccaagagttggaggttaaaatgaactgtgataacaccactgcaatacagcctggcaacagagcaagactctgtctctaaaaaaacataaaaataagtgatgaaaataattgaccattatactttagagggacttctcatataagaattttggttaggagatgaaagatatgtagactaaaagctacaaaacgttgatcaaagaaattgaaaacataaacagaaagatagcccatgttcatgggggaaaaaagaggattttggttaagcacacacactgttgcataggtactactgtccatgcttagcagacagaggcagacagggaagaagttacaaatcctag

SEQ ID NO: 99198 - DNA, 713 bp, Homo sapiens
ttccttagtctaagggcacagaatggaaaggttctcattttcctcctccaatgagaattggcaccccaacagcaggccctgggccctcggctgtgatggaggggtgtctcggggtagcagaactaaggaagctctccaccttcagtgcatacttggaggaccacagctacaacgtggagcagatatggagggatattgaggacgtcatcatcaagaccctcatctcggcccaccccatcatcaggcataactaccacacctgcttccccaaccacacactcaacagcgcctgctttgagatcctgggctttgacattttgttggaccacaaactcaaaccctggctgctggaggtcaaccactctccaagcttctccaccgactctcggttggataaagaggtgaaagatggtctgctgtatgacaccttagtcctgatcaacctggaaagctgtgacaagaagaaagtcttggaggaggagagacaacgggggcagttcctgcagcagtgttgttctcgggagatgaggattgaggaagccaagggtttccgggccgtgcagttaaagaaaactgaaacgtatgagaaggaaaactgtggagggttccgactgatttatcccagtctgaattcggagaagtatgagaagtttttccaggacaacaactccctcttccagaatactgttgcttccagggctcgggaggagtat

SEQ ID NO: 99199 - DNA, 370 bp, Homo sapiens
cagaactaccttaaattaatttgttgaaaggacagatggatggatggttgatggaagtagcaggcttccagcagcaggggatggagtgagtgtgtggataccgctggatcagcagaaggttataccattttagagtaactatctcggacttcggagagttcctgggtatgaaggtttggctttaattaaagtctcagcacagtgttaaatgccattttattttaggtcataattaacactaatgagatgagtggattacaaagagcacacattttgagaaagtgaaaaacaacatctgagcttggtggtttccattttcgcttttccccctcccatgctctgttcaattaaaagttttgagaaaatatta

SEQ ID NO: 99200 - DNA, 403 bp, Homo sapiens
gatgatctcactctgtcacccaggctggactgcaatgatgtaaacatggctcactgcagccttgacctcttgagatcaagcgatcctcccaccttagcctctggtgtagttgggactataggtgtggaccaccatgcccagctcattttttgaatgtttgtagagatgggcaagaaagtgagatcccactttcttgtccaggctggtctcaaactcctgggctcaaactatcctcctgtatcagactcccaaagtgctaggattataggtgtgagccacaatgcccggcctatatgcctatgcctcatttttgagtgtcactgtgtaccctagtcggtgttagacactgcaggtccccgaagaagtagaggtgactgtctgtaccttaggggcaggcacagtt

SEQ ID NO: 99201 - DNA, 347 bp, Homo sapiens
gcggccgcctactactactaaattcgcggccgcgtcgacggccgggaaagagagttcgttctgggtgggacaacataagacagtgggagatactaggcttccttcccgagagttaatgcccaactctcccactttcaagtgcaggagggagctatgtgggcagagtattcaatagatccagggccctgatttgcttatttgtaaaatggaagttaaaacatttattttacagggctgctaggagaaatcaatgagctaatacatgtggcattcatttaccatgcagaccagacatgactaggacctcaagtgtggactgaatctgacaacctatcccctggtcgacg

SEQ ID NO: 99202 - DNA, 515 bp, Homo sapiens
tccctggtaagcagggggctccgtgcaaggcgcagtggaaggaaaagtggtaaagattggttggaagaagacacttgaggttattgtctgaagctgggccctttttcttgagtttgatgtggttgtgtttctgtgtcactggtcgccacagatgattggaaattagctttttccttttaccttgtagtgcagaatgctctgttgcagttgggcagactagacgggttctctgaaccacatagtttaatctttctgttcgactttctgttaggacatgactctttcctctccttcaccccttacctccagtttttgggactaggttgggtgacctcttcctcctttgtcttcttggaaaccttacttatcctgcttctgcaaatgttgggtttctccatctcatcattgagtggattcaaagtgttgacatacacagagcaacctctactcaaggtcagattgggtcagcttttccttttcaaaagagtagtgttgctcttacttgctctttgaga

SEQ ID NO: 99203 - DNA, 1495 bp, Homo sapiens
agcggagggctcgcagctccgccggcgcctggtcccagcgcccgcggcgccgcgtccccggcccaaccatggcgtcctccgcggccggctgcgtggtgatcgttggcagtggagtcattgggcgaagctgggccatgctgtttgccagtggaggcttccaggtgaaactctatgacattgagcaacagcagataaggaacgccctggaaaacatcagaaaggagatgaagttgctggagcaggcaggttctctgaaaggctccctgagtgtggaagagcagctgtcactcatcagtggttgtcccaatatccaagaagcagtagagggtgccatgcacattcaggaatgtgttccagaagatctagaactgaagaagaagatttttgctcagttagattccatcattgatgatcgagtgatcttaagcagttccacttcttgtctcatgccttccaagttgtttgctggcttggtccatgtgaagcaatgcatcgtggctcatcctgtgaatccgccatactacatcccgctggttgagctggtcccccacccggagacggcccctacgacagtggacagaacccacgccctgatgaagaagattggacagtgccccatgcgagtccagaaggaggtggccggcttcgttctgaaccgcctgcaatatgcaatcatcagcgaggcctggcggctagtggaggaaggaatcgtgtctcctagtgacctggaccttgtcatgtcagaagggttgggcatgcggtatgcattcattggacccctggaaaccatgcatctcaatgcagaaggtatgttaagctactgcgacagatacagcgaaggcataaaacatgtcctacagacttttggacccattccagagttttccagggccactgctgagaaggttaaccaggacatgtgcatgaaggtccctgatgacccggagcacttagctgccaggaggcagtggagggacgagtgcctcatgagactcgccaagttgaagagtcaagtgcagccccagtgaatttcttgtaatgcagcttccactcctctcattggaggccctatttgggaacactgcaagcccttaatcagccctctgtgacataggtagcagcccacggagatcctaagctggctgtcttgtgtgcagcctgagtggggtggtgcaggccggtagtctgcccgtcactttggatcatagccctgggcctggcggcacagcagcacttgcgttctcggggctgtcgatttcctgccacctgggcagataacctggagatttccaccttttcttttcagcttgattgcatttgactatattttacagccagtgattgtagtttcatgttaatatgtggcaaaatatttttgtaattattttctaatccctttctgagtactctggggccctgcatttatgaggcacctaccttcattttgctaacgcttattctgaataaaagtttttgattccttaaagaaaaaaaa

SEQ ID NO: 99204 - DNA, 1584 bp, Homo sapiens
ccaggctggtacgcccccggaggtacgggaccgcggcgccgcgtccccggcccaaccatggcgtcctccgcggccggctgcgtggtgatcgttggcagaattaaaactctgtacccattgaacaacagctgctcatttcccccagccccagcccctggcatccacccttctagctttctgtctctatgggtacctcagtggagtcattgggcgaagctgggccatgctgtttgccagtggaggcttccaggtgaaactctatgacattgagcaacagcagataaggaacgccctggaaaacatcagaaaggagatgaagttgctggagcaggcaggttctctgaaaggctccctgagtgtggaagagcagctgtcactcatcagtggttgtcccaatatccaagaagcagtagagggtgccatgcacattcaggaatgtgttccagaagatctagaactgaagaagaagatttttgctcagttagattccatcattgatgatcgagtgatcttaagcagttccacttcttgtctcatgccttccaagttgtttgctggcttggtccatgtgaagcaatgcatcgtggctcatcctgtgaatccgccatactacatcccgctggttgagctggtcccccacccggagacggcccctacgacagtggacagaacccacgccctgatgaagaagattggacagtgccccatgcgagtccagaaggaggtggccggcttcgttctgaaccgcctgcaatatgcaatcatcagcgaggcctggcggctagtggaggaaggaatcgtgtctcctagtgacctggaccttgtcatgtcagaagggttgggcatgcggtatgcattcattggacccctggaaaccatgcatctcaatgcagaaggtatgttaagctactgcgacagatacagcgaaggcataaaacatgtcctacagacttttggacccattccagagttttccagggccactgctgagaaggttaaccaggacatgtgcatgaaggtccctgatgacccggagcacttagctgccaggaggcagtggagggacgagtgcctcatgagactcgccaagttgaagagtcaagtgcagccccagtgaatttcttgtaatgcagcttccactcctctcattggaggccctatttgggaacactgcaagcccttaatcagccctctgtgacataggtagcagcccacggagatcctaagctggctgtcttgtgtgcagcctgagtggggtggtgcaggccggtagtctgcccgtcactttggatcatagccctgggcctggcggcacagcagcacttgcgttctcggggctgtcgatttcctgccacctgggcagataacctggagatttccaccttttcttttcagcttgattgcatttgactatattttacagccagtgattgtagtttcatgttaatatgtggcaaaatatttttgtaattattttctaatccctttctgagtactctggggccctgcatttatgaggcacctaccttcattttgctaacgcttattctgaataaaagtttttgattccttaaagaaaaaaaa

SEQ ID NO: 99205 - DNA, 1886 bp, Homo sapiens
agcggagggctcgcagctccgccggcgcctggtcccagcgcccgcggcgccgcgtccccggcccaaccatggcgtcctccgcggccggctgcgtggtgatcgttggcagtggagtcattgggcgaagctgggccatgctgtttgccagtggaggcttccaggtgaaactctatgacattgagcaacagcagataaggaacgccctggaaaacatcagaaaggagatgaagttgctggagcaggcaggttctctgaaaggctccctgagtgtggaagagcagctgtcactcatcagtggttgtcccaatatccaagaagcagtagagggtgccatgcacattcaggaatgtgttccagaagatctagaactgaagaagaagatttttgctcagttagattccatcattgatgatcgagtgatcttaagcagttccacttcttgtctcatgccttccaagttgtttgctggcttggtccatgtgaagcaatgcatcgtggctcatcctgtgaatccgccatactacatcccgctggttgagctggtcccccacccggagacggcccctacgacagtggacagaacccacgccctgatgaagaagattggacagtgccccatgcgagtccagaaggaggtggccggcttcgttctgaaccgcctgcaatatgcaatcatcagcgaggcctggcggctagtggaggaaggaatcgtgtctcctagtgacctggaccttgtcatgtcagaagggttgggcatgcggtatgcattcattggacccctggaaaccatgcatctcaatgcagaaggtatgttaagctactgcgacagatacagcgaaggcataaaacatgtcctacagacttttggacccattccagagttttccagggccactgctgagaaggttaaccaggtatgtaacttctctgcaactcactgcagagaagcatgttggctacctggagcacttgctgcccctcacctctgcagcgggtgggcctgcctctgcagctggaatctttacccttgatcttggtggttcctcattcataactttgttcatacttccatcgtgtcaccaggacaccttaaggacagggtgaccagtgaactggtagctcattgtgacttgtctctgagggactgaggtctttcaagatttggaaagctgctgttcattgagggtttattgcttttgtctttgaaagcagtttctgcacagtttgcataaacaagagcaataattacactcttgataaattatttcctctttattgtccttttttttccttctccttcttgcagacatgtgcatgaaggtccctgatgacccggagcacttagctgccaggaggcagtggagggacgagtgcctcatgagactcgccaagttgaagagtcaagtgcagccccagtgaatttcttgtaatgcagcttccactcctctcattggaggccctatttgggaacactgcaagcccttaatcagccctctgtgacataggtagcagcccacggagatcctaagctggctgtcttgtgtgcagcctgagtggggtggtgcaggccggtagtctgcccgtcactttggatcatagccctgggcctggcggcacagcagcacttgcgttctcggggctgtcgatttcctgccacctgggcagataacctggagatttccaccttttcttttcagcttgattgcatttgactatattttacagccagtgattgtagtttcatgttaatatgtggcaaaatatttttgtaattattttctaatccctttctgagtactctggggccctgcatttatgaggcacctaccttcattttgctaacgcttattctgaataaaagtttttgattccttaaagaaaaaaaa

SEQ ID NO: 99206 - DNA, 1440 bp, Homo sapiens
ccaggctggtacgcccccggaggtacgggaccgcggcgccgcgtccccggcccaaccatggcgtcctccgcggccggctgcgtggtgatcgttggcagtggagtcattgggcgaagctgggccatgctgtttgccagtggaggcttccaggtgaaactctatgacattgagcaacagcagataaggaacgccctggaaaacatcagccctgagtgtggaagagcagctgtcactcatcagtggttgtcccaatatccaagaagcagtagagggtgccatgcacattcaggaatgtgttccagaagatctagaactgaagaagaagatttttgctcagttagattccatcattgatgatcgagtgatcttaagcagttccacttcttgtctcatgccttccaagttgtttgctggcttggtccatgtgaagcaatgcatcgtggctcatcctgtgaatccgccatactacatcccgctggttgagctggtcccccacccggagacggcccctacgacagtggacagaacccacgccctgatgaagaagattggacagtgccccatgcgagtccagaaggaggtggccggcttcgttctgaaccgcctgcaatatgcaatcatcagcgaggcctggcggctagtggaggaaggaatcgtgtctcctagtgacctggaccttgtcatgtcagaagggttgggcatgcggtatgcattcattggacccctggaaaccatgcatctcaatgcagaaggtatgttaagctactgcgacagatacagcgaaggcataaaacatgtcctacagacttttggacccattccagagttttccagggccactgctgagaaggttaaccaggacatgtgcatgaaggtccctgatgacccggagcacttagctgccaggaggcagtggagggacgagtgcctcatgagactcgccaagttgaagagtcaagtgcagccccagtgaatttcttgtaatgcagcttccactcctctcattggaggccctatttgggaacactgcaagcccttaatcagccctctgtgacataggtagcagcccacggagatcctaagctggctgtcttgtgtgcagcctgagtggggtggtgcaggccggtagtctgcccgtcactttggatcatagccctgggcctggcggcacagcagcacttgcgttctcggggctgtcgatttcctgccacctgggcagataacctggagatttccaccttttcttttcagcttgattgcatttgactatattttacagccagtgattgtagtttcatgttaatatgtggcaaaatatttttgtaattattttctaatccctttctgagtactctggggccctgcatttatgaggcacctaccttcattttgctaacgcttattctgaataaaagtttttgattccttaaagaaaaaaaa

SEQ ID NO: 99207 - DNA, 1715 bp, Homo sapiens
ccaggctggtacgcccccggaggtacgggaccgcggcgccgcgtccccggcccaaccatggcgtcctccgcggccggctgcgtggtgatcgttggcaggaagtctgaaacagcagttggagtgtagtggttaagaggaaggactcaggagtcagattgcttggcttcatctcatagatccataacttatcacccttgtggacttaattcctccatgcctcagtttatcacttatgtaggcttaattcctccatgcctcagtttccctacatataaaatggaaatactaataacacctaccttgtagggttgttgtaaagattaacatagtggagtcattgggcgaagctgggccatgctgtttgccagtggaggcttccaggtgaaactctatgacattgagcaacagcagataaggaacgccctggaaaacatcagaaaggagatgaagttgctggagcaggcaggttctctgaaaggctccctgagtgtggaagagcagctgtcactcatcagtggttgtcccaatatccaagaagcagtagagggtgccatgcacattcaggaatgtgttccagaagatctagaactgaagaagaagatttttgctcagttagattccatcattgatgatcgagtgatcttaagcagttccacttcttgtctcatgccttccaagttgtttgctggcttggtccatgtgaagcaatgcatcgtggctcatcctgtgaatccgccatactacatcccgctggttgagctggtcccccacccggagacggcccctacgacagtggacagaacccacgccctgatgaagaagattggacagtgccccatgcgagtccagaaggaggtggccggcttcgttctgaaccgcctgcaatatgcaatcatcagcgaggcctggcggctagtggaggaaggaatcgtgtctcctagtgacctggaccttgtcatgtcagaagggttgggcatgcggtatgcattcattggacccctggaaaccatgcatctcaatgcagaaggtatgttaagctactgcgacagatacagcgaaggcataaaacatgtcctacagacttttggacccattccagagttttccagggccactgctgagaaggttaaccaggacatgtgcatgaaggtccctgatgacccggagcacttagctgccaggaggcagtggagggacgagtgcctcatgagactcgccaagttgaagagtcaagtgcagccccagtgaatttcttgtaatgcagcttccactcctctcattggaggccctatttgggaacactgcaagcccttaatcagccctctgtgacataggtagcagcccacggagatcctaagctggctgtcttgtgtgcagcctgagtggggtggtgcaggccggtagtctgcccgtcactttggatcatagccctgggcctggcggcacagcagcacttgcgttctcggggctgtcgatttcctgccacctgggcagataacctggagatttccaccttttcttttcagcttgattgcatttgactatattttacagccagtgattgtagtttcatgttaatatgtggcaaaatatttttgtaattattttctaatccctttctgagtactctggggccctgcatttatgaggcacctaccttcattttgctaacgcttattctgaataaaagtttttgattccttaaagaaaaaaaa

SEQ ID NO: 99208 - DNA, 1436 bp, Homo sapiens
agcggagggctcgcagctccgccggcgcctggtcccagcgcccgcggcgccgcgtccccggcccaaccatggcgtcctccgcggccggctgcgtggtgatcgttggcagtggagtcattgggcgaagctgggccatgctgtttgccagtggaggcttccaggtgaaactctatgacattgagcaacagcagataaggaacgccctggaaaacatcagaaaggagatgaagttgctggagcaggcaggttctctgaaaggctccctgagtgtggaagagcagctgtcactcatcagtggttgtcccaatatccaagaagcagtagagggtgccatgcacattcaggaatgtgttccagaagatctagaactgaagaagaagatttttgctcagttagattccatcattgatgatcgagtgatcttaagcagttccacttcttgtctcatgccttccaagttgtttgctggcttggtccatgtgaagcaatgcatcgtggctcatcctgtgaatccgccatactacatcccgctggttgagctggtcccccacccggagacggcccctacgacagtggacagaacccacgccctgatgaagaagattggacagtgccccatgcgagtccagaaggaggtggccggcttcgttctgaaccgcctgcaatatgcaatcatcagcgaggcctggcggctagtggaggaaggaatcgtgtctcctagtgacctggaccttgtcatgtcagaagggttgggcatgcggtatgcattcattggacccctggaaaccatgcatctcaatgcagaaggtatgttaagctactgcgacagatacagcgaaggcataaaacatgtccgacatgtgcatgaaggtccctgatgacccggagcacttagctgccaggaggcagtggagggacgagtgcctcatgagactcgccaagttgaagagtcaagtgcagccccagtgaatttcttgtaatgcagcttccactcctctcattggaggccctatttgggaacactgcaagcccttaatcagccctctgtgacataggtagcagcccacggagatcctaagctggctgtcttgtgtgcagcctgagtggggtggtgcaggccggtagtctgcccgtcactttggatcatagccctgggcctggcggcacagcagcacttgcgttctcggggctgtcgatttcctgccacctgggcagataacctggagatttccaccttttcttttcagcttgattgcatttgactatattttacagccagtgattgtagtttcatgttaatatgtggcaaaatatttttgtaattattttctaatccctttctgagtactctggggccctgcatttatgaggcacctaccttcattttgctaacgcttattctgaataaaagtttttgattccttaaagaaaaaaaa

SEQ ID NO: 99209 - DNA, 1333 bp, Homo sapiens
agcggagggctcgcagctccgccggcgcctggtcccagcgcccgcggcgccgcgtccccggcccaaccatggcgtcctccgcggccggctgcgtggtgatcgttggcagtggagtcattgggcgaagctgggccatgctgtttgccagtggaggcttccaggtgaaactctatgacattgagcaacagcagataaggaacgccctggaaaacatcagaaaggagatgaagttgctggagcaggcaggttctctgaaaggctccctgagtgtggaagagcagctgtcactcatcagtggttgtcccaatatccaagaagcagtagagggtgccatgcacattcaggtgaatccgccatactacatcccgctggttgagctggtcccccacccggagacggcccctacgacagtggacagaacccacgccctgatgaagaagattggacagtgccccatgcgagtccagaaggaggtggccggcttcgttctgaaccgcctgcaatatgcaatcatcagcgaggcctggcggctagtggaggaaggaatcgtgtctcctagtgacctggaccttgtcatgtcagaagggttgggcatgcggtatgcattcattggacccctggaaaccatgcatctcaatgcagaaggtatgttaagctactgcgacagatacagcgaaggcataaaacatgtcctacagacttttggacccattccagagttttccagggccactgctgagaaggttaaccaggacatgtgcatgaaggtccctgatgacccggagcacttagctgccaggaggcagtggagggacgagtgcctcatgagactcgccaagttgaagagtcaagtgcagccccagtgaatttcttgtaatgcagcttccactcctctcattggaggccctatttgggaacactgcaagcccttaatcagccctctgtgacataggtagcagcccacggagatcctaagctggctgtcttgtgtgcagcctgagtggggtggtgcaggccggtagtctgcccgtcactttggatcatagccctgggcctggcggcacagcagcacttgcgttctcggggctgtcgatttcctgccacctgggcagataacctggagatttccaccttttcttttcagcttgattgcatttgactatattttacagccagtgattgtagtttcatgttaatatgtggcaaaatatttttgtaattattttctaatccctttctgagtactctggggccctgcatttatgaggcacctaccttcattttgctaacgcttattctgaataaaagtttttgattccttaaagaaaaaaaa

SEQ ID NO: 99210 - DNA, 877 bp, Homo sapiens
agcggagggctcgcagctccgccggcgcctggtcccagcgcccgcggcgccgcgtccccggcccaaccatggcgtcctccgcggccggctgcgtggtgatcgttggcagtggagtcattgggcgaagctgggccatgctgtttgccagtggaggcttccaggtgaaactctatgacattgagcaacagcagataaggaacgccctggaaaacatcagaaaggagatgaagttgctggagcaggcaggttctctgaaaggctccctgagtgtggaagagcagctgtcactcatcagtggttgtcccaatatccaagaagcagtagagggtgccatgcacattcaggaatgtgttccagaagatctagaactgaagaagaagatttttgctcagttagattccatcattgatgatcgagtgatcttaagcagttccacttcttgtctcatgccttccaagttgtttgctggcttggtccatgtgaagcaatgcatcgtggctcatcctgtgaatccgccatactacatcccgctggttgagctggtcccccacccggagacggcccctacgacagtggacagaacccacgccctgatgaagaagattggacagtgccccatgcgagtccagaaggaggtggccggcttcgttctgaaccgcctgcaatatgcaatcatcagcgaggcctggcggctagtggagttggcttcagttttgggatgaagcagccctgtggtcttggaaatgccagatggacatgtctggccacaatctactgacacttacttcccctgccggaggcgtgctccctgggtcacgtgatcttattggctgggatgtcatttcaagtctacatttttaaggcattagcataatga

SEQ ID NO: 99211 - DNA, 627 bp, Homo sapiens
agcggagggctcgcagctccgccggcgcctggtcccagcgcccgcggcgccgcgtccccggcccaaccatggcgtcctccgcggccggctgcgtggtgatcgttggcagtggagtcattgggcgaagctgggccatgctgtttgccagtggaggcttccaggtgaaactctatgacattgagcaacagcagataaggaacgccctggaaaacatcagaaaggagatgaagttgctggagcaggcaggttctctgaaaggctccctgagtgtggaagagcagctgtcactcatcagtggttgtcccaatatccaagaagcagtagagggtgccatgcacattcaggaatgtgttccagaagatctagaactgaagaagaagatttttgctcagttagattccatcattgatgatcgagtgatcttaagcagttccacttcttgtctcatgccttccaagttgtttgctggcttggtccatgtgaagcaatgcatcgtggctcatcctgtgaatccgccatactacatcccgctggttgagctggtcccccacccggagacggcccctacgacagtggacagaacccacgcgtcgacgcggccgcgaatttagtagtagtagtaggcgg

SEQ ID NO: 99212 - DNA, 641 bp, Homo sapiens
cgagggtcggcgcgccgtgtgtctcccggtgtctcgggcccgcggcgcgcaccccactcagggaccaagcggccctccccgccctcccggtccgcgcgcgcagccaatgggcgcgggacccgccctccccggagcggagggctcgcagctccgccggcgcctggtcccagcgcccgcggcgccgcgtccccggcccaaccatggcgtcctccgcggccggctgcgtggtgatcgttggcaggtaaagggctccgagccgcgctgctgcccctggagcccggggagacgccggggacgtggtgccctcgcgtggggccctcggggtgggcgccgggtcgctgtccccgccccggcctccggtcctccgaagccctgcgccctgcggcccctacggcgctggcgggctcggggagaggcgcggctggaggggcttggcaggtggaggcgccccgcggagttgggtctgcttcccgggagccagcgttgcaggaggttccgaggttgaccgcccaggccgcggggcctgcggttcctggactctgttgaatgtcgccgcgtctgcccgcaggtccacatagaagtgccaggcaccgtgttgaatgaaacgaattctggctgcgatcctgcgacgactgtgttct

SEQ ID NO: 99213 - DNA, 608 bp, Homo sapiens
tgaatactcacagtgatccttctctctgcctttccagaaaggagatgaagttgctggagcaggcaggttctctgaaaggctccctgagtgtggaagagcagctgtcactcatcagtggttgtcccaatatccaagaagcagtagagggtgccatgcacattcaggtgagtgaaggacactggcgccgcatctgtggggcctgagacattgtctcccagcctctccggaggaacagggcaggatacagagcagtggcaggtgtgggcattttgcatcttcaagggcaggattttgttttatgtgataggaaatgtgatccccaaaacaccctctatcctgggttctcatcaaactagcgtgacaatgttctgtttcaagagaccaatgccttatccgtgaggccactagggattctggtgacaatgttgtattttagaggcattaacagttttagcaaaaataggttttctggactgctaatactattttattttgttttatcatcttatcaaatgacagattatattattgttctcatatgtaattgagcaaaagcttacatcatcaaaaagaaaacctttcacttgcatgtagcctttccaacaact

SEQ ID NO: 99214 - DNA, 351 bp, Homo sapiens
gaggtcatgccactgtactccaggctgcgcgacagagcaagacttagtctaaaaaaaaaaacatccctagccttgattacatgtagtttctaccaaggagacagagagtaaacagggaatatcttatacagtatgataagtactttaaagaaagagaagccaggaacagagctagagagaggctggggttgccaccatttgtggaagaggtcaaggaaggtgtctctgagagtttgtgggaatggatgtgacctgtttggagaacagcccggaggccagtgtgcctcagcccaaacccaggtggagcatgcagctgcagggaatgtcccggctttcaatgcctcttcccac

SEQ ID NO: 99215 - DNA, 182 bp, Homo sapiens
tcaggcaatggaaagagcgcatctgctcccacacctgtgagctgaacccatcatgcaatcctcaggaaagtctgcagacaagatgccccagccaaaggctgaaatccataaatccagcaagaccccagccctgaggtcagagtgggagtgacaaggaaggactcccatgaccaggaggagaa

SEQ ID NO: 99216 - DNA, 347 bp, Homo sapiens
caagggtgacaattgttagatctgccatgcatgatgttgcgaagattcaatgagctgatactgtagctgcttagaagaagccccggtcaacacagggctgtggtgaagattcaatgaactgatactgtagctgcttagaagaagccaggtcaacatggggctgtcacggagattcaatgagctgatactgtagctgcttagaggaagcccaggtcaacatggggctgtggtgaagattcaatgagctgatactgtaacggcttagaagaagccaggtcaacatggggctgtcatggagactcaataagctgatactgtagctgcttagaagaagtccagctcaacat

SEQ ID NO: 99217 - DNA, 349 bp, Homo sapiens
aaaagcatgcctgttctgtgggcatcgtagctcaaccccacagtgagctaatggagaaacagatgatattcagagtatttgaacccaacctgcaactcctcattaatgtatgtcttcctctacttgattttccatacccccacactgctgaggaggctgagttttgagaatggacacaggaaagtagacggctgattgaactatctttgaatacattgcaagatcagcaacatgagttggggaattaccagcacctgtgatagaggggcgtgctttttggttagacagcaacttgccttaaaatacagtagaccttaggccactgaagcttaactttcagccacatcat

SEQ ID NO: 99218 - DNA, 262 bp, Homo sapiens
gcggccgcctactactactaaattcgcggccgcgtcgacctgaattttacactttaaaattgtgaattttagaggctgggcatgttggctcatgcctatagtcccagcgttttgggaagccgaggcgggtagatggcttgagttcaggagttcgagaccagcttaggcaacatagcaaaatcccatctccacaaaaaatacaaaaattagcctggcgtggtggtgcgtgcctgtagtcccagctgcttgggaggctgaggct

SEQ ID NO: 99219 - DNA, 556 bp, Homo sapiens
agggtttggtgtgggaggattctctgagtttggaaatagcgcttccaggcatcactccttcaaatgcaaacgttcaccttctctctaagagaaacttgcatgtggattcagtgccttcgtttgactaaaaattacgatacaaacaatattaacatttactagacttttttttccctactttcctcctataggaaaggaagatgtgctagggcatttacttagatgtgggtcagctggcgctagtttgtttaaggagttcctgctgtgtgccagtagcttttccgggccctagggtccttgctataaatacgttagccctgctgggcttctgaactaagggagctaaatgcttccagcttccttagtgaggcagcacggtgctgtatgcttaaatccaaggccgtggagtctgacctgcgtttttatctaaactgtgtaaggtgctggccctgggtggtttggcctcgatgagtgttaaatcgccatttaatgtgatgtcaagaaataatttggaagcacctccttgtaagatgacagagccatttaattttgagaa

SEQ ID NO: 99220 - DNA, 176 bp, Homo sapiens
atgtacctatccttgtggcccaggatgtgtagagggtctttgggtttctggagacttgctgctctggaagtgttgctgaacagggtggcagggatcagcccagttctgcttcttgtcctgggtcacactcctagtggtccttgtcatcacccctggctgcctaggacccattctgg

SEQ ID NO: 99221 - DNA, 376 bp, Homo sapiens
catcttagttcatggtaatctccttggcagcacttattgtctttgtgtgagagcaaatgatagagtcatccattcaagttaattaagagcatctgcattgcaaaactggtcactaaattgctcgccaaatttgaggcttttttcctgccaacacaaattaattttttaagtagcagcattttcaggagagaccaaataaagaaagcaacaataaagttgcctgtctagtgagatgtccccaaactatcaactttaaacatacctttgccttttatagtagttcttcacacaaactgccttaatcaaaatgcgtgtctcttgctctgtcattttatgttttgctcttagcaactaattgtatgttagacagattctt

SEQ ID NO: 99222 - DNA, 512 bp, Homo sapiens
atttcatgcattttgcctctaaaagtctagacaaccacctacttttcaggctgcattcatcagtgaaaaattactaatatcccttatgctgatgaacactctggcgtatatttagataagtgtttaaagcatcttcctagccacctgattgaggtgcttcaaatactaacttacccccagaacaagattgaagttaaattacacagcacacatccattacacagtttatatttgaagtattttaaagtaaattattgcataataagtaacagtcagcaataaattctcccatcttttgcattactttttttaaaatctgattgaaatggactattggcctctatctattctgtgcattgaacacttaaaggcatgatggggctgggttccgtggcttacactgtaatccgagcactttgagaggccaaggcaggaggatcactcaaggccagcagttcaagaccagcttgggcagcatcgcaagaccctcccccgtgcccatctctactgtc

SEQ ID NO: 99223 - DNA, 160 bp, Homo sapiens
tcaggcctgagctgaggacactacaggagccaaattagagaaggggcttgcagtcctgccatattgcatattcatggctttcttgtcccctcacccccagtataatcctttttgccaggttaacaactcactaatttcaaagcaattcatttgccaactc

SEQ ID NO: 99224 - DNA, 443 bp, Homo sapiens
tcccctcttcctggtttgtatgatattttcacttccgtgaatttactgaacctctgttcacctccctctatactccttcattctctctttaaaatgcacagtcacttctgtacaaattgaagttgttcagttcacactgaatagttctctatagcaatagtctatcactcattaaaatctctccttgccactttagtttccagctttatctttgacaccctcactatactgcagtctctatgagctggatttttgttttctcactggcacataatagagactcagtaaatacttgctgaaccttgttgatgggtcaagagtggtgcatgggttttagcccctcagccacacttctgggctgggataagcatgtttaagcatctggatgaaacatcattgctcatttcactccttaaatacctggcaagtgacaggcagctgga

SEQ ID NO: 99225 - DNA, 274 bp, Homo sapiens
gacttaaccaaccccatggggcaactctgaagttgggcaggcccttcagagttactccaatggggcaagtcagccaggtctcatacttgaccttctaactgactgtcgctgagtggaggcagttctgggaagggttaggcctcaggcaaggtggctctccatggaaatcaagctctggagtggggttgggttgtcagtcaccaacactctcagcagctggggaaagggtgccttggtcccagagaatctgggtagtgactatggcgtccattac

SEQ ID NO: 99226 - DNA, 971 bp, Homo sapiens
acaagatgaattttgttgttattcacaagggttattacatactgcccagcactgttgaggcagtctacccccagtgctgccaaggagccaagtgccccaatacaatttagtaggctactgtcactgtaaaatgatgggggaaccataattggtgtggaaacactgggttactagggagtgaaggagactgcagcaaactagatggaatgtgctccttgtaatatgttctagtaattgtgcaggatcagtgtgtacagacattcttagaatttccaggcatgtgtattttttgtagctgaggtgactgtcaaaaaataataaacaacctaaaggttttgtgtattccaatagcctttctgggatgtgcacctcaagaacattgctgcataggccaggaaaacaagcatagaaagaaggggcgggggatgtccttccaggaatgtgactttgtaacctaccatcatcctgtgtttaaatgaattcaaatcagtttcattgattaccagtatttgctgcccactgaggcaaggtgtccctccaaggtcatcaggaaagagagttaatgtagggttaccaaacctagtcaaaaacacattataccatcattataattattacaatgaacatatcagtcacctcggatttacctcaggcctttttctaagctctccctcccctctctggccctcaaggcaaccattgatttataccttcatttataataggtttgtttgtattttctataatatatgattttattaataaaatgtctttttttccagtttcattcatgatgcataattattttgagattcttcaatggagcttatatgtggtggtcattctttttattgctgagtggtatattttttatggatatactatttgttatccatttgtttataagcatttaggttttatctagttttggctattacaaataaagctgctagaaatgtaaaaacttcata

SEQ ID NO: 99227 - DNA, 1184 bp, Homo sapiens
acaagatgaattttgttgttattcacaagggttattacatactgcccagcactgttgaggcagtctacccccagtgctgccaaggagccaagtgccccaatacaatttagtaggctactgtcactgtaaaatgatgggggaaccataattggtgtggaaacactgggttactagggagtgaaggagactgcagcaaactagatggaatgtgctccttgtaatatgttctagtaattgtgcaggatcagtgtgtacagacattcttagaatttccaggcatgtgtattttttgtagctgaggtgactgtcaaaaaataataaacaacctaaaggttttgtgtattccaatagcctttctgggatgtgcacctcaagaacattgctgcataggccaggaaaacaagcatagaaagaaggggcgggggatgtccttccaggaatgtgactttgtaacctaccatcatcctgtgtttaaatgaattcaaatcagtttcattgattaccagtatttgctgcccactgaggcaaggtgtccctccaaggtcatcaggaaagagagttaatgtagggttaccaaacctagtcaaaaacacattataccatcattataattattacaatgaacatatcagtcacctcggatttacctcaggcctttttctaagctctccctcccctctctggccctcaaggcaaccattgatttataccttcatttataataggtttgtttgtattttctataatatatgattttattaataaaatgtctttttttccagtttcaaaaaaaaaaaaaaaaaaaaaaaaaaaaaaaaaaaaaaaaaaaaaaaaaaaaaaaaaaagaaaaacaaaaaaaaaaaaaacacaaaaaaaaaaaacaaagaaagaagcaacgcaacagacgacctgacgcagcgtgcacggatcgaggggcggaaggagagacgagagagacaagagtagagaggaaaacgagggagcagggcacagggagagcgggaggaaggaggcggagaggtcgaaaaaggaggaggggagggaaggaaacagggagagcgatggcagggcgaggagacgcgagagacgcccaggagagaggagacagaaacagaggaggagagatgagcgggagtagacacaaggcgatgggaggcgggaggagaaggaggaagaagagagag

SEQ ID NO: 99228 - DNA, 321 bp, Homo sapiens
aatgcatcacagggaggcatagagagctggtcattagataattgtgtggcatactgtaaaacaaaatgtttattttcaaagcacttttgaaaggaaattttgtctgtaagtactcaaaatatggacagttaatttcttatgtaagaacttgggaaattataatatcatgaattaatacttttccagacaaaaacaacaagctgagaagtcattttgcggatataagactaggaaaaatagatttatgtatatagagcctgaactttttctgcatctcctcatttctttttttttctttttctttgttttcttttctctttt

SEQ ID NO: 99229 - DNA, 2310 bp, Homo sapiens
  misc_feature (810)..(810): n is a, c, g, or t
  misc_feature (812)..(813): n is a, c, g, or t
  misc_feature (919)..(919): n is a, c, g, or t
ctatagtcaagctaatgacccatgtagatgtagtgttgtacctggtgtccgtgtccctgtgaatgtgtcatgttgtgctggcctgattccccaacatcagccccagggagccagcagctggagcagctgtcatcttgtgaaagcagagtgtccttgttgctattgattgggttgttcagtcaattgcaaaaaaagtggatctaactgtcaatggtagttatatgataatcctggagataaataagtgtcaagtgaagtattacttgaatttaggacctgaagagagagaaaggggtatgagtagttggaggggaagatttgctatgacaagctattattcagtgtggttattttgtatgacaggtaagtctacaggtatcttttgttagataaaccagaaattaagcattccctttgtaaactccaaacaagattttgaaacaccatggtccccccttatccacctccaagatctccagtggatgtctgaaaccactgatagtactgaagtctctatatattatgtttttcccctgtatgtaatacatacctgtgataaagtttaatttataaattaggcacaggaagaaattaacaaaaataagtaagaatagaacagttataactatatgttctattaaaagttatgtgaatttgttttctgtctctctcaaaatatcctgttgtgctgtgtgttcacccatttttgagctgccgttgactgtggataacaaaccacagaaagtgaaacttcacataaagggggactactgtattctcataatgttaattgcttctagaattcacaangnngaattcaacttgaatcttgctaaagaagtactttattattcgatgttagtccagcaacaacttatagtgtagaaatttgcccttttgagggtgaatacacaaaggngaaagaaaacttgtgtgcccacggtccactaacagataagcttctggaggccaggagtaaaccgccctgcaggggagccatctcccagggtttccccagcagagagctgtgcccagtgccggggtctcatgcttacctatttctctgtgccagtatagtagacctgttttcaagcctagcatgagccttaagtattactggctgggagtggtggctcatgcctgtaatcctagcactttgggagggtgaggcaggcggattgcctgagctcaggagtttgagaccagcctgggcaacatggtgaaaccctgtctctactaaaatacaaaaaattagccgggcgtggtggcgggcacctgtagtcccagctacttgggaggctgaggtaggagaattgcttgaacccaggaggcagacattgcagtgggctgagatcacgccagtgcactccagcctgggtgacagagcgagactctgtctcccacaaaaaaaagaaaaaaaaaaaaagtattacttatttagtaagtccatagcattttgttcacacagtgtatcattgtgcttttctgtttcaaagtgtaattatttaatctagaaattttaagtcctgtgacagaaaacaaatgctgttctcacaaaatatgagaaatcaaattccatcttattatttaaattaattcttttttaactgaagaattgttatgtgggtagctttcaacataattttttcaatattagatgcttataactaatgtggatttagttaattcgatgtttatcacatttaattcttatttactacaaaggttaaagcaattttatttcttctggaaacttttaggatcttgtgagtgagggacgtcagccaaaattggcaactttttcaagcaactggctcaagaaattaggaatttctctaataatgagccatcgttttttgaattcaacaatttaaaagggctgtatagttaggatatgattccagtttcccctcagtgcaaattgatatttttttctgttgacacattctactttgttttcgaagactagtttatagtgttcttttaaaagcaaagaaaatatctttaaaaatcccagctttttggctgggtgcggtggcttcatgcctgtaatcctagcactttgggagggtgaggcaggcggattgcctgagctcaggagtttgagaccagcctgggcaacatggtgaaaccctgtctctactaaaatacaaaaaattagccgggcgtggtggcgggcacctgtagtcccagctacttgggaggctgaggtaggagaattgcttgaacccaggaggcagacattgcagtgggctgagatcacgccagtgcactccagcctgggtgacagagcgagactctgtctcccac

SEQ ID NO: 99230 - DNA, 401 bp, Homo sapiens
aacgggtgatgcggttgcgtaggggaagattcctaatttctgggccatggatcctgttgctcatgctggagtgcagtggcctgatccaaggctgccaacttcacctcctgggttcaagcgattctcccacctcagcctccgaagtatctggcatgacaggtgcttgcccaagaacctggctaatttttgtatttctagtagaggcggggtttcactgtgttggccaggtttgtctccaactccatatctcaagtgatccatttgccttggcctccaaaatgcttcttgtctcatggggtacggcttgcgtaggggaagattcctaatttctggccatggatcctgttgctcatgctggagtgcagtggcctgatccaaggctgccaaccgcatcacccgtt

SEQ ID NO: 99231 - DNA, 730 bp, Homo sapiens
ataatcaggaccaagacaccctccatgagctcaagggagagaagtaacagccagttgcaataaatcatccataagctcaagatatacggccatgcaagaagggcatcttctttgttgggttaaggtcatgacccaagcagaaatagggaaaaggcaaaataaaaagattttatatcattaggaaatcgataatcaatgctttctcttgtcagaagaacatatttttgaggaaaactacaggtagaacaaattggtttaaatatagaattcaatggtaagaatagaattaaaaaatagactggataattaagcataggtcagtacgtaaaggattaagaatttgtattttcttaccaggccaatggaagttaagacttacaggtgagtcattgtggagatctgaatgcagtgaaaggttaggggaatggagaaaagtctagagagtcagcaattatcaggagacagaagaaacggagactgttgactacttgggtatgggagccagatacaaagaaacacaaagaagaatacacaatttctgtactgagaaacttcaaggcaatggtatctttggttgatagggaactcagtataaagaacctgttccggggagaaaatatggagtctgattgtttcagtgtagagtttaagttgcctatgaaacattcatttggaatgtctaagaaggtgtatatttctatggtgtgtttactttcagaatagaaacaat

SEQ ID NO: 99232 - DNA, 370 bp, Homo sapiens
gcattttattcaaattcctctgatagttctctagtagcaggttttaggatactgttttgatccagatttctgttaaagatttagatgaggccaagcagggtggctcacgcctgcaatccgagcactttggaaggtggaggcgggcggatcacttgaggccaggagttccagacaagcctggccaacatggcaaaaccccatctctactaaaaatacaaaaattagctgggtgcagtggtgcttgcctgtagtcccagctacacgggaggctgaggtatgagaactgcttgagcctgggaggtggaggttgcagtgagctgaaatcgagccactgcagtccagcctgggtgacagagtgagactctgtctc

SEQ ID NO: 99233 - DNA, 176 bp, Homo sapiens
ttgagacaggctggagtgcagcagtgtgatcatagctcactgcccctcaaacttctgggctcaagtgatcctcctgcctcagcctccggagtcactgggattacaggtaccaggcaagaatacccacatcaacaattggaagcagtctcgtggagtgctgtggaaaggcggtggat

SEQ ID NO: 99234 - DNA, 152 bp, Homo sapiens
ttttagagaattggagactggtgcaaaaggagatgatcaagaccatgagtggggagactagtgcctttttggtgggcaaggaagaagacaggtggagggaataggcagttgaagtttaagtttcagaaaagatggaacctgggcagttagat

SEQ ID NO: 99235 - DNA, 283 bp, Homo sapiens
cagatctgctttttaggaaaatcactctggctacgtttggtgtgtcatacaatttaataggtcatttccagtacctttttctactgatgtattaaaaactttattttgcaataattttagacttacagaagtgttgcaaagatatacagaaagtgcagtacccttcagtcagcttcctctaacaataacttatgaaacttttttttttttgagcctcccaggttcaagcgattctcctgcctcagcctcccaagtagctgagactacaggcacttgccaccac

SEQ ID NO: 99236 - DNA, 714 bp, Homo sapiens
agcagtggcaacccactcgggtccccttccacactgtggaagctttgttctttctctctttgcaataaatcttgctgctgctcactctttgggtccactttgcctttatgagctgtaacactcactgcaaaggtctgcagcttcactcctgaagccagcgagaccacgaacccaccgggaggaacgaacaactccagacgcgccggcttaagagctgtaacactcaccgcgaaggtccgcagcttcactcctgagccagcgagaccacgaacccaccagaaggaagaaactccgaacacatctgaacatcagaaggaacaaactccggacacgccacctttaagaactgtaacactcaccgtgagggtccgcggcttcattcttgaagtcagtgagaccaagaacccagcaattctggacacagtagtttaccagaaaagaggggaaatggcttccaaggcagaagaaacagtgcaggcacagacatggaggcatggaagagtgcagagtgtgtgtgaactgttgggtgtggccagagcatagtggacctgaagcaaggtggagaggagtagttgtgggcaagatagagtttatggggggctagtttctgatggaacttctaactttcctcaaagatggggccaccgattagagactcaacatggcaggagtcactctattcctttcaagagatggttctaattactactcctg

SEQ ID NO: 99237 - DNA, 299 bp, Homo sapiens
gatcgactcgagccggtaccatttgtcgttattttctacctaattgaattatgatctgaaaataatctctgtactatattttttgagggcagaatttattgagggaaaaactgctacagttttcctttaagtgcccatggaaaatctctctacataactctctgtgatatgtatatatgtgtgtgtatatacatatatatgtgtgtgtgtgcatatatgacacatacattataccttgctgattatattatttagattataatttatttatatttacttttaatccacttaatctgtca

SEQ ID NO: 99238 - DNA, 331 bp, Homo sapiens
tggatggaggaagcaaagatttctctacaataaagtttcatagacagctgtataccaggctgacacttgaggccaaaccttgtttttcacagtgctgttgggagtaccactgccctatcagaagctgagagaagggaggtatattaggccattcttgcactgccttaaagaaatacctgaggctggacagtttataaagaaaagagatttaattggctcacggttctacaggttgtacaggaagcttggcaccagcatctgctctgcttctggggaagcctcagggaaattttactcatggtagaaggcaaagcaggagcttgcacttcac

SEQ ID NO: 99239 - DNA, 247 bp, Homo sapiens
tcctacaataaactaacacctgcaaattatgtaacaaaaaatgtcactgagggtttgccaacatcatcaaataaatgtccatcaataggtgaaatgttaaataatggtatatgtatgatgtgtgtaaattgtgtgtacttaatggaatactaaataattttttttaggaatgagacttttctctggagtgcagcggaatgatcaccgctcactgcagtctcaacttccaaagctcaggtggtatcag

SEQ ID NO: 99240 - DNA, 926 bp, Homo sapiens
gctagggtacattggcggtttgattacatccagatatctctctctgtgcacaggaatgaacagcactccagatggtgcagctccgtcagccttgatgcccaattgtacacaatgaatggacttcccacctggctatatgttatatgctcaaacaagaatgaccatacagcattaatgacacatataactgctacttacagacaattggatttgtgctttgtattttatggatgtataaacttacccaggctgtctgatccacccccttctcacatttagtttaataaaaaaattagaagccatcatctaagaaacccatgcaatccttgtttgtctctgaagcatccatgtatcttccattctgtgtgaatttaatgtcacctgtactcctggttttacttacttaattctcttggcaccctcattttatcattgtctatcttatctatgtaacccatcccttctattatatttagatgactaaaagtttgtttctggaactctattctgtttcattgttctattggtttatctttgcaccaatcccacattgtttcaattactctagatttttgacaagtctttcaatatagcagtatgtttaagtaaattatcaagcttagggttcttttttaagattttttttttggctatttttggccctgggtattttcatatgtatcttagaaccagtatgttgattttggcaaatattattattctgggtgtggcctatagttgaatttaaaataagcatctttatatcattggattttctagtatatgaatgtaagatacattcttatgtttactttgctcctctttaatttctctcatcaatgttgtgtaattttcaggtactgacctttcattttattttggctgtttaaggctttggtgttttttgtagaactgtaaattgtatt

SEQ ID NO: 99241 - DNA, 717 bp, Homo sapiens
cagggtcccctttctggattcctcccctttttttctctttgccttaagggctatacataatccataaccaagtagaactgaaaacagacaaaagcactcctcttctagtggatagaaatctggaatccagaaatgcttccttcttgccaaacctcaacttgttccgtgccttttttttttttttaaatgcctcttcccagcctccccaccctttcgtgatttggctgagtgaggactagctgtttggtttgccttttatcaacaatagatattcactgcttttcaggtcacattttcctttaactcttctctgtttatgagtatcacaaaagggttcttcaacatcaaggcaaaactcacactcagaatactttttaactgtggatattttgacagtatgaaacggaagtcagtggtgaagactttcgttttgaagtgacttaggtcttacatgactcaaagatggttttcctagtagtataccagcagagttgaaaatgactctgaaattgaaagtcccatactacttctaagaaacttgtaaaaagtgttggccaaatgctacaccaaacattttgcattaattattctcttaactcttcaaaacagtcctttgcaggccaggctcggtggcttatgcctgtaatcctagcacctcgtggggccgaggtaggcagatcacatgaagccaggagttcaagaccaacctggccaaca

SEQ ID NO: 99242 - DNA, 883 bp, Homo sapiens
ttccgttaggctgctggagctgtgggtgccatcttgccacgttggaggaagagcccacctgagaatgacatcaactcagagggaagtcagcagagccaagaggccgggagagatgattcctgatgacatcatccggttcctgggtgcagccatggtagagttggcctcgaacgttgtccctggcatggaggtgaccagaggccaccctcacatgtcagcagacacctccagccgtgtcattcgtgttcctggttagcaaagtttgtaggggtagtattctcagttggcattcctagctgagatgtgtagccgggaggtcaccacgctgcagggccttggaaccacttctgcctccgaggagtcccttactgatgatcataggctcctcaaggtcatcagccagggcagctttgcagaagtcaaggcagctggcccagcacattctcactgggaccaagatggctgtggaggtcaccccaacagggcagcagggctcctgcagcccccagggtctgtactgcagggtccatatgatgaaggcccttaatcacccgaagatcatcagacccacgtggctggcaccgagaacaggctgttcctagtcatggattaagccagctcgggagagctatccgacttcaccctcgaattcttcttgaagggggaagaggcctgaggcaagttccagcaaataggatattccatgcagtgaggcttccagaaggaaattatccacagggatctgaagtcagagaacttccctgaaggaggctcagcacgacatggaaacaacagacgctggctttgataccagattcaccgtaggctgaaagctgatccccttcggtgggagctcctcttatacagcctcagaactgttccc

SEQ ID NO: 99243 - DNA, 394 bp, Homo sapiens
ggggagtacacgtgtcctggagcctggaacggccatcactagcaagaataggccactccagcggaacagcgtcagaaagtccttccctccaagtgttgcaagttctggaatctctgaaggcacacctacgcagagtgttcttggctcttcctaaagctgttatcaaatcatatcttggccattggaggcggctctggacaaaaagtctttcggccacctacttggcagctagtggttttaaatttcacattttgtgcccagaagcctgcaaataccactgcaccctcagatgatacgttggccttcctgtaacctatagccagcagctgtgtcctccgactttggctttagacacccatcctccccagggagcaaattccagaacggagggtgg

SEQ ID NO: 99244 - DNA, 1050 bp, Homo sapiens
attatccactaccacacactcaagaccaacctgtgctccggaaaggaatacgtgcctgtggaaatagacagagcttaagtattttgtaacctggtgaacatactgcccaaagccacacgtttcaggaagattagctcagaaatgttcaccaattgactgaagggcagtggcgggtgaggtgatgggacagcctcagggctgcacatgaggagggctccctcccccatgcaggcttttcctccaggagctgcatcaggacctcaaggaagatcagggagaattctgagaacacccttctgtggagctgcctagagaagaagaataaatatgaaaaaatacaactctgagtaatgcatggatatttgttcatgaaaactctctctgaaagcttgtgaaggtctcgaaatacccctgattagctgaagacaaacatttaaaccctccttccacagggagttcaagcaggctggatgtgtccttctatggatgatcttccccaaccccttcctcttcccagctcatccctggctctctgtgtaaacagttctcatcagtggaatgtggttgatgaagtgacgtcttcaatttcctcatcttcttggtggtcatgttattttttttcatctgagggttaaaaactcacctgcatgcagcacatgacaggctaaaatctcttgtggacaaaacggtaacaaaggcacccaccagggttgagcatccgtgttgctgacaacgaccaccaggggtcaacgtcctcttcacaatcctgtgtcagagcatcactggaatgatttcattagcaacttcccaggagaatcagcttaaaaaatacttgtcccattttccatgcagatataacccatcccttttcctgaagaaacagagctcaatactaaatacactgaatgttgtttttgctggttttgtaagtttgtgactttatcactttctaatttctgagttaggtggaccactctacatatttctctcatgggtgtgaccagccttctggatgtcaaatataactgactttgttcgtgtaaatgtcaa

SEQ ID NO: 99245 - DNA, 606 bp, Homo sapiens
cgagggttgaaaggttcaggccgcatctgtatttattctgtttggtgttctctgagctcttcaatcggtagtttgatgttgttaaatatttttgaaaagtattgtctccatgtcactcttaactatagattatgttgtgccaataacaccatttgataacacaactttcatgtactttcacatctgcgtcagcacaatattgatgaaaagagcagtgcactgatagtcttcctgcttgggttataaggctgattataaaaaaacctgtgaattttttatcaaactactgtgctctcctagccctcagtgacttcactgatgtgagagattatatgaggtgattttttaggctcttctaattcaggaagtagtctaaaaattaggaagcaaattgcataaactaattgatactaagtcatgaatggccatttctggactttaatagtcattttcattttcaaagaggaagtaccccaaggaccaaatgactcactaattgaggcaattaaagctatacaatcaggggaagaaaagccttcaagcaaccagaaattatactatcacttatttcatccatagtaccagtcctgccttgttttctctttt

SEQ ID NO: 99246 - DNA, 407 bp, Homo sapiens
accacacccggcccaggtgtttttcaatatctaattatgcataaaaaatgaatgcagctctctctcaaactgttcattgaactaaattcttccagaacccaaagtaaggaagatttgcttgaaatctgattaacagtttatagctctaatatgttaataaatcgcacagctttttttttttttacacgattaggggagccagttaatacacgataaatggcaatgacataactggggctccatgtgccatcaaaatttggggtgctaaatcaataaatacacagacacttggtcactggctatccttaggagcctgtggctatgttgctggatgcttatgttctgtaatcctaaaatacataagttattttgatgtaccctgtattggtgacttctcagtgccctca

SEQ ID NO: 99247 - DNA, 637 bp, Homo sapiens
  misc_feature (629)..(631): n is a, c, g, or t
  misc_feature (633)..(636): n is a, c, g, or t
ctgaattggttttaccatgtgtgtaaagactgttgtatgatttttgtagcacaacccttgaatacataaagcacgattggctccccagaaggcaggtgttggccaggcagtggatgcacggtagggcagtgtgcagccctgcatgcacgtggctggtatgccctgcgggcagcagctccccgcacacagtgctgtgagtctctggttcatgtcactctgtggagcaggggctgctccagcacaaagaggtttttgacagggaaaggcagagccagagtcagggcaggccctgggcgggctcctagagagcccaaccaccctctaataaggggtgctctccaccctatctgaggagcaattgggatctcctaggaagtgaaactgttacgtatgtcttattacagaatttccagtggagtgattctggaagaaatgtgtatggcatgttgtgactgctatgtctcatgaaatatttacgtttttatgtaacttttttccattttcagatcatcttttattttaacgcaaaatgacaatatatttttcaattaatttgcccaatatctgtgtttaaatgttttctaatgcacacacgtgttttaaactcattaaaaaaatatgacttagannnannnna

SEQ ID NO: 99248 - DNA, 217 bp, Homo sapiens
gctgtatccagcagagaggcaagctgtggagcctctctgagacacctgtggagtagggggggtctcagcaactcgccgtaggattgggttagggatcataagatgcatatgacaggtacacgctgtaaacaagtcaactgatgatatttttaaattttcttaaataggtcatttcccacatttcaggttctttcctcaaatctcaaaaagggaagaa

SEQ ID NO: 99249 - DNA, 552 bp, Homo sapiens
cttttaagagctgcatggatttggagtcttatcctcactagaagagaggaatgcacccaatggaaaagaggagagcaaccaaagtctaagctaagagcatagtttcataaagtatttcctctggcattcatagtttttgtggacacacctgatacctgaaaaaaacaatctgaatatccaaaacatcattcactgttaaaatccaggaaacatccttggatttggcacaattatggacagcgagaaacttattattggaactgtactgaacctttagctcaatatcaagttcaaaacagatacaaagctatgagcctgtatatgcagagggtagatcacacctggaagctactaacaatagtccaggtgcagacatccagaggacaactgaggacatacagtggacatggagaagagggagaagattcaacctatacataacaagcttagactcataaactcagcagtgaacacgtgtcaactccttgcgggagaggaagatgaacgaaacaaatgccggacatggagtgaatgaacactgaaaccagccag

SEQ ID NO: 99250 - DNA, 753 bp, Homo sapiens
  misc_feature (519)..(519): n is a, c, g, or t
  misc_feature (527)..(527): n is a, c, g, or t
  misc_feature (529)..(529): n is a, c, g, or t
  misc_feature (541)..(541): n is a, c, g, or t
  misc_feature (553)..(553): n is a, c, g, or t
  misc_feature (557)..(557): n is a, c, g, or t
  misc_feature (561)..(561): n is a, c, g, or t
  misc_feature (583)..(583): n is a, c, g, or t
  misc_feature (586)..(587): n is a, c, g, or t
  misc_feature (589)..(589): n is a, c, g, or t
  misc_feature (595)..(595): n is a, c, g, or t
  misc_feature (599)..(599): n is a, c, g, or t
  misc_feature (603)..(604): n is a, c, g, or t
  misc_feature (608)..(608): n is a, c, g, or t
  misc_feature (623)..(623): n is a, c, g, or t
  misc_feature (627)..(627): n is a, c, g, or t
  misc_feature (632)..(633): n is a, c, g, or t
  misc_feature (639)..(639): n is a, c, g, or t
ctgtctgaagacctcgttaaaggtcctcacaataactaactgtgtgcttttggaatcagacttgaagcatctatcccagtgcccgagtatcagtcaactaaagaccctggacctgagtggcatcagactgaccaattacagtcttgtgcctctccaaattctcctagaaaaagttgcagccacccttgagtacctggatttagatgactgtggcatcatagactcccaagtcaacgccatcttgcctgccctgagccgctgctttgagctccacaccttcagcttctgtggaaatcccatctgcatggccaccctggagaacctgctgagccacacaatcatactcaaaaacttatgcctggagctgtatcctgccccccccgggggagttatggtgctgatggtactctctgctggagcagatttgctcaaattagggctgagctgatgaacagagtgagggacttaaggcaccccaagaggatcttgttctgtactgactactgccctgactgtggnaacaggtnantttatgacctgnaggcaatcaatnctgntgtnaatgcctgccttttggatggtntgnnanacgctntttntggnnactnggaaactaaaacctnggcntaggnnctcctnaagggagccccaaacgatcatgacacactccgctctgcaagtggtaatgaaacctgttcacataaggtgcagacttgggggtacccgccactagattccacggtacttaggact

SEQ ID NO: 99251 - DNA, 323 bp, Homo sapiens
ctctagaggatccttacagggagagagaactgatgtaaatgaagccaagcagaggcatgcagaactgagcaatagggagagagagatacagtcccactgccactatttgcacccctggatctagcgggatctgttgtgtgagctggtaaactctcctttatgccaacactactgtgaatgaggttttgtcccttgtgatggaagcaggtctgactgatagagattcccagagctgagctcctcactggatcaaagggtcaaagagcatctgaaggctcttcgtacactgtgttaccagattgtgtggtggaaagattgtacca

SEQ ID NO: 99252 - DNA, 310 bp, Homo sapiens
tgaaatgtggccggtagttccccaggagtaaacaatgtggtggtgcccacgggggaagagcagcttaattatgcacccagccccgcatacaaaacgctccctccatggttagaatttgctggggctaagggagtcagggctggttttctccagcagccttggagctaggtggtgtcatttaaatggccctcaaagccctacctggatgtcttcattgtgccacaccagcctttatccaagctcactgggccccacagtgtggctgatagtgagggtctgggggtggggatcgtgaggtgagggacagcaa

SEQ ID NO: 99253 - DNA, 786 bp, Homo sapiens
  misc_feature (786)..(786): n is a, c, g, or t
gtatttaccacaattaaaaaaaattttttttaaaaagggaggcagtaagatcagagttagtgatgatagaagcagaggtcagagagagagcgagcattgaagatgctatactgctggcctcgaagatggaggaagggaatacaagctaaggaatgcaggtaacccctagaggctggaaagggtgggagaacctcctctcctacagcccctgaatgaatgcagcctgccaacacctccattttagcccagtaagacagtttctggatttctaacctccagaactgtgagatactaactttgggttaagtcgccaagtttttggtaatctgttagagcagtggtaagaaactattactaaggactattcagttcagagaggttaggaccttgtgcatggtcacgaagtgactggaactctgattaagagctggagctggccaggcaggatggctcacacctgtaatcccagcactttggaaggccaaggtgggcggatcacttgaggtcaggagttggagaccagcctggccaacatggtgaaaccccgtctctacttaaaaaaaaaaaaaaaaaaaaaaaaaaaaaaacccgggggcccttaaggcgcggggggcgcggacaacaacagggggtcaacagcgacatgggggccacagggcgccaaacacggtggtctccggagaccccagtttttctttggcacaacgcggggaaacacccggcgggatcccccaatatagaggggccgaaataatcgcagatacgccagtgtaacccgggtaaggn

SEQ ID NO: 99254 - DNA, 434 bp, Homo sapiens
  misc_feature (135)..(135): n is a, c, g, or t
tgctagaggtctgtgtcatcccttgaactatagagataatgcagaaaaatgtcagctaatcctttatttctctggactgttctggcccacaggacaaaattctacagtggtgaaacgagagagaacaacagatanatacactacacttcagaccaagctctcaccaaaatggtggctgggaaataactggagacagaaccaccaagattttaagagatcataaactgggtagcttataaccaacagaaatttatttacacagttctggaggccaggaagtccaatatcaaggcaccagcaaattcaatgtctggtgagggccagttccatcttgctgtgtcctcacatggtgggagggatgaacacactctaagcccattcatgagggctctgccctcctgacctaatcacctccccaaagcctcacctctgaa

SEQ ID NO: 99255 - DNA, 770 bp, Homo sapiens
tcctgctcccgtgacgtgccctccctccttccgttccccgtttccccttcactacccagggctggagcctgaacctggcggggccccccgtgaatggaagagcctgggccacgcgaaggtggaccccactcagcctccagccgtgccctccacgccccagacaccgccgtcttcggaggcgactccgcggtcgtgtggacggggtcccatttggactccggggtctgcaggatcggcaggaaggactttgctctctgctgctgggcggggaggggtacgctatctgccgggactccctaaccctttagaaggagcaagtgcgtccaaatggtttgaaagtggacctttattgttttccaggagtaagaagatagaacagttgaccagttttgtttgtaaaacttctttccttgcctcggacttgtgctataaagtgaccagggcgtagtgagtacagttagtaccgcacacgttagcacgctcgaccttaacgatctttttatagagacaataaacctgcagcgtttcatgccacgtctttgtacgcatcggatgtctctccgtgtagttactaggtgaaatcctcttggcgtgcgcaaattaggttaaaaaaatagctgtcaaacctgagacaggagttggaggagtagagggtggcgcttgttaagtgaaacatttaaccaggaatggtattgtgtgccatcctgtattaaacaatgtatggacagagtggaacaacagcaaagcaaaaaataaaaattttttaaaaa

SEQ ID NO: 99256 - DNA, 611 bp, Homo sapiens
  misc_feature (10)..(10): n is a, c, g, or t
  misc_feature (12)..(12): n is a, c, g, or t
  misc_feature (36)..(36): n is a, c, g, or t
  misc_feature (41)..(41): n is a, c, g, or t
gcatgcacgngnagtaagcttgatcttgtagagcgnccggntatactatatgctggagaagacgacagattgatcggcaggaaggactttgctctctgctgctgggcggggaggggtacgctatctgccgggactccctaaccctttagaaggagcaagtgcgtccaaatggtttgaaagtggacctttattgttttccaggagtaagaagatagaacagttgaccagttttgtttgtaaaacttctttccttgcctcggacttgtgctataaagtgaccagggcgtagtgagtacagttagtaccgcacacgttagcacgctcgaccttaacgatctttttatagagacaataaacctgcagcgtttcatgccacgtctttgtacgcatcggatgtctctccgtgtagttactaggtgaaatcctcttggcgtgcgcaaattaggttaaaaaaatagctgtcaaacctgagacaggagttggaggagtagagggtggcgcttgttaagtgaaacatttaaccaggaatggtattgtgtgccatcctgtattaaacaatgtatggacagagtggaacaacagcaaagcaaaaaataaaaattttttaaaaa

SEQ ID NO: 99257 - DNA, 702 bp, Homo sapiens
tgctggggttacaggcgtgagccacgcgcccggccaaggcccggttttagaggcactaagtcttcctccaccctgccctttacactttgaagcctatactgtatatgtcgatagggttagagaatccattccaggctcggggacccagaggcctggctgcagctgggcctggctctcactgcatccctcctggcacaggtactggtgtggcatactcggacagagaagcccaagatgaagcaggaggagcagctgcagcggcagggccggggctcagacccagcaattgaggtgtgatggcggccccaccccaactaccacctcttttcaggcacagaccttgtgggactgggccccaggcctgcccaggatgtggttttccaagtcctgacccttggagccagaagtggcccctctgcccctccaggcccagggcatggtcctgctgcttcacccctcccctagcctgccgtgtggcactgcccacaggctggggacaagcagcccttgtgttgagtcaggttggccctgtctagggtggaacagaaggacagatggacccaggagggagggcagctgagtaactgggtaacttattggggctgggcatgcactggggggctggaggagctgggctggacccttcccacctgagcatgctgacccccttcctacctccagaataaagaatctcaacctgga

SEQ ID NO: 99258 - DNA, 680 bp, Homo sapiens
  misc_feature (627)..(627): n is a, c, g, or t
tcccccgggctgcatgtaattcggcacgagggggccacctggagagcagtcttctgagccaccttgtggatcccaaggacctggagccacgggctgccaactgcactcgggtactggtgtggcatactcggacagagaagcccaagatgaagcaggaggagcagctgcagcggcagggccggggctcagacccagcaattgaggtgtgatggcggccccaccccaactaccacctcttttcaggcacagaccttgtgggactgggccccaggcctgcccaggatgtggttttccaagtcctgacccttggagccagaagtggcccctctgcccctccaggcccagggcatggtcctgctgcttcacccctcccctagcctgccgtgtggcactgcccacaggctggggacaagcagcccttgtgttgagtcaggttggccctgtctagggtggaacagaaggacagatggacccaggagggagggcagctgagtaactgggtaacttattggggctgggcatgcactggggggctggaggagctgggctggacccttcccacctgagcatgctgacccccttcctacctccagaataaagaatctcaacctggaaaaaacaaaaaanaaacaactgtggagacaatccctaggactagggacagggctgtgccggcctgg

SEQ ID NO: 99259 - DNA, 632 bp, Homo sapiens
ggccaagtaaaactaataagcgcgctcctataacggtaagcggaagtgccattgggggatggccgaccaccagggacccaaggagtcgtctactttgctgacgatgacaacacctacagccgggagctgtttgaggagatgcgctggacccgtggtgtctcagtgtggcctgtggggctggtgggcggcctgcgattcgagggccctcaggtacaggacggccgggtagtgggcttccacacagcatgggagcccagcaggcccttccctgtggatatggctggatttgccgtggccctgcccttgctgttagataagcccaatgcccaatttgattccaccgctccccggggccacctggagagcagtcttctgagccaccttgtggatcccaaggacctggagccacgggctgccaactgcactcggacagagtctcgctgtgtcacccaggctggagtgcagtagcgcaatcttggcttagcgcaagctccgcctcccgggttcacaccattctcctgcctcagcctcccaagtagctgggactacaggcacccgctaccacgcccggctaatttttttgtgtttttagtagtgacggggtttcacggtgttagccaggatggtctcaa

SEQ ID NO: 99260 - DNA, 1629 bp, Homo sapiens
caagtctacaaggcgggggggtgcacagatgaccggaagcgtgccctggcggcgctgccagccccagctgggagctggtaggggagtgcgaggaaggcgggacgcagggcggagccgctgcaggggcggggcctgcggacaggagccggggtttggggcgggaacccctcgtcccctgcagaccccgcctgctcgggcgcgggcggcggcgcggccatgaagctgaagctgaagaacgtgtttctcgcctacttcctggtgtcgatcgccggcctcctctacgcgctggtacagctcggccagccatgtgactgccttcctcccctgcgggcagcagccgagcagctacggcagaaggatctgaggatttcccagctgcaagcggaactccgacggccaccccctgcccctgcccagccccctgaacccgaggccctgcctactatctatgttgttacccccacctatgccaggctggtacagaaggcagagctggtacgactgtcccagacactgagcctggtgccccggctgcattggctgctggtggaggatgctgagggtcccaccccgctggtctcagggctgctggctgcctctggcctcctcttcacacacctggtggtcctcacgcccaaagcccagcggcttcgggagggcgagcctggctgggttcatccccgtggtgtcgagcagcggaacaaggccctggactggctccggggcagagggggtgctgtgggtggggagaaggacccaccaccaccagggacccaaggagtcgtctactttgctgacgatgacaacacctacagccgggagctgtttgaggagatgcgctggacccgtggtgtctcagtgtggcctgtggggctggtgggcggcctgcgattcgagggccctcaggtacaggacggccgggtagtgggcttccacacagcatgggagcccagcaggcccttccctgtggatatggctggatttgccgtggccctgcccttgctgttagataagcccaatgcccaatttgattccaccgctccccggggccacctggagagcagtcttctgagccaccttgtggatcccaaggacctggagccacgggctgccaactgcactcgggtactggtgtggcatactcggacagagaagcccaagatgaagcaggaggagcagctgcagcggcagggccggggctcagacccagcaattgaggtgtgatggcggccccaccccaactaccacctcttttcaggcacagaccttgtgggactgggccccaggcctgcccaggatgtggttttccaagtcctgacccttggagccagaagtggcccctctgcccctccaggcccagggcatggtcctgctgcttcacccctcccctagcctgccgtgtggcactgcccacaggctggggacaagcagcccttgtgttgagtcaggttggccctgtctagggtggaacagaaggacagatggacccaggagggagggcagctgagtaactgggtaacttattggggctgggcatgcactggggggctggaggagctgggctggacccttcccacctgagcatgctgacccccttcctacctccagaataaagaatctcaacctgga

SEQ ID NO: 99261 - DNA, 1964 bp, Homo sapiens
ggctggtactgcctcggaatttatgggatccggaagcgtgccctggcggcgctgccagccccagctgggagctggtaggggagtgcgaggaaggcgggacgcagggcggagccgctgcaggggcggggcctgcggacaggagccggggtttggggcgggaacccctcgtcccctgcagaccccgcctgctcgggcgcgggcggcggcgcggccatgaagctgaagctgaagaacgtgtttctcgcctacttcctggtgtcgatcgccggcctcctctacgcgctggtacagctcggccagccatgtgactgccttcctcccctgcgggcagcagccgagcagctacggcagaaggatctgaggatttcccagctgcaagcggaactccgacggccaccccctgcccctgcccagccccctgaacccgaggccctgcctactatctatgttgttacccccacctatgccaggctggtacagaaggcagagctggtacgactgtcccagacactgagcctggtgccccggctgcattggctgctggtggaggatgctgagggtcccaccccgctggtctcagggctgctggctgcctctggcctcctcttcacacacctggtggtcctcacgcccaaagcccagcggcttcgggagggcgagcctggctgggttcatccccgtggtgtcgagcagcggaacaaggccctggactggctccggggcagagggggtgctgtgggtggggagaaggacccaccaccaccagggacccaaggagtcgtctactttgctgacgatgacaacacctacagccgggagctgtttgaggagatgcgctggacccgtggtgtctcagtgtggcctgtggggctggtgggcggcctgcgattcgagggccctcaggtacaggacggccgggtagtgggcttccacacagcatgggagcccagcaggcccttccctgtggatatggctggatttgccgtggccctgcccttgctgttagataagcccaatgcccaatttgattccaccgctccccggggccacctggagagcagtcttctgagccaccttgtggatcccaaggacctggagccacgggctgccaactgcactcgggtactggtgtggcatactcggacagagaagcccaagatgaagcaggaggagcagctgcagcggcagggccggggctcagacccagcaattgaggtgtgatggcggccccaccccaactaccacctcttttcaggcacagaccttgtgggactgggccccaggcctgcccaggatgtggttttccaagtcctgacccttggagccagaagtggcccctctgcccctccaggcccagggcatggtcctgctgcttcacccctcccctagcctgccgtgtggcactgcccacaggctggggacaagcagcccttgtgttgagtcaggttggccctgtctagggtggaacagaaggacagatggacccaggagggagggcagctgagtaactgggtaacttattggggctgggcatgcactggggggctggaggagctgggctggacccttcccacctgagcatgctgacccccttcctacctccagaataaagaatctcaacctggaaaaaaaagagaaaaaaaaaaaaggaaaaaaaaacaaaaaagggggccacaaaagaatacccctgagagggaccacagagatacagggcaaacgcgaggtgtgtaggaacaacgggggccaccaccatgagaggcagcgagtcgacacaaaccggcggagccggcgcgcctgtccacgagcggacgcacgggaaacaaggccgcaggatgccgcgaagaggacaaccaaaccgggggaggccaaggtgaaccacccgcagactagcgccacggacacaagtcggaggcaacgggcaacacgcagctagggacaagcacagggagacaattagaggacaa

SEQ ID NO: 99262 - DNA, 1522 bp, Homo sapiens
ggctggtactgcctcggaatttatgggatccggaagcgtgccctggcggcgctgccagccccagctgggagctggtaggggagtgcgaggaaggcgggacgcagggcggagccgctgcaggggcggggcctgcggacaggagccggggtttggggcgggaacccctcgtcccctgcagaccccgcctgctcgggcgcgggcggcggcgcggccatgaagctgaagctgaagaacgtgtttctcgcctacttcctggtgtcgatcgccggcctcctctacgcgctggtacagctcggccagccatgtgactgccttcctcccctgcgggcagcagccgagcagctacggcagaaggatctgaggatttcccagctgcaagcggaactccgacggccaccccctgcccctgcccagccccctgaacccgaggccctgcctactatctatgttgttacccccacctatgccaggctggtacagaaggcagagctggtacgactgtcccagacactgagcctggtgccccggctgcattggctgctggtggaggatgctgagggtcccaccccgctggtctcagggctgctggctgcctctggcctcctcttcacacacctggtggtcctcacgcccaaagcccagcggcttcgggagggcgagcctggctgggttcatccccgtggtgtcgagcagcggaacaaggccctggactggctccggggcagagggggtgctgtgggtggggagaaggacccaccaccaccagggacccaaggagtcgtctactttgctgacgatgacaacacctacagccgggagctgtttgaggagatgcgctggacccgtggtgtctcagtgtggcctgtggggctggtgggcggcctgcgattcgagggccctcaggtacaggacggccgggtagtgggcttccacacagcatgggagcccagcaggcccttccctgtggatatggctggatttgccgtggccctgcccttgctgttagataagcccaatgcccaatttgattccaccgctccccggggccacctggagagcagtcttctgagccaccttgtggatcccaaggacctggagccacgggctgccaactgcactcgggtactggtgtggcatactcggacagagaagcccaagatgaagcaggaggagcagctgcagcggcagggccggggctcagacccagcaattgaggtgtgatggcggccccaccccaactaccacctcttttcaggcacagaccttgtgggactgggccccaggcctgcccaggatgtggttttccaagtcctgacccttggagccagaagtggcccctctgcccctccaggcccagggcatggtcctgctgcttcacccctcccctagcctgccgtgtggcactgcccacaggctggggacaagcagcccttgtgttgagtcaggttggccctgtctagggtggaacagaaggacagatggacccccttcctacctccagaataaagaatctcaacctgga

SEQ ID NO: 99263 - DNA, 1435 bp, Homo sapiens
ggtgatctagaggatcccagtgctacctccacaaacaggaaacgtgtttctcgcctacttcctggtgtcgatcgccggcctcctctacgcgctggtacagctcggccagccatgtgactgccttcctcccctgcgggcagcagccgagcagctacggcagaaggatctgaggatttcccagctgcaagcggaactccgacggccaccccctgcccctgcccagccccctgaacccgaggccctgcctactatctatgttgttacccccacctatgccaggctggtacagaaggcagagctggtacgactgtcccagacactgagcctggtgccccggctgcattggctgctggtggaggatgctgagggtcccaccccgctggtctcagggctgctggctgcctctggcctcctcttcacacacctggtggtcctcacgcccaaagcccagcggcttcgggagggcgagcctggctgggttcatccccgtggtgtcgagcagcggaacaaggccctggactggctccggggcagagggggtgctgtgggtggggagaaggacccaccaccaccagggacccaaggagtcgtctactttgctgacgatgacaacacctacagccgggagctgtttgaggagatgcgctggacccgtggtgtctcagtgtggcctgtggggctggtgggcggcctgcgattcgagggccctcaggtacaggacggccgggtagtgggcttccacacagcatgggagcccagcaggcccttccctgtggatatggctggatttgccgtggccctgcccttgctgttagataagcccaatgcccaatttgattccaccgctccccggggccacctggagagcagtcttctgagccaccttgtggatcccaaggacctggagccacgggctgccaactgcactcgggtactggtgtggcatactcggacagagaagcccaagatgaagcaggaggagcagctgcagcggcagggccggggctcagacccagcaattgaggtgtgatggcggccccaccccaactaccacctcttttcaggcacagaccttgtgggactgggccccaggcctgcccaggatgtggttttccaagtcctgacccttggagccagaagtggcccctctgcccctccaggcccagggcatggtcctgctgcttcacccctcccctagcctgccgtgtggcactgcccacaggctggggacaagcagcccttgtgttgagtcaggttggccctgtctagggtggaacagaaggacagatggacccaggagggagggcagctgagtaactgggtaacttattggggctgggcatgcactggggggctggaggagctgggctggacccttcccacctgagcatgctgacccccttcctacctccagaataaagaatctcaacctgga

SEQ ID NO: 99264 - DNA, 1266 bp, Homo sapiens
gaagggccacaggagacgcaggcagtggcccaggagaagctgtctgccctggctggagcgggcaaatggtgcctgcccctttttccttgtgctgcatctctcccctgcaggctggtacagaaggcagagctggtacgactgtcccagacactgagcctggtgccccggctgcattggctgctggtggaggatgctgagggtcccaccccgctggtctcagggctgctggctgcctctggcctcctcttcacacacctggtggtcctcacgcccaaagcccagcggcttcgggagggcgagcctggctgggttcatccccgtggtgtcgagcagcggaacaaggccctggactggctccggggcagagggggtgctgtgggtggggagaaggacccaccaccaccagggacccaaggagtcgtctactttgctgacgatgacaacacctacagccgggagctgtttgaggagatgcgctggacccgtggtgtctcagtgtggcctgtggggctggtgggcggcctgcgattcgagggccctcaggtacaggacggccgggtagtgggcttccacacagcatgggagcccagcaggcccttccctgtggatatggctggatttgccgtggccctgcccttgctgttagataagcccaatgcccaatttgattccaccgctccccggggccacctggagagcagtcttctgagccaccttgtggatcccaaggacctggagccacgggctgccaactgcactcgggtactggtgtggcatactcggacagagaagcccaagatgaagcaggaggagcagctgcagcggcagggccggggctcagacccagcaattgaggtgtgatggcggccccaccccaactaccacctcttttcaggcacagaccttgtgggactgggccccaggcctgcccaggatgtggttttccaagtcctgacccttggagccagaagtggcccctctgcccctccaggcccagggcatggtcctgctgcttcacccctcccctagcctgccgtgtggcactgcccacaggctggggacaagcagcccttgtgttgagtcaggttggccctgtctagggtggaacagaaggacagatggacccaggagggagggcagctgagtaactgggtaacttattggggctgggcatgcactggggggctggaggagctgggctggacccttcccacctgagcatgctgacccccttcctacctccagaataaagaatctcaacctgga

SEQ ID NO: 99265 - DNA, 645 bp, Homo sapiens
  misc_feature (5)..(5): n is a, c, g, or t
gatanaactcgagctagtaccctcgataagcccaatgcccaatttgattccaccgctccccggggccacctggagagcagtcttctgagccaccttgtggatcccaaggacctggagccacgggctgccaactgcactcgggtactggtgtggcatactcggacagagaagcccaagatgaagcaggaggagcagctgcagcggcagggccggggctcagacccagcaattgaggtgtgatggcggccccaccccaactaccacctcttttcaggcacagaccttgtgggactgggccccaggcctgcccaggatgtggttttccaagtcctgacccttggagccagaagtggcccctctgcccctccaggcccagggcatggtcctgctgcttcacccctcccctagcctgccgtgtggcactgcccacaggctggggacaagcagcccttgtgttgagtcaggttggccctgtctagggtggaacagaaggacagatggacccaggagggagggcagctgagtaactgggtaacttattggggctgggcatgcactggggggctggaggagctgggctggacccttcccacctgagcatgctgacccccttcctacctccagaataaagaatctcaacctgga

SEQ ID NO: 99266 - DNA, 589 bp, Homo sapiens
tagcaggctggtacaggtccagaagtgtatgatccaccttgtggatcccaaggacctggagccacgggctgccaactgcactcgggtactggtgtggcatactcggacagagaagcccaagatgaagcaggaggagcagctgcagcggcagggccggggctcagacccagcaattgaggtgtgatggcggccccaccccaactaccacctcttttcaggcacagaccttgtgggactgggccccaggcctgcccaggatgtggttttccaagtcctgacccttggagccagaagtggcccctctgcccctccaggcccagggcatggtcctgctgcttcacccctcccctagcctgccgtgtggcactgcccacaggctggggacaagcagcccttgtgttgagtcaggttggccctgtctagggtggaacagaaggacagatggacccaggagggagggcagctgagtaactgggtaacttattggggctgggcatgcactggggggctggaggagctgggctggacccttcccacctgagcatgctgacccccttcctacctccagaataaagaatctcaacctgga

SEQ ID NO: 99267 - DNA, 148 bp, Homo sapiens
gccaggtggctctttctgctgctcccttccccggaccacccctctgtttcttctctcccgacctccgttagatgcgctggacccgtggtgtctcagtgtggcctgtggggctggtgggcggcctgcgattcgagggccctcaggtaca

SEQ ID NO: 99268 - DNA, 1626 bp, Homo sapiens
ggctggtactgcctcggaatttatgggatccggaagcgtgccctggcggcgctgccagccccagctgggagctggtaggggagtgcgaggaaggcgggacgcagggcggagccgctgcaggggcggggcctgcggacaggagccggggtttggggcgggaacccctcgtcccctgcagaccccgcctgctcgggcgcgggcggcggcgcggccatgaagctgaagctgaagaacgtgtttctcgcctacttcctggtgtcgatcgccggcctcctctacgcgctggtacagctcggccagccatgtgactgccttcctcccctgcgggcagcagccgagcagctacggcagaaggatctgaggatttcccagctgcaagcggaactccgacggccaccccctgcccctgcccagccccctgaacccgaggccctgcctactatctatgttgttacccccacctatgccaggctggtacagaaggcagagctggtacgactgtcccagacactgagcctggtgccccggctgcattggctgctggtggaggatgctgagggtcccaccccgctggtctcagggctgctggctgcctctggcctcctcttcacacacctggtggtcctcacgcccaaagcccagcggcttcgggagggcgagcctggctgggttcatccccgtggtgtcgagcagcggaacaaggccctggactggctccggggcagagggggtgctgtgggtggggagaaggacccaccaccaccagggacccaaggagtcgtctactttgctgacgatgacaacacctacagccgggagctgtttgaggagatgcgctggacccgtggtgtctcagtgtggcctgtggggctggtgggcggcctgcgattcgagggccctcaggtacaggacggccgggtagtgggcttccacacagcatgggagcccagcaggcccttccctgtggatatggctggatttgccgtggccctgcccttgctgttagataagcccaatgcccaatttgattccaccgctccccggggccacctggagagcagtcttctgagccaccttgtggatcccaaggacctggagccacgggctgccaactgcactcgggtactggtgtggcatactcggacagagaagcccaagatgaagcaggaggagcagctgcagcggcagggccggggctcagacccagcaattgaggtgtgatggcggccccaccccaactaccacctcttttcaggcacagaccttgtgggactgggccccaggcctgcccaggatgtggttttccaagtcctgacccttggagccagaagtggcccctctgcccctccaggcccagggcatggtcctgctgcttcacccctcccctagcctgccgtgtggcactgcccacaggctggggacaagcagcccttgtgttgagtcaggttggccctgtctagggtggaacagaaggacagatggacccaggagggagggcagctgagtaactgggtaacttattggggctgggcatgcactggggggctggaggagctgggctggacccttcccacctgagcatgctgacccccttcctacctccagaataaagaatctcaacctgga

SEQ ID NO: 99269 - DNA, 1627 bp, Homo sapiens
  misc_feature (1627)..(1627): n is a, c, g, or t
ggctggtactgcctcggaatttatgggatccggaagcgtgccctggcggcgctgccagccccagctgggagctggtaggggagtgcgaggaaggcgggacgcagggcggagccgctgcaggggcggggcctgcggacaggagccggggtttggggcgggaacccctcgtcccctgcagaccccgcctgctcgggcgcgggcggcggcgcggccatgaagctgaagctgaagaacgtgtttctcgcctacttcctggtgtcgatcgccggcctcctctacgcgctggtacagctcggccagccatgtgactgccttcctcccctgcgggcagcagccgagcagctacggcagaaggatctgaggatttcccagctgcaagcggaactccgacggccaccccctgcccctgcccagccccctgaacccgaggccctgcctactatctatgttgttacccccacctatgccaggctggtacagaaggcagagctggtacgactgtcccagacactgagcctggtgccccggctgcattggctgctggtggaggatgctgagggtcccaccccgctggtctcagggctgctggctgcctctggcctcctcttcacacacctggtggtcctcacgcccaaagcccagcggcttcgggagggcgagcctggctgggttcatccccgtggtgtcgagcagcggaacaaggccctggactggctccggggcagagggggtgctgtgggtggggagaaggacccaccaccaccagggacccaaggagtcgtctactttgctgacgatgacaacacctacagccgggagctgtttgaggagatgcgctggacccgtggtgtctcagtgtggcctgtggggctggtgggcggcctgcgattcgagggccctcaggtacaggacggccgggtagtgggcttccacacagcatgggagcccagcaggcccttccctgtggatatggctggatttgccgtggccctgcccttgctgttagataagcccaatgcccaatttgattccaccgctccccggggccacctggagagcagtcttctgagccaccttgtggatcccaaggacctggagccacgggctgccaactgcactcgggtactggtgtggcatactcggacagagaagcccaagatgaagcaggaggagcagctgcagcggcagggccggggctcagacccagcaattgaggtgtgatggcggccccaccccaactaccacctcttttcaggcacagaccttgtgggactgggccccaggcctgcccaggatgtggttttccaagtcctgacccttggagccagaagtggcccctctgcccctccaggcccagggcatggtcctgctgcttcacccctcccctagcctgccgtgtggcactgcccacaggctggggacaagcagcccttgtgttgagtcaggttggccctgtctagggtggaacagaaggacagatggacccaggagggagggcagctgagtaactgggtaacttattggggctgggcatgcactggggggctggaggagctgggctggacccttcccacctgagcatgctgacccctggtacctcagaaaggttttttgttcgtttttctgn

SEQ ID NO: 99270 - DNA, 1430 bp, Homo sapiens
ggtgcggagcatgaagtcttaagctggcgcatggtgcatctcttgttacctgcatgcagttgatcggtggactctgctacatgtcggcgacctctctatcatgcgtgctgattgacttccttccctgaggttcagcctgcgttcatgaatcggaaaaggatctgaggatttcccagctgcaagcggaactccgacggccaccccctgcccctgcccagccccctgaacccgaggccctgcctactatctatgttgttacccccacctatgccaggctggtacagaaggcagagctggtacgactgtcccagacactgagcctggtgccccggctgcattggctgctggtggaggatgctgagggtcccaccccgctggtctcagggctgctggctgcctctggcctcctcttcacacacctggtggtcctcacgcccaaagcccagcggcttcgggagggcgagcctggctgggttcatccccgtggtgtcgagcagcggaacaaggccctggactggctccggggcagagggggtgctgtgggtggggagaaggacccaccaccaccagggacccaaggagtcgtctactttgctgacgatgacaacacctacagccgggagctgtttgaggagatgcgctggacccgtggtgtctcagtgtggcctgtggggctggtgggcggcctgcgattcgagggccctcaggtacaggacggccgggtagtgggcttccacacagcatgggagcccagcaggcccttccctgtggatatggctggatttgccgtggccctgcccttgctgttagataagcccaatgcccaatttgattccaccgctccccggggccacctggagagcagtcttctgagccaccttgtggatcccaaggacctggagccacgggctgccaactgcactcgggtactggtgtggcatactcggacagagaagcccaagatgaagcaggaggagcagctgcagcggcagggccggggctcagacccagcaattgaggtgtgatggcggccccaccccaactaccacctcttttcaggcacagaccttgtgggactgggccccaggcctgcccaggatgtggttttccaagtcctgacccttggagccagaagtggcccctctgcccctccaggcccagggcatggtcctgctgcttcacccctcccctagcctgccgtgtggcactgcccacaggctggggacaagcagcccttgtgttgagtcaggttggccctgtctagggtggaacagaaggacagatggacccaggagggagggcagctgagtaactgggtaacttattggggctgggcatgcactggggggctggaggagctgggctggacccttcccacctgagcatgctgacccccttcctacctccagaataaagaatctcaacctgga

SEQ ID NO: 99271 - DNA, 358 bp, Homo sapiens
tcaaaaaattatcttttggttttgtttttttctgttctctatatacctctgttctttattatttccttccttttgctagcgttaggtttagtttattctttctgtagctccataacatgttaagttaggttgttgatttaaaatcttgtaggcatttacagctgttaatttcccccttatcactgtttttgctgcatctaataacttttggcatagtgtgcttcattttcatttgtctcaaagtattttctaatttcccttatgatttcttctttgaccccttggttgtttaagcgtatattagtccatttgcattgctataaaagaatacctgaggctgggtaatttataaagaaaa

SEQ ID NO: 99272 - DNA, 1448 bp, Homo sapiens
aggcagggttcaatggcataggcctgccatccaggcagcagaggctggcatggtgctctgtcccactggcggagtcaggggagatgcgtgctcagccggcccccagcagatccccctttcgcaacccccgcaaagagcagcacgactctgagtagcctaggacaacaacgcttgcacgcaaacaccacacgatacatcatcttgtgcgctgccgctgggctcctggctcagtgcgccatggttcacccatgttgctgcagaaccgactccgctgcacgacagctattgggcatcacagtctcccaacgctccttcccacccgtgcgtgacctatccctgacgcgctccagcactgattcacactccacaagcctctccgccccacggcggcactcatgaacgcatagtacagggacaaagtcacatagggacacaatcttgttcgcacccactaggctacaccacacggtaccaccaagctcctcttccgaacaaattcacttcccctcaatccattcaccccactgccctcctccctaccaccttccacatatttcccttccccacactcaacgcctctccaaatgacatactaaatcgagccatacccccacccctcccactaactaccccaccaccagcaaaaccaccccacgccacacaacacacaacacgtaattccgatacatccacaccctcccacacacttacatcatcaccctcaatcactgccttatctaccgccccatccccccaatcacacacaacacccctatcacacccctacgactgcccatacccatcaaacatcactcttcccctaaccactaccctacgaaacacacaccaatacatcatacaacacaccctaactacccaccacttatccacaatcttacacactactcccaaccatctaacatctctatctacaccacacgtaacccacactacacaacccccccacacataccaccactctcatcactcaaccaaaatcagcctaccccaactacaatccccacaacaatcatactccaaacaaccctataccaccacaccccatcccccaaaccacatacgaaccactcctacccccactccttccatatcaccccccacactcactaccccacccctcccctacacacctcataacaccaaacagcacctatacaaatcaacataactattcaacaccaccacacacaccaataccgaacaaccacataacatatatccaaccacacactacaagcacaacccaacaaccacacacatcaccatacatcacacataccaactcgtctactacttctagacaccaaacaccacactcaactcccacacctcactgctgccctccatactaccccccatacacactcatactaccaccatcaccacacaccaacctcacacacacacctctacatccatcaccagca

SEQ ID NO: 99273 - DNA, 633 bp, Homo sapiens
atttttgtgaaataatactaatgttagtattataattgctgtccccaagtgttaaagatgtactactgtttttataaaagaatgtaaatttagtgtcctttagacacagaataactgattgtttttactccaaagaactttttcagttttgagagtatgcaaaacctggataaaattgaagttttaagataccttgataatatactttttctcaaagcattatagttatgttggcatttttaattaaccagaatattttctattttcataggttatttcaaagttaaagacagaactctcaagcatcattaggattcctcaagattgctaagaaactcccttcgagaaatagccaatgttaattgtactgctaactgaactatgcatatctaactcatctcaaatgactcataatgaggcgctatatatttgctttaaaaattatgcacagaatggtttggtgcagataacttaagctttctcagctgggaatttcagaagatgggggagaacttctacaagggagggcaggtacctgtacatggaaggagctgagatgtctaaagtcacccacatttgtcatttgaaaaagtatatataaataaaagatactattttgaagaagtataaaaa

SEQ ID NO: 99274 - DNA, 643 bp, Homo sapiens
ggaaaatataaaatttgaaaacagcatcagtagacttactgaagacaaaatacttttagaaaattacgtaagaagcatagaaaatgaaagggataccttggaatttgagatgcggcatcttcaacgagaatatttaagtttaagtgataaaatttgtaatcagcataatgacccttcaaaaacaacttatatttcaagaagagagaaattccattttgacaactatactcacgaagatacttctagtcctcagagtaggcctttggcttcggatttgaaaggttatttcaaagttaaagacagaactctcaagcatcattaggattcctcaagattgctaagaaactcccttcgagaaatagccaatgttaattgtactgctaactgaactatgcatatctaactcatctcaaatgactcataatgaggcgctatatatttgctttaaaaattatgcacagaatggtttggtgcagataacttaagctttctcagctgggaatttcagaagatgggggagaacttctacaagggagggcaggtacctgtacatggaaggagctgagatgtctaaagtcacccacatttgtcatttgaaaaagtatatataaataaaagatactattttgaagaagtataaaaa

SEQ ID NO: 99275 - DNA, 240 bp, Homo sapiens
aatcactctcagatagtaaagcatttgcttagccatatgttaagctctgaattcagatgaaggggcatctaaaacaggcagagagcatcaggaagggcttcctggaggagaaagtgcgtacactcagtctttaagagcacgtgggaggaaaaaccagtgaagtcctcctgctgtagacagaatgatcagcctgggcaaaggtgtagaggggtaagagagcgttaaacatgaggcagctgt

SEQ ID NO: 99276 - DNA, 191 bp, Homo sapiens
atggattttttttttccagtgtttttcagtattttttccagtgttacactggaaaaactgtgcctgcctccccttccacctccttctcctctcccaccttacccttcctaagacagcaaggccaagccctcctctttcctgcccctcctcagcctgctcaacatgaagacaaggatgaagatctctataat

SEQ ID NO: 99277 - DNA, 558 bp, Homo sapiens
gcctctttatggaaaaagtttgtcattccctagtctaaggtttagattctgagcttgtcattttagcctacacccccttaccagtgactagctcaaaacaagtctgtgattccattctgactgttctactgagggaattcccccttcttctcatgtggagctgatgagggtaagttgtattaataggacatatgctcaggttttctgaaaaatacttttatctagaaatgcataggaatatgctagtgcctgaagattgtctcacctgcctccagagctagtgcccacacttactactgagaggcctgaggaaacgcctgcctacccaccaccagaacctgcatacgtcacatggagaactagagatcagcctgccacacacaccaccaaggagcccagtggcgaacctgcccacctggcccagtgctgccactgccagcaaccaaagaagccacatggaggcccagggattggcccacgcagacaggctatcatcagtgcccacaaacactgcccatggtccctagtactgacacacctcgtccacaaccactacca

SEQ ID NO: 99278 - DNA, 337 bp, Homo sapiens
ctgtagcgagagggatctgtcagtaatacgaacctgggcctgtcgtgatccagttggaagccttagtggcttccaggatgctccttatcttccttggagtcctcgtgctgcggcttcatctcctctttccctgggccctgcccccaccctctagattccttcccataccccatctttagctcagagcctttgcctgtgctgcttgttctgcatagaatatccttccctcccctacctcacccaaccctcctgtccccctcacctagcagctcccatctacactcagccaaggtgattttagaatctaggaagcaggccaggcacggtggcttatgcc

SEQ ID NO: 99279 - DNA, 266 bp, Homo sapiens
ggtctcctggaataatgaaacaggaatgggagaatacttaaaaagagaacagctgatctgaaataattgcagcttttattttttcttcctcttgagaagatgaaaatgtcagagaatagtgagcctcatttttctctgcatgcttaggttgcgtcacatgttttagaaagccataactaacctcttgagttttccaaacacaaaccccatcggtgacggcttatgatacccataaatccaagggaggaaatatggatggcacccaa

SEQ ID NO: 99280 - DNA, 828 bp, Homo sapiens
gttacactaccgatccccaggccccttcctggaggtttggggcatcttcccctggaggctcttcggacaagcaaggagagggagcaccacccatgtgctggcgccgtggtcattgttgttggtcttgttacgtctcaaagggtgcttctgaggacagaaggaggaagagaaagagaggtgctcgcttggggctggagagttgcatgggaaacagcagcaactcagagcagagccggccatctcacagccgcgggcctctctcccctttctgggctcctagagttggaagtgagtggggccatgaggtcctggtgagcaagaggaaggaggaggaactggctttgcagaccgtgcaaagccggttcccgggaagcacacacatggcctgcaggaggccttgtcctagcatcacctgcagcttcaagcacagtccactcagcccaaccacagaatgggccccgccagtgggatgtgcgctctgggcaaggctcacatgtcctgtcatcggtcctgtggcctcctccttccctcggcctcccactgtccctccgtgtcaagtctcccaccatctgatgcgccctctggcaaggccagtgagtcaccctactccagacacagaacctgctgctgcctcacaggctcccgccatctgccctcctgcctctgctctcaggagaaggacactcctggaattccacatggatcccaccttctccctggagccctgccatactcctgggcaccgctgatgcgctctcctgctggctgacttggccttgaacacgggtggctcaggcctttcccagggacccttgcttcatgccccag

SEQ ID NO: 99281 - DNA, 564 bp, Homo sapiens
tcaggttgaaaaagtcgcactgaggtgtcctgccagcaaaaccagcagcagtgccagccccctcccaagtgccccccaaaatgcccacccaagtgtcctccaaagtgccgacctcagtgcccagccccatgcccacctccagtctcttcctgctgtggtcccagctctgggggctgctgcggctccagctctgggggctgctgcagctctgggggtggcggctgctgcctgagccaccacaggccccgtctcttccaccggcaccggcaccagagccccgattgttgtgagtgtgaaccttctgggggctctggctgctgccacagctctggggactgctgctgaccagacctcgaacatcacagagcaacccttatggagaaacttgcaaccaggacctgtcccagagtgatgcttctcctgcccctttttctcctttccttgggctgacacaccttgtgaggtgttttgtctgttgtcatggcccaagagcccatcctggatcctgatcttaccttcccactttacctcatacaacaataaagctcttttgcctcttcgtga

SEQ ID NO: 99282 - DNA, 529 bp, Homo sapiens
caataatcatgtgagggaggtgttagtaagcctgttttaaaatgaggaaacagaagctcagaaatattcataatgtgtctgaggaaactggcagagctgagatgggaagccaggcttttgatccaaaacccatgttttttcactgtattagttctgttgtttaatttttctaaattcatgttccttttcatgatgagctttagcattcatcaaaggaaatgtctgtatacgtaaattccctgcactgatagaccaagtgattatttatagcctgttgacatttgctgagttttttgctcacatttacattagcttcacaccctctagagaaggctgggaaatgttttgatggcatgtcagagatttccaaatgtatattcactgattcgttctacaaacacttatcaaatgtttactgtgtacaaggcactgtgcctggggtgaaacatatacaatcttttaggagcagttgcatataacatctgttgcaagagcaaccattcttcaagatctattctgggcagaggtt

SEQ ID NO: 99283 - DNA, 396 bp, Homo sapiens
gctctccaaattttgtaaccactagtatagactaagatataaaaagaacaggacattgtgaactaagcccagtacatttcctggaagttggctgttgttttaaatttcacaggagctttcattatgattagacactcaaaaataggaagacaggcagggcgtggtggctcacgcctataatcccagctctttggggtgcctaggcgggcggatcacttaaggccaggagttcgagaccagcctggccaacatggcaaaaccccatctctgctaaaaataaaaaaattagccagatgtggtggcaacacgcctgtaatcccagctaattgggagacttcaggcaagagaatcacttgaacctgggaggtgtaggttgcagtgagccaagattgtgcc

SEQ ID NO: 99284 - DNA, 270 bp, Homo sapiens
aagagaggctgaagatggaagaggacagaggatggagaaacaattaagaagttatgatcataatttccttcagagatgatgaagacacaaactcattcaacacgaattgagataaacaggaagaaataaaactgagattgaagtagagactgcataatgaccttgagaacagggagtataagagagaaagaaggttagttgcttttaatcaatgaaagataagactttcacctcacttcactgaaatagacttggatgtctacttggata

SEQ ID NO: 99285 - DNA, 303 bp, Homo sapiens
tgttccccttgacttgtctttacaccatcttaatcaatgctgtcttacagcaacaattagtcattcatagcctgtggtttgtgtccatcagtgagtgtgccctgatagacctgaaaagattgggagaccatgcccagcttcccattatttctgtagcctgtcctttgttcccataacagtacagtcatgccttagtatctgtgggggattggttctagaactccctgtggataccaaaatccatggatgctcaagtcccttatataaatggtgtagcatttgcatatgacctgtgcacatcct

SEQ ID NO: 99286 - DNA, 154 bp, Homo sapiens
tgtcagcgcctctggtgtgcagctgtaaggctgttcctgctggtcttcctttcttccctgactggagtttctttcagggaggagtaggaaggtgacttccacctgtctgctagtttagctaccctgaaattatgatgggaggtctgtcctctct

SEQ ID NO: 99287 - DNA, 820 bp, Homo sapiens
  misc_feature (802)..(802): n is a, c, g, or t
  misc_feature (814)..(817): n is a, c, g, or t
gggaggatgtggtgagccgagatcgttccattgcactccagcctgagcagcaagagcgaaactctgtctccagaaaaaaataaaaaaaaggcaacaatctatacgtatattcaaaacatgacattcatcaacaaaagatacgtggaaggatgctcactacaagcactgcttgttaacagccaaaaaaataaatgcctaccatcaatcaggacaggcaaataaaaacctattattcacataatagaaaacaatgtagccatttcaaataaataaaaagatagctttaaatgtactaatatagacatgttgaagcttctctaaaaggaaaataccactagcatatagcatgattctactttcattctttatgtacttctgtaacagcggggatctttttaaaagcgtgaacatacaccgcttttgtaatttaaagattatctattacaaatggggggaggagtgtataagaatggacaaaccctcaaactggtggaaaacccaacaaaatgttacttcttagtaaatattttaaaaaactatatatatataaaaaacacaaaaattgaacattttgtaaacatgtttcaacataccaatatattaaaatacagacaaaaaaagagtaaattaaaaatagaaaaatcttgatgtatcactgattaaataagacttagattctgcctgctcagagaaagtgattcataaactgaaaaatcaaatttaaaaaatgtaagttcgggccaggcgcggtggctgcagtgagctgagattgcgccactgcactccagcctgggcaacaagnaggcttcgtctnnnnctt

SEQ ID NO: 99288 - DNA, 340 bp, Homo sapiens
gcggccgcctactactactaaattcgcggccgcgtcgataaaatacttaggtgtgaaacttctctgcatcttattctcaaatggaccaggaagaagtgcatataaaaatacatgttaaaaaagagaaattatctaatttttttttctgagacatagtcttgctctgtccaggctggacacaacctttttgtccaatcatattttaaaacagctgtccatactttcttgaacctaagcatacaattgaactgtttcccctgcatctgtggatcttcattctgaaggctcccatgtcacgtaaaactatgatcaaataaatttgtttgccttttctcccatt

SEQ ID NO: 99289 - DNA, 631 bp, Homo sapiens
aaataactcaggctggagtacagtgacgtgatctcagcaactaaaacatgaccataattcaaaattaggttacagaatctaagtttatttcataagtattttattttttgatttttgtgttgaaaaaaaaatctgttttttctttttccaaaaacattcattgtacatttaggtagacatttctaaaaagagagacatgtgtcttgggacccccacgtttcattatttagctgtgaatttcttttaatctacccacttcttttaaatcgcaaacaaattacttgcagctttctttagtctctgcagaaaattactcaagtaattgtctttatgatgtctttccttcttatttatataaccactgaaaaaggagattttcattcacttgacaagtatttacccagtgccttccctgggtcaggtattctgttgggtagtaggaaggtacaattatgaaaaaggcagactctaacctgaaggcatctagaggaggagacagacacaattacgtaatcacgaatgcaaatgtagcaactttgataatgcaaacaagtcctacaaagcccagagtaaggcaaacataatcccacctgaggaagctgggactgatgaatagaggaggtgacattaa

SEQ ID NO: 99290 - DNA, 219 bp, Homo sapiens
ataaagtccacatggaaaaataaacaagagaaaaggaaaaacgaggcaaaactgtctggatggtgacgctggttagtcaagggtctttggagtgcggacgaaggttctttcctgcacgttaaaatgggatacaagtttataaagaggctcttgttttatgtggtctctgtcgttatctagtagttaagcagcaaaggcacaatttcaggaccggtcctg

SEQ ID NO: 99291 - DNA, 426 bp, Homo sapiens
atataatataaaccattactcacattctgccactctataaacctcaaagaaaaatatttcaggacacccccacccaaattaatgatctttgctttcctatggcgaaactacccaaatgcaactttaacttagttttgagttaaggtttagctggggtagccacatagatcactaaattctgacagttcggttggtcttaatgaaatatttggaatcaccaatcacacttaagggaatcaataatcttgtgtcgctctataagctccctgggggcaggaactcgactagtatttgaggaactagtatttgagaactaggcaggcaggcagtttgagcccagacccactctgtttgaatttatatcccactgtaccacttaatagctatgtgttcttggtcaagttgcttaaactcttttttcatcta

SEQ ID NO: 99292 - DNA, 279 bp, Homo sapiens
agtatgtatgatgcattatagcaaagcaaaaaatgcaaacttgataaatttggaatttattatattaaattcttagcctgaaagcagttgtatatatgtgtatgcacacacacacacacacacacacacacacacactctctctctctctctctctcattgatttatctgctgtaatttgtagaaataaagtgaaatagttgactactgactttttatactcctaacattctgtgccaaaaatcatgattatatttttgttgtggagcagaggtttttg

SEQ ID NO: 99293 - DNA, 136 bp, Homo sapiens
tgattccacagaccttcatgttggggttggggaagaattgggttcaaagagctgacccaaatcaggctcacctcccattacaaacattcgcacacagacccaagatctgacataaatagttaacacaccgccatga

SEQ ID NO: 99294 - DNA, 489 bp, Homo sapiens
caagggctgaggagtgcaggtgcgcggtgcgggacccgggggcagctccgcctcggctctggcacgggatccactaggtgaagccagctgggctcctgagtcaggtggggacttggagaacttttacgtctagttcaaggtttgtaaaggcaccaatcagtacccagtgtctagctaatctggtggggacttggagaacctttatgtctagctaagggattgtagatacaccaatcagcactctgtgtctagctcaaggtttgtaaatacaccaatcagcactctgtgtctagctcaaggtttgtaaacacaccaatcagcaccctgtcaaaacggaccaatcagctctctataaaaacagaccaatcagctctctgtaaaatggaccaatcagcaggatgtgggtggggccagataagggaataaaagcaggctgcccgagcgagcggtggcagtcctttctggtcctctttcgtgttgtggatgctt

SEQ ID NO: 99295 - DNA, 192 bp, Homo sapiens
ccaccttggcctcccaaagtgctgggattatagatgtgagccactgcagccggtggaaacccaaatctgttttggtttgtatttgcccattctctgggttcccttggtcacagctcagctcttatgaagagaggcaaagattagaaccagaatttctagttccaggcaggctgtgctcaaagaatccttccc

SEQ ID NO: 99296 - DNA, 270 bp, Homo sapiens
ccctgtctgtgtgagtcaccaaaggattagcagagggaggattagacaaatgcagctacaatgctcctgctcattgtctgtcatgccactcatgttttctgaaaacaattaggagccatttgctgtctactgatggaacagaaagtcccacttctttaaaagggctactttccccagcatcagagggttctgatgatctggagtcatctcatgattttcctctgataaggcattgtttgttttcccctgctccttcaagtctcatcagta

SEQ ID NO: 99297 - DNA, 322 bp, Homo sapiens
tgtccatctcagctgcaactgtactttgtgtcaaccagtattcaagggaggactctgattggttcagttaatcctttcaagccaagcccatgagttgtgctctgcttggaacaggggtttgcccatccaatcagctgtatccagggctagagggaaagtggaatcccatgcttcagaacctgccctttcgtataacaggagctgagaccataaaatctgccatggatgagaccacactgagtcctccacttcttccaccttggctacccctgagatagcaagaccaatccttcctcttcttcctccttctcagtctacacaa

SEQ ID NO: 99298 - DNA, 785 bp, Homo sapiens
ttaaatcagtcacagtttagccataaatagttcccaccttggtctttattatcatttttaaatgattaaaatttaattttttaatttttaattttacagacaggtcacccaggctggagtgcagtggcatgatcacagcttattgtaaccttgaactcctgggctttaaagcaatcctcccacctcagcctcccaagtagctggaactgtacatgtgccactatgcctggctaattaaacacaattttttttttagagacagagtcttgctatgttgcccaggctggtctcaaattcctgggcctcaaatggttctcctgcctcagcccctaaagtgctggggattacaggcataagccactgcacccagtcaatacaattttatttttaataaacccccagagttccttctgaattctgtcactttgtacttctttgtacactttgtacatcttgctgctgctttgcacatggagccttgtttattcactcattcaacaagtgttgattgaatgcagagactttacatagtctgtattcaatgctatacccacgtgacataaaacagggtctgcactcaatgaacaaataaatcattgtgtaatgtatcagatggagactagtgctatggagagaaataaagcaggataaggaggcttcgaaggctgggtacaccaggggttcctattttatgtaggatggttaggagaaacctcacggagaaggtggcattggagcagagatctgaaggaggtgagggagtgagctgtacagatatgtgggca

SEQ ID NO: 99299 - DNA, 132 bp, Homo sapiens
aaaccacatcccctgtcacgccctattcctggcagcagaagtggcaggtcacctaagctgctggacagaagggctgcgctctgccgcctgccttccccggggctgcagtcaccctgctctgcatgtgggacc

SEQ ID NO: 99300 - DNA, 407 bp, Homo sapiens
catcatgtggaaggagagctaaatattgtgagtgatgcgtaggtgaaaaatgagtgttatctctcccagttccatcccttgagttttaaacacatataatttggtatgatttacatatattatattgctgggcaacattcaattctgctacagataacaagaaaacaaaactcctctgttaagtaagttagtaaactataaggcatattaagcaaaggtaaaataagtatgtcttgtgcatactaaacatagatagaaaggaaagaccaaaatatgcctaacattcataacatgctatatatacatggggtacctcaggcaccttcatacatgacatgtacacgaagcatatgagatactaaaattgtatgaggttgtggatcagttgcacattagtgacatccatc

SEQ ID NO: 99301 - DNA, 627 bp, Homo sapiens
taggggagctggttggaggggtgagggcacttggggagaagagggctggcccctggggtgggggtgtgccctctaggggagcctccatcactccctgcccccagctggctgccctggctggttttccaacaagaaaatataggagaaagccagagtgcgcaggagggggacacaaggctgccccaaccccagaagctatgaggactgcagcccaatgggaaggcgggatgtacgcctggaaccttaggttttggagagaacagagagagtgtccagagctcagctggtagcaacactgaatcaccacgatcctctttactctgcatcaagttcttgatctgcaccgaatcctgccagcctccctaggaggtaggtccccattttacagacaaggaaactgaggttcactgaagaacctggcaatgggcaacgagctgcgatttgaacccagctccaggcgactctaggcttaagtcacttctccactgccacaggctccagatgaatgaggaatttgcactcaccctttcacccccggaattcagtgccgctcctgacacccagtcggtactcaaatccttcctgaacgcatgagtaaatagtaatgttcaccacctcagcccctgc

SEQ ID NO: 99302 - DNA, 347 bp, Homo sapiens
actgttgggccacagtggtagaaacgagcttttaaatgatacggcactctagatcaaagggtttcaaccagttaccttataaccatacttcattaataatcaaaatcatatgacaaaccatagaggtctcatgactgcttaaactactgtttctaataccaaagatgaaatgtttaaaagctatcaacgtgcaatcaacccttaggtgtggcagggtttctgtttttattaaaagtgaagatcacatttggttgtcttcagaagcagtaagtaaataaaatcctaacaaatgggtaatctagatttataaagttgttgtgtggtctatatatagttctactgtaatt

SEQ ID NO: 99303 - DNA, 358 bp, Homo sapiens
aagggaggcagggaggaaactgtgtggaaatttgtgctagacccagcgctccaactttccatctgcttacttatagaatcctgacaatatgacccaatacatatgaggtagaaaattatttacttcattatatagatgaagaaacaggctcagaaaagccagataatatccctgttgccacaaaactaggaactggttgattcagttcaaccagttcattcttaactggattagaattcagatagccttgaaggtcctttagtacttaagaatcctataactatatgaggcttcggcagggctagctacaaaatttgcagaatcctttttcaatatgaaaatatggggtctcttgttc

SEQ ID NO: 99304 - DNA, 694 bp, Homo sapiens
tgagatgagcaaggctggaaaggtcagtcgaggtcaaatcaggcaaggtcctaaaggtcatgatgaggagtcaagcttttcttctaagaacaattgaagatattggattaaatttggcatttcaaaatgctcattttggctgccagatgaaaagtggattggaggcagagagagactcattgggggctgctgccagacatacaggagagatgaggtggtctggcttagagtaatggcagtgggtaagttcaggaatagcttggacatgggagagagtgacaggatggcaccagagttgcaagtttgcatgtgtgggtacccaatggtggtgttttctaaggtgaaggccattggaagaggaccagctttggggaagggtacagtcttgatccttgttgagtatgaggagtttttgagtcaaccagtggaggcatcaagcatacaggtcaggaactggaggaaacagctggactagagatacacatttgggcatatatatatatatatacagtatatatatgcacgctgattttatatatatatatatatataaaataattatggaagtcagtgagattgtccagggcaagaatataatgtcatatgagaggggagtccagactctcaaggaacgcggacatttaaggggagagtagaataggatgggccgtcaaagtctaagtcagagcatcct

SEQ ID NO: 99305 - DNA, 384 bp, Homo sapiens
atttccaattctttttaagttaaagtctacggtatttactcaaacccaagaccacctgttgaatttttctagcagggtttaaaaaagaatctttgatatctatgcttttgactgcagggaaactttagtatcactaggaaaccagagaacaagggaaaacaaagaaaaaaaaatactgcctttagattcaagaaaacatgatcactaaatcagtctctggatgaaatgtgaaatggggagctaatcctaccagcccctgtgggaagagggccctttaaggagtggcgctgagaatgaggcaggctctagatggattgacatttcccttctaaaagaccccagttggtgaatactgattaccccagtcctcggccccagtgatcc

SEQ ID NO: 99306 - DNA, 409 bp, Homo sapiens
ccttctgcttcagcctctcaagtagctgggactataggcgcgcaccctgcaccaggctaatgtggtagctactgagttacttggataacgggtattgatagtaacaatctagtctttgtgaactcagtggttcctttgtgttttccaggataagaggcaggaaggatggcattttagagtatgagtttcaaacgtgatgtaatgcagttgtagtggataccaggacaaaatggggatgaaaactttaccaacttcatagggttattaatcttaattttggctgggcatggtgctcacgcccgtaatcctagcagtttgggaggctgaggtgggtggactgctttaagcccaggagttcaagactggcctgggcaacagagtgaaagaaactctctctatacaaaaaaaa

SEQ ID NO: 99307 - DNA, 252 bp, Homo sapiens
catggaataattatgatttttttccctactgattattaagatcgttttgcatgatttctgcttgcatggtcattgatatggtctgatcctactatgcaaagtgaacactataaggttttatagacactttgggaaatgctagtaagttcctaacaatatgaatgttataaggttaaaagctactcatttatcttaaggattcagatacaaatatgtcagatgatatgtgttatgaagagaaatatgcaaagt

SEQ ID NO: 99308 - DNA, 357 bp, Homo sapiens
ctcgaactcctgacctcgtgatccacccgccttggcctcccaaagtgctaggattacaggcatgagccaccgcacctggccttgttttgttttttaagagatgggacttgctatgttgcccaggctggtcttgaactcctggcctcaagcaatcctcctgcctctgcctccaaaagtgctgggattacaggtgtgagccaccacgcccgaccttcccaaggaatttaatattgaccaagtagtatctttgatatccaccccatatccaaatttccccaattccccctccccctcaatttggccttcacttgtgtttaatccaggactggatcaaggatctcagttgtatttggttcc

SEQ ID NO: 99309 - DNA, 582 bp, Homo sapiens
atggaaacaattctactatccatcatagaaatatattaaagataaatataattagaaagaaattatgaactctatttagttatcttattgttaataatattggaagaatggaaataatggaaacaaagaatggagacaatcctactatccatcatagaaatatattaaggataaatgtaattagaaagaaattatgaactctgtgtagtaatcttagtaatattagcaagaaaacttatttcagttgccagcatctcatctcaagtataagtttacatcttaagtcttttcctaagcacatatattgcaaaaactgcacacaaatactgcctagaattaagagtgagagtgagtcagggaagtggttgggaaaaatagggtagaaatgtgggggtgtggaagattaaaatcagcagaagcaattcttaaacataacaagcaaataacttgaatgggagaagttctccacacaaagagagaagacttaaattttcagaagcaggagggataccaaggatgaagaataaaaagaagcaagaaaccagtccagcaggaggccaccaatgtcctgtgagtgaatat

SEQ ID NO: 99310 - DNA, 347 bp, Homo sapiens
gagacatttgaaatgcagatatttgaaagctgtataatcagtagttaatatggacttacatgcaaatatgtttgacttcttgataacctggcagttagttcagtgttgcagcatgaatcttctccctcttttccttgaatccttggttgtgggtgtttcataaaaagtcttaacctttaagggtgaaaggtgccaaacacagttcttctgccccacaaatgcactgtctgcttggagagaagctatttgattcctgcacagctcctggggccgcctcccatacagtgttctgtgtgagtggaggccccagaaatctgcaccgagttggcccaggagacaggtgctca

SEQ ID NO: 99311 - DNA, 585 bp, Homo sapiens
tggaagcccccgtgcccactgcagtcaccaatgtgactggcttggttttccttcttccctggtcagtttccttagtctccacccctgctccctggtatcaccactgtccacagtaaactacacacacagttccttgtaccaggcttgtcttcccaggggaataagacagcatgtgctgcattaaaatggaaacacctttacttacttttacgtactgttaatcaacagtcactgcccagttcttccaagtggcctttatcatcccttccctgtaacttcctgggtccccgtttgagactcccccaaaggagtaatgtcacgcacagcaggaggctgccagcagggggctccaaccctacaccaacatctgttctgaaggtgcctcagccggactagtgataaatgctttagatttcaccctggcagtgagatacaggtaaagataagtgcctattcaagccctatgttccttttactggcgattcatgtaaaccacactcctaatgaattgaggactaattttttttttgaaacaggatctctctgttgcccaggctggagtgcagtggcacagtcatagctcac

SEQ ID NO: 99312 - DNA, 574 bp, Homo sapiens
aggcgggcagcgcgcaggcctgccatgagggaaagccaggatgccgccggagctcatggctggaaccgcgtcggctccacggccaccaagtggttcaccggggcgcccttcggggtgcagagccacaggtttgacatctctgctgtttatcccaactggaagaagttcagcaccttcactgaggccccatactccacgcgttattctacccaagtgtcccacataggccctgggacttacagctccaaagagacctgcttcagcaagaagaagctgatgaaggaggtggacacaggctgggccaaggcccaggaagccacgcggctgacccagctaccccacttccagtaccaggccatcatgaaagagaagcggctgaaggagcaaaagctgggccccggctcctacaacctcaaagacttcttagaacagctgcgggagaaaccatgtagcacccgggggctgctcagctctggggaggttcgcttccgaggactcactgggaactactatccaggccctggaaattatggggagaagggtaacccatacaccaagctggaggagaatgcct

SEQ ID NO: 99313 - DNA, 188 bp, Homo sapiens
ttcaccttggcttcctgaagtgttgagcctcccaaagtgttgagcacaggcatgagccactgcacctggcctatttattgttaagttctgagttatttatatattctggatactagttgcttatcagatatatgattggtaaatattttctcagtatctacaggttttcatttcactttcttgatggt

SEQ ID NO: 99314 - DNA, 835 bp, Homo sapiens
agacgtcatgctcctattcccctagatcctttagcgtgtaattctaagatcaagggcattctctgatgtagtgtattacaatgatcaaaatccggaaacttaacattgacacaatactattatctgaattactatttatattcaaattttgagagttgttccagtaatatattttacaaggacaccccttcctctccctggaccataatttaatttttaaaactttgacataccttcaattagtgttttctttatgtcagtttttcttttctcttaaaaaaagcttaacagaaatcactgaggttttaaattactgatttctttttaataaaagcctttcaggaagaatgtgtgatcatttaggaaccaattttgacagttgtgtgatctgcatgaaccatcaggttgggagagagtcagaagttagaataggtactgattttgtcacctgattgtggaggagtcacaactttttctgaaccttgatgtgttcactgtaatataggcttaatgatatgtgcttgcctgtctcattgtgtgtataattgaagtttctttggaacttactaacacaaaaaatacagttaggatgctgacttttaggattccaaacctagttctgtcaaatgaccatttctattatgatgaggaagagtgataaagggatttaaggattaagaagccctctttgtcatatatatctttagatgataatgatgtgatacagaactttgtatgcaaaaagagctgagatttaaatttgagaattatctccatgtaagtgatgatagaacttacttaaagtagcaaaatctcacagaacattgtagaatga

SEQ ID NO: 99315 - DNA, 410 bp, Homo sapiens
accgcaccattgcactccagcctggacaacaaaagcaaaactccgtctcaaaaaaaaagaaagaaagaaagaaatacaagaactgaaaaaccaaaataattgccatttaaggtacactggctccagattttgagacctctgtaatgttatgttagatagctgttacacaactctttatgttggataaggactaggaccatattttatatcagattgttactttagaatcatctagtttaatttccatcatttgttactattacaggtattttataaagaaaacacggtaaggactcaataacacatagctgtgatactggttttattacagatttagatctggaagacttgatcaagtgacacatagaaacaagcaatataatggcttagatgtgtcaccctttctgatg

SEQ ID NO: 99316 - DNA, 501 bp, Homo sapiens
ttagttttggggaagttctctttaattttggtataagttggatgtgaacaataaaatacatttatttaattaatggctggtcttgctttgtggcccaggctggagtgcagtggtgccatcatggctgactgacctcctgggctcaggcagttctcctgcattggcctcccaaagtgctgggctcacaggcatgagccaccatgcccagccagaacacattttaaaaagtaacattgtggccaggaggggttgcttacgcctttgatcccagcactttgggaggccggcagatcacttgagcccaggagtttgagaccagcctggacaacatggcgagaccttgtctctacaaaataatacaaaagttagccaggcatggcggtgcgcacctgtagtcccagctacttgggaggctgaggtgggaagtcaaggctgcagtaagctgtgatggtgatcctaccactgcactccatcctgggcaacagatagagacattatctc

SEQ ID NO: 99317 - DNA, 206 bp, Homo sapiens
gctgagcttgggcagggtggctgagagaattgtggctctagctgtgggcagaaattcatggccttgaagaatggctactgtatataccagtgataaatattagtcactctggcagcagaatgagtttcctgtgctgcatttttggcacttccagaaaagggaaagcctttctctctgacagggcacaggagggagaaacaggaatg

SEQ ID NO: 99318 - DNA, 402 bp, Homo sapiens
gttcatcactcttaggagtcattcactgagcatcagtgaaatcatacttatgtttaaaacaggtgattttctttcttattccagcaatactgagacctgcataacctgaaaatctttctacatacacatggcttaaaaatataatattaaacttataactgacctcattgaaaaaatgaaaattcctatgtggcataagaagccaaacaccagatatggatttatgggccaagtgattgacaacagagtgaacctggtcttataggaggctcaagactccagcataggcagaatccttggaaggcctgcccctcagtttaagagtaagaaagaaatacacacacacacacacacacacacacacactctctctctctctctctctctctctcacgcactcac

SEQ ID NO: 99319 - DNA, 651 bp, Homo sapiens
ataggtccccactcacatattaaactaaattgatgttccatacagaactggtcttagattaaaacatctagcaatctgtgttgtaaataactgacttagaaacaaaaaaaaaaaacctcactcttgcagcatagattggctgctgataaaagaaacatcatttgaagaagttgtctaccatggtaaatttgtcccttggaatattactgcaaaatcagaatggattcttaatcaacatgttttaggcactttccactgaaaacagatcatataaaatatcttgaaatgtgctatactcctgtttttagtattattcacacatttactcattagttctttcattccacaaataatgactgcccactatgagtgtactgtgctagtaggttacttattcaaacaaagaagaataagacaaagttgctgcccaaaagtacccgcagatacaggaaagacacagatgtgtaaacagagtaccacacaaggctacatgagaagagcttccatggggttgagaaggacttaacagtcaaccatgtaaatacagtggaccagaaagaagagctgacaggcaggaggagggagcaagagcatgtgcaaaagctcagaagccgccaccgggtaagctgcgtggatttgggtatggggagg

SEQ ID NO: 99320 - DNA, 302 bp, Homo sapiens
caaactcctgacctcataatctgcccacctcagcctcccagagtgctggggttacaggcgtgagccaccgcaccggccgagattttttaaattataaaatttatcgcaacaaatttgaaaacctagaaaaattggataatttcctagcaaaataaaaaggaatccaagaacatctggaaaactcaactatatcagttacttgctgggtgcagtggctcacacctgtaatcctagcactttgggaggccgaggcaggaggatcgtttgagctcagaagttcaacaccagcctgggcaacgtaa

SEQ ID NO: 99321 - DNA, 415 bp, Homo sapiens
ccttgtattgagataagaatttgtgtatagcctttggccaagccaggaaacaaatctgctactctctggcaattgcttccctaccctcccctgcctccgcactcccccttccccagtttatggcctgaaagaaagtttctcttccattaggtttgtcagtcagcaacctggtcagggaagaggagaaagctgttgataaatttgggagctttgccacaaaagcattaaagatgacttcaaatatgccaggccaatattctttagtttttaaatgaagtctgactagctgcagctccctttctggcatcaccatcatgcatatggttaagagaactttgccaagaacaatatctagcagtgaaggggaggtggcaaaatgatcagatatatatgcatataatagagttattgctga

SEQ ID NO: 99322 - DNA, 301 bp, Homo sapiens
atcagatgccccctcagccatggaagaacaggatggcaaacatcaaatggcacgagagcttccagcagcagttgaaatgcaagtccacaagtgcaagcaaagttttgccctttttgtcaaaaatggactataatttggagaacgaatttgaaatacatcataaccaagctgttctaaagactgattttaatattttatgtaatatcacatatgtttttgaaatcagtaaagacacctggaatcataacgctttttcagtggtaaatgtcatattacgtttttagggcattacgtcaatttc

SEQ ID NO: 99323 - DNA, 315 bp, Homo sapiens
ttatttcagagcttcatcacctcttccaagcaccacttgggacctgagtaccccaaacatggctgggtacacctgcacatcatgctactgcccctgcgcaccagcacatccctggctgctgagccgtccaccttgccatcttcactggtcaacagttcttcatgccgtttgaagagctttgcaaaatccctcaccaacttcacaaaccctgagtctttttactatcaccttcataagcccaaacccccacttaggttggtctcatatctttgcattgtgaaaagtactgcaataaacatgcgagtgcaggtatcc

SEQ ID NO: 99324 - DNA, 185 bp, Homo sapiens
tctctgtctgcaatgaccattcagccctgcagacctcagccccctgtgctgtactggggactgtggcaacagtagccacaatctggcttggggcaggcagagcatcccatggggccaggatctcctacggaagatttgtctttgacatcacggatctttggttatttgggctaacaatggacctg

SEQ ID NO: 99325 - DNA, 162 bp, Homo sapiens
ggcctcccaaagtgttgggcttacaggcatgagccactgttcccagccagtgttagctcttaatatttaagtcaatgattcattttacgttaatgtttgtgtatcagtaagaggtgagggtttaagttaatttttgtagatagtttaaggtatggactgaag

SEQ ID NO: 99326 - DNA, 169 bp, Homo sapiens
acactggttatgtttttagggcaaatgaggaacatgttctgctgtattcattcctatatccccagtgcctgtaacagtgcacagcatgtaacaggtgctttacagatatttattggatagatgtgtgggcttcccttaacctaataaacagccactgtatctttcaact

SEQ ID NO: 99327 - DNA, 469 bp, Homo sapiens
gctgggagttctgcaagtaggagctgtctctgaggctgccagagagacacagacgtctgagttccaggggaggtggagactggagctgggagcatacagacttacacccaactgcctctttgaatggctgacaggcatcccagcttactacgcccagaacctaaagtctccttcagccttctgcttctccagggcaacgctctgatgtcaggggaaaagctggggcttccacccacctggactctccttgtcctcttgtagctgtaaccagccatcaggagacagggtcggctctaccttccaagtaggtccagtgcctgaccccttcctgtccctgcactgcctgccctggtcccagcctcacctggcttggattgttgccccctcccccgcagcctgttcttccaagagcctgttcttccccacagcctgttcttcctgttcttgggaaaacacagatgatgtgacc

SEQ ID NO: 99328 - DNA, 500 bp, Homo sapiens
tgtacatctcattgagctcaaggacagagcttcccctctcctcactgtctgcagtgcctggtccaggcaggacctgccatcaagtcaatgctgaaaatgttggccacacaaaaacatctgcaccgtcggaaggaacagaagctccagaacaatgcctgggcttcaagatccaatggaactttgtcagttgaacgccagtcttgaatccaggtcttcttgcttccaaatgtggtcctctgctgtctcatcagcctcttggggcctcacgctgggctccagttcggggtgtgaggagacgccaaatgcttctcagaatggcctatctgggatctcgcccagtgcctttctccctcctcttgctatttttcgtgtcttttctcttccccctctccctgtgtcgggcgtgtttacttgcagcagccagaaagaccaccttccacccgccctctcttcggttcagctgcacctctctactccaataaaccgtttgcattccatct

SEQ ID NO: 99329 - DNA, 484 bp, Homo sapiens
gtgacctgagatgtctgacgctgatgatgtgcgatgacagcacgtagcacgttgtctgtggactggaagacccgggttgcacaggcagtagcgagaagcgaaagctccatcatgcgatcaatcttctgcgcctccccgggcagccttttctattgaattttgctgtgttcctttgaggcactcatcccaggggctttgaaccaggctggaggtgacttgcacattctgcagaccagagcaatgccattccagaccccaaaaggggccctcaacttcctgacccttcttgctgttcctcctgcagcccaaggggtccttcagccagctccagtccggactgaaggatgttgagaaggacatcaaggatctgaagttaggggtcgagcaaggatgttgatatggtgtatgcgtcattcatcggaaggcattcttgatgtccatgaggtaggaaggtctggagagaagggaagaacatcagattatc

SEQ ID NO: 99330 - DNA, 390 bp, Homo sapiens
aagccatccagcaaaatgtcggcgtcttcttcggcccaaggggtccttcagccagctccagttgtggtgggagagctgcagactgctcacggcctgcccggcccctgtgtcgacggcccctccctaaccatccgggcattctttggaggccaggcccctggtgctctcaggattgttttaagactgctgtgacaacctggagatcatcaccagcctcctggggtcccatctgaccccagctgtgatgccgtctgcacggcaccctccatcatccctaacgcagacacccccaactgagcctacagacgaggacacgcctgacgccggccccaggagaacatactgacctaaaagaggaggcagaagtggacgctctcgtctcctgctgtg

SEQ ID NO: 99331 - DNA, 1920 bp, Homo sapiens
ctgctccacttcccgacgccttccacctgaggccctgaggggccagcagttgtccttcagagggagcctgcagaggtgcagagtcaggtgggacccgtcgtcctcccctcgtccttcagcgccctttgcaggagaaggagacttgggaggcagcgatgggcgctggcggcccccggcggggcgagggccccccagacggcggctggggctgggtggtgctgggcgcctgctttgtggtcaccggcttcgcctacggcttccccaaagccgtgagcgtcttcttccgcgcgctcatgcgcgacttcgacgccggctacagcgacacggcctgggtgtcctccatcatgctagccatgctctacggcacgggccccgtgtccagcatcctcgtgacccgctttggctgtcgcccggtgatgctggcgggtgggctgctggcttccgcgggcatgatcctagcttcctttgccacgcgccttctggagctctacctgaccgctggggtgctcacaggcctgggcctggccctcaacttccagccgtcgctcatcatgctggggctgtacttcgagcggcggcggcctctggccaacgggctggcggcggcgggcagccccgtgttcctgtccgcgctgtcgccgctcggccagcagctgctggagcgcttcggctggcgcggcggcttcctgctgctcggcgggctcctgctgcactgctgcgcctgcggggctgtcatgaggccgccgcccgggccgggcccgcgaccgcgcagggacagcgccggcgaccgcgccggggacgctccgggcgaggcggaggctgacggtgcggggctgcagctgcgcgaggcatccccctgggtccggccccgccggcgcctgctggacttggcagtgtgcaccgaccgcgccttcgccgtgtacgccgtcaccaagttcctgatggcgctcgggctcttcgtccccgccatcctgctggtgaactacgccaaggacgcgggcgtgcccgacaccgacgccgccttcctgctgtccatcgtgggcttcgtggacatcgtggcgcgcccggcgtgcggcgccctggcgggcctggcgcgtctgcggccgcacgtcccgtatctgttcagcctggccctgctggccaatgggctcacagacctgagcagcgcacgcgcgcgctcctacggcgccctcgtcgccttctgcgtcgccttcggcctctcctacggcatggtgggcgcgctgcagttcgaggtgctcatggcggctgtgggcgcgccccgcttccccagtgcgctgggcctggtgttgctcgtggaggccgcggctgtgctcatcggaccgccctctgccggccgcctggtggatgcgttgaagaactatgagatcatcttctacctggccggctctgaggtggccctggctggggtcttcatggctgtcgccaccaactgctgcctgcgttgtgctaaagctgccccgtcaggcccaggcactgagggcggagccagtgacactgaggacgctgaggctgaaggggactctgagcccctgcctgttgttgcagaggaacccggcaacctggaggccctggaggtgctcagcgcccggggcgagcccacagaaccagaaatagaggcgaggccgaggctggctgccgagtctgtataactcagggtgctctgggtggggtggcccagtgacttgggaacacagcttcttgtctcagagagcctggtacgctgggaggctggtctggggtggtcactcccggggtccacgtctgggctccagttgatcccctgggtgtctgggaactgcctccctcatctgtgccccctcgtgccgaattctggctcgagggccaatcctatagtgatcgtataaatcgtatcagtcaactgttctgtgtaatgtatcg

SEQ ID NO: 99332 - DNA, 1926 bp, Homo sapiens
ctgctccacttcccgacgccttccacctgaggccctgaggggccagcagttgtccttcagagggagcctgcagaggtgcagagtcaggtgggacccgtcgtcctcccctcgtccttcagcgccctttgcaggagaaggagacttgggaggcagcgatgggcgctggcggcccccggcggggcgagggccccccagacggcggctggggctgggtggtgctgggcgcctgctttgtggtcaccggcttcgcctacggcttccccaaagccgtgagcgtcttcttccgcgcgctcatgcgcgacttcgacgccggctacagcgacacggcctgggtgtcctccatcatgctagccatgctctacggcacgggccccgtgtccagcatcctcgtgacccgctttggctgtcgcccggtgatgctggcgggtgggctgctggcttccgcgggcatgatcctagcttcctttgccacgcgccttctggagctctacctgaccgctggggtgctcacaggcctgggcctggccctcaacttccagccgtcgctcatcatgctggggctgtacttcgagcggcggcggcctctggccaacgggctggcggcggcgggcagccccgtgttcctgtccgcgctgtcgccgctcggccagcagctgctggagcgcttcggctggcgcggcggcttcctgctgctcggcgggctcctgctgcactgctgcgcctgcggggctgtcatgaggccgccgcccgggccgggcccgcgaccgcgcagggacagcgccggcgaccgcgccggggacgctccgggcgaggcggaggctgacggtgcggggctgcagctgcgcgaggcatccccctgggtccggccccgccggcgcctgctggacttggcagtgtgcaccgaccgcgccttcgccgtgtacgccgtcaccaagttcctgatggcgctcgggctcttcgtccccgccatcctgctggtgaactacgccaaggacgcgggcgtgcccgacaccgacgccgccttcctgctgtccatcgtgggcttcgtggacatcgtggcgcgcccggcgtgcggcgccctggcgggcctggcgcgtctgcggccgcacgtcccgtatctgttcagcctggccctgctggccaatgggctcacagacctgagcagcgcacgcgcgcgctcctacggcgccctcgtcgccttctgcgtcgccttcggcctctcctacggcatggtgggcgcgctgcagttcgaggtgctcatggcggctgtgggcgcgccccgcttccccagtgcgctgggcctggtgttgctcgtggaggccgcggctgtgctcatcggaccgccctctgccggccgcctggtggatgcgttgaagaactatgagatcatcttctacctggccggctctgaggtggccctggctggggtcttcatggctgtcgccaccaactgctgcctgcgttgtgctaaagctgccccgtcaggcccaggcactgagggcggagccagtgacactgaggacgctgaggctgaaggggactctgagcccctgcctgttgttgcagaggaacccggcaacctggaggccctggaggtgctcagcgcccggggcgagcccacagaaccagaaatagaggcgaggccgaggctggctgccgagtctgtataactcagggtgctctgggtggggtggcccagtgacttgggaacacagcttcttgtctcagagagcctggtacgctgggaggctggtctggggtggtcactcccggggtccacgtctgggctccagttgatcccctgggtgtctgggaactgcctccctcatctgtgccccaagttccgccaggccctgccccatcgccagtgaagctgctatggagcaacaggaaactggtgataaagctcagctgaacgacaaaaaa

SEQ ID NO: 99333 - DNA, 379 bp, Homo sapiens
gggtctcacacccatgtctgggggtgaatccagttaccaggggaaggaaaaatggaatggagagaacacacaaacaatagacaccttcaaacaccctgggtggaaaatatggatcaatgtggcttattactatagtatgtgtctgactttacttgtggcttattaatatagtatgtgtctgagtttacaagaaaccagggaaagaatttcaataattatacccataaatttagctatccagggagcctgagaagactgccgtgccagctccctcagccattattctcatgagcaacaatccgatatttgagaaagtgaaaacaaataaaaataaagaatgtgtgagatgacattgaataaaaatagatttatgaagata

SEQ ID NO: 99334 - DNA, 426 bp, Homo sapiens
cgtggattcctgcctgagtcaagaattgatttgagaaggccctggcttggtttctctttttctgtggctatacctgtctgcctgtggatgattccactggacctggaagttctgggtctggcttatcactggcaggggtagggtctgcagctgccccactttatgtcagcgtaggatggccaaacctcagtgagtacagcggtcttatcatcttgggctttgaacagacacaccttgcatgaccggtgcacactcctggatgtttgtcctttgccttgaccttcctcttgatccctccttaaagggacagttaaatccacttgctcagcttgctctgtgcagattagaagtgggctgggggaggatggacagctgcagattgaaatcctttccgagtcatctgaacagtagggacaaaggagatac

SEQ ID NO: 99335 - DNA, 372 bp, Homo sapiens
atggtggtgggtgcctgtagtcccagctacttgggaggctgaggcaggagaatggcatgaacctgggaggcagagcttgcagtgagctgagatcgcaccaatgcactccagcctgggcgacagagtgagactccctctcaaaaaaagaaaagaaagaaagaaaatgtcttcatttacttgatagccaagtaggctcttcacccaagttaggcatctcacaggaatataaaagatggccaggcgcagaggctcatgcctgtaatcccagcactttgggacaccaaagcggggagattgcttgaggccaggcatttgagaccagactgagcaaaagagcaagaccctatctctacaaaaagaaaaataaaaaat

SEQ ID NO: 99336 - DNA, 1717 bp, Homo sapiens
  misc_feature (1028)..(1028): n is a, c, g, or t
gaggttggtgcaaactgggaccctctgggcacctctcagggacacagactgtccagctggttacggaagcacatctcccacctgatttattcctaaataggagcgaggagggggacaatctttcccttcacccccacatcttcctttcctcttccctacctccctgtattaatactgagaaaccacacctgaacaatgaaatgactaggaactacggtttctggttgtgttcccaagtgggaatatgggctgttcacgacctcggaatgtagaatgccctcattatttattcagtagacatccaataaatgcggatcaacagcttgcctatctttgatagtttttggcagtgtgtgctggttttaatctttgtacttgtcccataagtgaccccatgactagagagtgggctcttccatcttgtaagagccttctgttcacgttctgttctttttatgagaaggaagttccagtgcatatcccaacataaagagaaacgttgaatacgtactgtttttctcttatatatatgctcaaaataacgactgtagtaaacagtcgtcatgattataggatgaattacgcagccattcatagatttttgtagttgtcatttacaagtggactatgcaatagttcataggcttatgaatacataatctaacaatattagctgggtgcagtggctcacacctgaaatcccagcacttagcgaggccaaggtagcttgattgctagagcccaggagttcaagactagcccgggcaaagggcaaaaccccatctctacaaaaactacaaaaagaaattagccgggcatggtggtgcttcccggtagtcccagctacttgggaggcaaaggtgggaaggtcacctgagcctgggggtgtcaaggctgcagtgagctgtgattgcaccactgcacccgagcctgggcgacagagtgagaccctgtctcaaaaacaaacaaacaatattatacttgtagtatttaaaaaacataattatctggtattcccatagctaatngaatgaaaggggagactttatctccctagacaggaagcacggtacctcctacactctcttctccccacatcaactggataggtgtgtgaacgcatttcaaagtcaagtatggttagtaattacttgatctttttccagccccttcagataagctgaattgaacacccaaaagtgatagtaacatcattttcctttgcaattacaaagaccattaacccaacagaatctccatgctttacctgtttgtgatgtttttgttccattttattaagtctgactcctgataaatgaatcactacacaattaattttttctcattctttagattcatacacacagacacatatatcaagcaaactataaattgctaaaatgacaggccagcagtgactacttgttatcacgtgtgtaacatctcttgagggctgctttgtaattcatttgtatggtgttgttgtaccagtgtaactgctaagtggtttctctggttccatgtgcatttgtacatgaagttgtgcaatctccacataccagcagtttcaaagaatgacagtttgcatgaggccatcttaatagcaggtagcatgtaaccaacccatctgaattaagccaccattgcagaataaaacatttgacactaagccaggtatttcagtggatgagttgtattttggatttccaaaaaaaaa

SEQ ID NO: 99337 - DNA, 377 bp, Homo sapiens
agccaagtcatgccacattcatgacccagagaaaccaagataatcaatgactgttgtcctttttagccaccaagttcagaggtgacttgttacacaaaagcagagaacaaatgtgccagctgccaggggtgtcgacggctcatagctgggtccctctggaaatggctgccgtgtcaccccatgtaatgccttctcctgggagcagctgcatggaaggactggtcctcatgtttccattcaggacacccacagagggtctctcttctttgtgggtgaggcctcaacagtgaaacagctgaggcctctgctgcaaccgcattgcagcccagtggctccccctgcccaggcccactttccacacccctgcaggtgttgct

SEQ ID NO: 99338 - DNA, 1588 bp, Homo sapiens
ggccagtcggagcggggcgcgcgccgcatggcggaagcggaagggagttctctgctcttgttgccgccgccgccacccccgcccaggatggcggaagtggaggcgccgacggcggccgagacggacatgaagcaatatcaaggctccggcggcgtcgccatggatgtggaacggagtcgcttcccctactgcgtggtgtggacgcccatcccggtgctcacgtggtttttccccatcatcggccacatgggcatctgcacatccacaggagtcattcgggacttcgcgggcccctactttgtctcagaggacaacatggcctttggaaagcctgccaagtactggaagttggaccctgctcaggtctatgctagcgggcccaacgcatgggacacggctgtgcacgacgcctctgaggagtacaagcaccgcatgcacaatctctgctgtgacaactgccactcgcacgtggcattggccctgaatctgatgcgctacaacaacagcaccaactggaatatggtgacgctctgcttcttctgcctgctctacgggaagtacgtcagcgttggggccttcgtgaagacctggctgcccttcatccttctcctgggcatcatcctcaccgtcagcctggtctttaacctccggtgatggctgctcggtggccccacacccaccagggtcccgaggaaacagccgccatcccttttggttccagatttttttctcctcaccccaaaaggcagggttgggcctgctgttgtggaccgggggtcggggctggcaggatggaaggactgaggaccagcatgaagtgggggtttgttgtctccctgcctctcagaagcaccctgtcccctcctccccaggcctgtgactccggccctggaagcccctttgttcttctgttgaaaggctttggcttcccgctgtagagctgctcccgccaccacctgctggggtcctgcctcagcccagtgcccagtatggggagaggaggacatttgggctcacctgtcaaggtggccctgggaccagagctggtcccagcatggggtgcaccgggtacacttaacgtgtctctataagccaagttgcttcaggaccttcaccactggcctctagaatggtccagaggggctggctgggtccctttgtcagactcctgccggcagctgccctgggggacatgtgtgcccatctggcatcctccagcccgtgcagtccgctcttcactgttccacggcctcccagtgcctcccagcattggacccatctccccctgcagtttgaggccagagaggtgagtggacctgacaagtgccagagtaaccgtgtagacagagcagtgtagacagcactcagccccagccccaggtgtggacctcatgctggtgatggctcccctgggtggcctgccagcacagccagtgccatcagggagctgaaggggctgtcccccacctaactccagctcccccttcacgttgtcaccaaggccctgtgccgcccgcctcgcccccctgctctgtggattcctttgggaagggctccctgggcaggacaataaagagttttgactcca

SEQ ID NO: 99339 - DNA, 1523 bp, Homo sapiens
gctgtacggtccggaatttgggatggcggaagtggaggcgccgacggcggccgagacggacatgaagcaatatcaaggctccggcggcgtcgccatggatgtggaacggagtcgcttcccctactgcgtggtgtggacgcccatcccggtgctcacgtggtttttccccatcatcggccacatgggcatctgcacatccacaggagtcattcgggacttcgcgggcccctactttgtctcagaggacaacatggcctttggaaagcctgccaagtactggaagttggaccctgctcaggtctatgctagcgggcccaacgcatgggacacggctgtgcacgacgcctctgaggagtacaagcaccgcatgcacaatctctgctgtgacaactgccactcgcacgtggcattggccctgaatctgatgcgctacaacaacagcaccaactggaatatggtgacgctctgcttcttctgcctgctctacgggaagtacgtcagcgttggggccttcgtgaagacctggctgcccttcatccttctcctgggcatcatcctcaccgtcagcctggtctttaacctccggtgatggctgctcggtggccccacacccaccagggtcccgaggaaacagccgccatcccttttggttccagatttttttctcctcaccccaaaaggcagggttgggcctgctgttgtggaccgggggtcggggctggcaggatggaaggactgaggaccagcatgaagtgggggtttgttgtctccctgcctctcagaagcaccctgtcccctcctccccaggcctgtgactccggccctggaagcccctttgttcttctgttgaaaggctttggcttcccgctgtagagctgctcccgccaccacctgctggggtcctgcctcagcccagtgcccagtatggggagaggaggacatttgggctcacctgtcaaggtggccctgggaccagagctggtcccagcatggggtgcaccgggtacacttaacgtgtctctataagccaagttgcttcaggaccttcaccactggcctctagaatggtccagaggggctggctgggtccctttgtcagactcctgccggcagctgccctgggggacatgtgtgcccatctggcatcctccagcccgtgcagtccgctcttcactgttccacggcctcccagtgcctcccagcattggacccatctccccctgcagtttgaggccagagaggtgagtggacctgacaagtgccagagtaaccgtgtagacagagcagtgtagacagcactcagccccagccccaggtgtggacctcatgctggtgatggctcccctgggtggcctgccagcacagccagtgccatcagggagctgaaggggctgtcccccacctaactccagctcccccttcacgttgtcaccaaggccctgtgccgcccgcctcgcccccctgctctgtggattcctttgggaagggctccctgggcaggacaataaagagttttgactcca

SEQ ID NO: 99340 - DNA, 1892 bp, Homo sapiens
ggccagtcggagcggggcgcgcgccgcatggcggaagcggaagggagttctctgctcttgttgccgccgccgccacccccgcccaggatggcggaagtggaggcgccgacggcggccgagacggacatgaagcaatatcaaggctccggcggcgtcgccatggatgtggaacggagtcgcttcccctactgcgtggtgtggacgcccatcccggtgctcacgtggtttttccccatcatcggccacatgggcatctgcacatccacaggagtcattcgggacttcgcgggcccctactttgtctcagaggacaacatggcctttggaaagcctgccaagtactggaagttggaccctgctcaggtctatgctagcgggcccaacgcatgggacacggctgtgcacgacgcctctgaggagtacaagcaccgcatgcacaatctctgctgtgacaactgccactcgcacgtggcattggccctgaatctgatgcgctacaacaacagcaccaactggaatatggtgacgctctgcttcttctgcctgctctacgggaagtacgtcagcgttggggccttcgtgaagacctggctgcccttcatccttctcctgggcatcatcctcaccgtcagcctggtctttaacctccggtgatggctgctcggtggccccacacccaccagggtcccgaggaaacagccgccatcccttttggttccagatttttttctcctcaccccaaaaggcagggttgggcctgctgttgtggaccgggggtcggggctggcaggatggaaggactgaggaccagcatgaagtgggggtttgttgtctccctgcctctcagaagcaccctgtcccctcctccccaggcctgtgactccggccctggaagcccctttgttcttctgttgaaaggctttggcttcccgctgtagagctgctcccgccaccacctgctggggtcctgcctcagcccagtgcccagtatggggagaggaggacatttgggctcacctgtcaaggtggccctgggaccagagctggtcccagcatggggtgcaccgggtacacttaacgtgtctctataagccaagttgcttcaggaccttcaccactggcctctagaatggtccagaggggctggctgggtccctttgtcagactcctgccggcagctgccctgggggacatgtgtgcccatctggcatcctccagcccgtgcagtccgctcttcactgttccacggcctcccagtgcctcccagcattggacccatctccccctgcagtttgaggccagagaggtgagtggacctgacaagtgccagagtaaccgtgtagacagagcagtgtagacagcactcagccccagccccaggtgtggacctcatgctggtgatggctcccctgggtggcctgccagcacagccagtgccatcagggagctgaaggggctgtcccccacctaactccagctcccccttcacgttgtcaccaaggccctgtgccgcccgcctcgcccccctgctctgtggattcctttgggaagggctccctgggcaggacaataaagagttttgactccaaaaaagaagaaaagaaaaacaaacacgaacaagcgagacacaggagcatgagcagcatggaagagcacaggacgaacagccaggaggggggcgcgctacctaccgaacccgacggcgagccacacaagccgacccgcagttgatgaaccagcgcgccgaagaggacaggaaaaacgagcacgcgccctcaactgcgcagaaagccagcgtgctgggaacaccccacgggggcaaaggggacccacacgatagaggcgataagcgcggtgaggcacaccttgcgggcggcgataataccggactc

SEQ ID NO: 99341 - DNA, 1335 bp, Homo sapiens
ggccagtcggagcggggcgcgcgccgcatggcggaagcggaagggagttctctgctcttgttgccgccgccgccacccccgcccaggatggcggaagtggaggcgccgacggcggccgagacggacatgaagcaatatcaaggctccggcggcgtcgccatggatgtggaacggagtcgcttcccctactgcgtggtgtggacgcccatcccggtgctcacgtggtttttccccatcatcggccacatgggcatctgcacatccacaggagtcattcgggacttcgcgggcccctactttgtctcagaggacaacatggcctttggaaagcctgccaagtactggaagttggaccctgctcaggtctatgctagcgggcccaacgcatgggacacggctgtgcacgacgcctctgaggagtacaagcaccgcatgcacaatctctgctgtgacaactgccactcgcacgtggcattggccctgaatctgatgcgctacaacaacagcaccaactggaatatggtgacgctctgcttcttctgcctgctctacgggaagtacgtcagcgttggggccttcgtgaagacctggctgcccttcatccttctcctgggcatcatcctcaccgtcagcctggtctttaacctccggtgatggctgctcggtggccccacacccaccagggtcccgaggaaacagccgccatcccttttggttccagatttttttctcctcaccccaaaaggcagggttgggcctgctgttgtggaccgggggtcggggctggcaggatggaaggactgaggaccagcatgaagtgggggtttgttgtctccctgcctctcagaagcaccctgtcccctcctccccaggcctgtgactccggccctggaagcccctttgttcttctgttgaaaggctttggcttcccgctgtagagctgctcccgccaccacctgctggggtcctgcctcagcccagtgcccagtatggggagaggaggacatttgggctcacctgtcaaggtggccctgggaccagagctggtcccagcatggggtgcaccgggtacacttaacgtgtctctataagccaagttgcttcaggaccttcaccactggcctctagaatggtccagaggggctggctgggtccctttgtcagactcctgccggcagctgccctgggggacatgtgtgcccatctggcatcctccagcccgtgcagtccgctcttcactgttccaaggccctgtgccgcccgcctcgcccccctgctctgtggattcctttgggaagggctccctgggcaggacaataaagagttttgactcca

SEQ ID NO: 99342 - DNA, 1676 bp, Homo sapiens
gctgtacggtccggaatttgggatggcggaagtggaggcgccgacggcggccgagacggacatgaagcaatatcaaggctccggcggcgtcgccatggatgtggaacggagtcgcttcccctactgcgtggtgtggacgcccatcccggtgctcacgtggtttttccccatcatcggccacatgggcatctgcacatccacaggagtcattcgggacttcgcgggcccctactttgtctcagacaggccgggagggcagtgtggccagaaggattcttaagtaactgacccagccctttgcccccacccctggggtaccgagacatgggtagggattagaggcaagagtggagagtcagaccatccaggaaccacatctctggaccttcagaaggaggacaacatggcctttggaaagcctgccaagtactggaagttggaccctgctcaggtctatgctagcgggcccaacgcatgggacacggctgtgcacgacgcctctgaggagtacaagcaccgcatgcacaatctctgctgtgacaactgccactcgcacgtggcattggccctgaatctgatgcgctacaacaacagcaccaactggaatatggtgacgctctgcttcttctgcctgctctacgggaagtacgtcagcgttggggccttcgtgaagacctggctgcccttcatccttctcctgggcatcatcctcaccgtcagcctggtctttaacctccggtgatggctgctcggtggccccacacccaccagggtcccgaggaaacagccgccatcccttttggttccagatttttttctcctcaccccaaaaggcagggttgggcctgctgttgtggaccgggggtcggggctggcaggatggaaggactgaggaccagcatgaagtgggggtttgttgtctccctgcctctcagaagcaccctgtcccctcctccccaggcctgtgactccggccctggaagcccctttgttcttctgttgaaaggctttggcttcccgctgtagagctgctcccgccaccacctgctggggtcctgcctcagcccagtgcccagtatggggagaggaggacatttgggctcacctgtcaaggtggccctgggaccagagctggtcccagcatggggtgcaccgggtacacttaacgtgtctctataagccaagttgcttcaggaccttcaccactggcctctagaatggtccagaggggctggctgggtccctttgtcagactcctgccggcagctgccctgggggacatgtgtgcccatctggcatcctccagcccgtgcagtccgctcttcactgttccacggcctcccagtgcctcccagcattggacccatctccccctgcagtttgaggccagagaggtgagtggacctgacaagtgccagagtaaccgtgtagacagagcagtgtagacagcactcagccccagccccaggtgtggacctcatgctggtgatggctcccctgggtggcctgccagcacagccagtgccatcagggagctgaaggggctgtcccccacctaactccagctcccccttcacgttgtcaccaaggccctgtgccgcccgcctcgcccccctgctctgtggattcctttgggaagggctccctgggcaggacaataaagagttttgactcca

SEQ ID NO: 99343 - DNA, 1598 bp, Homo sapiens
gctgtacggtccggaatttgggatggcggaagtggaggcgccgacggcggccgagacggacatgaagcaatatcaaggctccggcggcgtcgccatggatgtggaacggagtcgcttcccctactgcgtggtgtggacgcccatcccggtgctcacgtggtttttccccatcatcggccacatgggcatctgcacatccacaggagtcattcgggacttcgcgggcccctactttgtctcagaggacaacatggcctttggaaagcctgccaagtgtcacctccaggaagccttctcacaccccatcttagtccgttctggctgccataacaaaatctcatcaattgggtactggaagttggaccctgctcaggtctatgctagcgggcccaacgcatgggacacggctgtgcacgacgcctctgaggagtacaagcaccgcatgcacaatctctgctgtgacaactgccactcgcacgtggcattggccctgaatctgatgcgctacaacaacagcaccaactggaatatggtgacgctctgcttcttctgcctgctctacgggaagtacgtcagcgttggggccttcgtgaagacctggctgcccttcatccttctcctgggcatcatcctcaccgtcagcctggtctttaacctccggtgatggctgctcggtggccccacacccaccagggtcccgaggaaacagccgccatcccttttggttccagatttttttctcctcaccccaaaaggcagggttgggcctgctgttgtggaccgggggtcggggctggcaggatggaaggactgaggaccagcatgaagtgggggtttgttgtctccctgcctctcagaagcaccctgtcccctcctccccaggcctgtgactccggccctggaagcccctttgttcttctgttgaaaggctttggcttcccgctgtagagctgctcccgccaccacctgctggggtcctgcctcagcccagtgcccagtatggggagaggaggacatttgggctcacctgtcaaggtggccctgggaccagagctggtcccagcatggggtgcaccgggtacacttaacgtgtctctataagccaagttgcttcaggaccttcaccactggcctctagaatggtccagaggggctggctgggtccctttgtcagactcctgccggcagctgccctgggggacatgtgtgcccatctggcatcctccagcccgtgcagtccgctcttcactgttccacggcctcccagtgcctcccagcattggacccatctccccctgcagtttgaggccagagaggtgagtggacctgacaagtgccagagtaaccgtgtagacagagcagtgtagacagcactcagccccagccccaggtgtggacctcatgctggtgatggctcccctgggtggcctgccagcacagccagtgccatcagggagctgaaggggctgtcccccacctaactccagctcccccttcacgttgtcaccaaggccctgtgccgcccgcctcgcccccctgctctgtggattcctttgggaagggctccctgggcaggacaataaagagttttgactcca

SEQ ID NO: 99344 - DNA, 1764 bp, Homo sapiens
gctgtacggtccggaatttgggatggcggaagtggaggcgccgacggcggccgagacggacatgaagcaatatcaaggctccggcggcgtcgccatggatgtggaacggagtcgcttcccctactgcgtggtgtggacgcccatcccggtgctcacgtggtttttccccatcatcggccacatgggcatctgcacatccacaggagtcattcgggacttcgcgggcccctactttgtctcagacaggccgggagggcagtgtggccagaaggattcttaagtaactgacccagccctttgcccccacccctggggtaccgagacatgggtagggattagaggcaagagtggagagtcagaccatccaggaaccacatctctggaccttcagaaggaggacaacatggcctttggaaagcctgccaagtactggaagttggaccctgctcaggtctatgctagcgggcccaacgcatgggacacggctgtgcacgacgcctctgaggagtacaagcaccgcatgcacaatctctgctgtgacaactgccactcgcacgtggcattggccctgaatctgatgcgctacaacaacagcaccaactggaatatggtgacgctctgcttcttctgcctgctctacgggaagtacgtcaggtcccttcctaggcagagagattgagtgagtcgcccatggtcgccacagcatggacacagcagagcccagactcgtgagccagcatagcgttggggccttcgtgaagacctggctgcccttcatccttctcctgggcatcatcctcaccgtcagcctggtctttaacctccggtgatggctgctcggtggccccacacccaccagggtcccgaggaaacagccgccatcccttttggttccagatttttttctcctcaccccaaaaggcagggttgggcctgctgttgtggaccgggggtcggggctggcaggatggaaggactgaggaccagcatgaagtgggggtttgttgtctccctgcctctcagaagcaccctgtcccctcctccccaggcctgtgactccggccctggaagcccctttgttcttctgttgaaaggctttggcttcccgctgtagagctgctcccgccaccacctgctggggtcctgcctcagcccagtgcccagtatggggagaggaggacatttgggctcacctgtcaaggtggccctgggaccagagctggtcccagcatggggtgcaccgggtacacttaacgtgtctctataagccaagttgcttcaggaccttcaccactggcctctagaatggtccagaggggctggctgggtccctttgtcagactcctgccggcagctgccctgggggacatgtgtgcccatctggcatcctccagcccgtgcagtccgctcttcactgttccacggcctcccagtgcctcccagcattggacccatctccccctgcagtttgaggccagagaggtgagtggacctgacaagtgccagagtaaccgtgtagacagagcagtgtagacagcactcagccccagccccaggtgtggacctcatgctggtgatggctcccctgggtggcctgccagcacagccagtgccatcagggagctgaaggggctgtcccccacctaactccagctcccccttcacgttgtcaccaaggccctgtgccgcccgcctcgcccccctgctctgtggattcctttgggaagggctccctgggcaggacaataaagagttttgactcca

SEQ ID NO: 99345 - DNA, 1322 bp, Homo sapiens
atagatggagccagtgaggcctagaaatggggagcatgtttcctgttcccaaccagcgaggtgtcagtaaatcaccaggagcgcggagcagcccctgcccgggaccatagctggtgatcccccatagtgggcaaccatgcccagcctgcttccttgattggccaagtttggggtgagggggtggttgggttttccttagggatggcagccctattggggtctgtgggtgctcagggctgcgggccgcatgcctgctcaccaggccctgcccacctatgctcgctcctttctctctgtcagcgttggggccttcgtgaagacctggctgcccttcatccttctcctgggcatcatcctcaccgtcagcctggtctttaacctccggtgatggctgctcggtggccccacacccaccagggtcccgaggaaacagccgccatcccttttggttccagatttttttctcctcaccccaaaaggcagggttgggcctgctgttgtggaccgggggtcggggctggcaggatggaaggactgaggaccagcatgaagtgggggtttgttgtctccctgcctctcagaagcaccctgtcccctcctccccaggcctgtgactccggccctggaagcccctttgttcttctgttgaaaggctttggcttcccgctgtagagctgctcccgccaccacctgctggggtcctgcctcagcccagtgcccagtatggggagaggaggacatttgggctcacctgtcaaggtggccctgggaccagagctggtcccagcatggggtgcaccgggtacacttaacgtgtctctataagccaagttgcttcaggaccttcaccactggcctctagaatggtccagaggggctggctgggtccctttgtcagactcctgccggcagctgccctgggggacatgtgtgcccatctggcatcctccagcccgtgcagtccgctcttcactgttccacggcctcccagtgcctcccagcattggacccatctccccctgcagtttgaggccagagaggtgagtggacctgacaagtgccagagtaaccgtgtagacagagcagtgtagacagcactcagccccagccccaggtgtggacctcatgctggtgatggctcccctgggtggcctgccagcacagccagtgccatcagggagctgaaggggctgtcccccacctaactccagctcccccttcacgttgtcaccaaggccctgtgccgcccgcctcgcccccctgctctgtggattcctttgggaagggctccctgggcaggacaataaagagttttgactcca

SEQ ID NO: 99346 - DNA, 898 bp, Homo sapiens
ggccagtcggagcggggcgcgcgccgcatggcggaagcggaagggagttctctgctcttgttgccgccgccgccacccccgcccaggatggcggaagtggaggcgccgacggcggccgagacggacatgaagcaatatcaaggctccggcggcgtcgccatggatgtggaacggagtcgcttcccctactgcgtggtgtggacgcccatcccggtgctcacgtggtttttccccatcatcggccacatgggcatctgcacatccacaggagtcattcgggacttcgcgggcccctactttgtctcagaggacaacatggcctttggaaagcctgccaagtactggaagttggaccctgctcaggtctatgctagcgggcccaacgcatgggacacggctgtgcacgacgcctctgaggagtacaagcaccgcatgcacaatctctgctgtgacaactgccactcgcacgtggcattggccctgaatctgatgcgctacaacaacagcaccaactggaatatggtgacgctctgcttcttctgcctgctctacgggaagtacgtcaggtgagctgccctcctgcctgcccacccacacactgcccagaggctgctctcccaaggatcctagaaagaccattcctagcgtccttcagtcagccaggacagttggaacagatgccagttggagccgtggtggttctagagtgacgagctgagggcctgatggagagggaggtggctgtgctgaagtccagctccacctgggccccaaatgcagctctggctcttgcctgctgtgagaccatgggcaactgccttggtctctcttagccacagctgtctctggtgaaatgcaggcaatgattccggctcctcagggaggcttctacggatcc

SEQ ID NO: 99347 - DNA, 396 bp, Homo sapiens
gctgtacggtccggaatttgggatggcggaagtggaggcgccgacggcggccgagacggacatgaagcaatatcaaggctccggcggcgtcgccatggatgtggaacggagtcgcttcccctactgcgtggtgtggacgcccatcccggtgctcacgtggtttttccccatcatcggccacatgggcatctgcacatccacaggagtcattcgggacttcgcgggcccctactttgtctcagaggacaacatggcctttggaaagcctgccaaactcactctcctgccctttgggaacaaatgaggcatggaaggtagaagagaggcattgtttggagctctgctggaaagttctggttggagagaataaaaaccgttcaaccttctgggagctat

SEQ ID NO: 99348 - DNA, 1792 bp, Homo sapiens
  misc_feature (1607)..(1607): n is a, c, g, or t
  misc_feature (1610)..(1610): n is a, c, g, or t
  misc_feature (1613)..(1613): n is a, c, g, or t
  misc_feature (1615)..(1615): n is a, c, g, or t
ggccagtcggagcggggcgcgcgccgcatggcggaagcggaagggagttctctgctcttgttgccgccgccgccacccccgcccaggatggcggaagtggaggcgccgacggcggccgagacggacatgaagcaatatcaaggctccggcggcgtcgccatggatgtggaacggagtcgcttcccctactgcgtggtgtggacgcccatcccggtgctcacgtggtttttccccatcatcggccacatgggcatctgcacatccacaggagtcattcgggacttcgcgggcccctactttgtctcagaggacaacatggcctttggaaagcctgccaagtactggaagttggaccctgctcaggtctatgctagcgggcccaacgcatgggacacggctgtgcacgacgcctctgaggagtacaagcaccgcatgcacaatctctgctgtgacaactgccactcgcacgtggcattggccctgaatctgatgcgctacaacaacagcaccaactggaatatggtgacgctctgcttcttctgcctgctctacgggaagtacgtcagcgttggggccttcgtgaagacctggctgcccttcatccttctcctgggcatcatcctcaccgtcagcctggtctttaacctccggtgatggctgctcggtggccccacacccaccagggtcccgaggaaacagccgccatcccttttggttccagatttttttctcctcaccccaaaaggcagggttgggcctgctgttgtggaccgggggtcggggctggcaggatggaaggactgaggaccagcatgaagtgggggtttgttgtctccctgcctctcagaagcaccctgtcccctcctccccaggcctgtgactccggccctggaagcccctttgttcttctgttgaaaggctttggcttcccgctgtagagctgctcccgccaccacctgctggggtcctgcctcagcccagtgcccagtatggggagaggaggacatttgggctcacctgtcaaggtggccctgggaccagagctggtcccagcatggggtgcaccgggtacacttaacgtgtctctataagccaagttgcttcaggaccttcaccactggcctctagaatggtccagaggggctggctgggtccctttgtcagactcctgccggcagctgccctgggggacatgtgtgcccatctggcatcctccagcccgtgcagtccgctcttcactgttccacggcctcccagtgcctcccagcattggacccatctccccctgcagtttgaggccagagaggtgagtggacctgacaagtgccagagtaaccgtgtagacagagcagtgtagacagcactcagccccagccccaggtgtggacctcatgctggtgatggctcccctgggtggcctgccagcacagccagtgccatcagggagctgaaggggctgtcccccacctaactccagctcccccttcacgttgtcaccaaggccctgtgccgcccgcctcgcccccctgctctgtggattcctttgggaagggctccctgggcaggacaataaagagttttgactccaaaaaaaaaaaacaaaaaanaanaananaaaaaaaaaaaaaaaaaaaaggggggggggggtaaaaagattcccgggggggggccaaaattaaggcaccaccaagttttttttaacaagggggcccataaagggggcgatataaaaaagggagaaggggcggtttaaaaagcgtgtcgggaaaacgcgtccggatcttggagggct

SEQ ID NO: 99349 - DNA, 1462 bp, Homo sapiens
ggccagtcggagcggggcgcgcgccgcatggcggaagcggaagggagttctctgctcttgttgccgccgccgccacccccgcccaggatggcggaagtggaggcgccgacggcggccgagacggacatgaagcaatatcaaggctccggcggcgtcgccatggatgtggaacggagtcgcttcccctactgcgtggtgtggacgcccatcccggtgctcacgtggtttttccccatcatcggccacatgggcatctgcacatccacaggagtcattcgggacttcgcgggcccctactttgtctcagaggacaacatggcctttggaaagcctgccaagtactggaagttggaccctgctcaggtctatgctagcgggcccaacgcatgggacacggctgtgcacgacgcctctgaggagtacaagcaccgcatgcacaatctctgctgtgacaactgccactcgcacgtggcattggccctgaatctgatgcgctacaacaacagcaccaactggaatatggtgacgctctgcttcttctgcctgctctacgggaagtacgtcagcgttggggccttcgtgaagacctggctgcccttcatccttctcctgggcatcatcctcaccgtcagcctggtctttaacctccggtgatggctgctcggtggccccacacccaccagggtcccgaggaaacagccgccatcccttttggttccagatttttttctcctcaccccaaaaggcagggttgggcctgctgttgtggaccgggggtcggggctggcaggatggaaggactgaggaccagcatgaagtgggggtttgttgtctccctgcctctcagaagcaccctgtcccctcctccccaggcctgtgactccggccctggaagcccctttgttcttctgttgaaaggctttggcttcccgctgtagagctgctcccgccaccacctgctggggtcctgcctcagcccagtgcccagtatggggagaggaggacatttgggctcacctgtcaaggtggccctgggaccagagctggtcccagcatggggtgcaccgggtacacttaacgtgtctctataagccaagttgcttcaggaccttcaccactggcctctagaatggtccagaggggctggctgggtccctttgtcagactcctgccggcagctgccctgggggacatgtgtgcccatctggcatcctccaacagagcagtgtagacagcactcagccccagccccaggtgtggacctcatgctggtgatggctcccctgggtggcctgccagcacagccagtgccatcagggagctgaaggggctgtcccccacctaactccagctcccccttcacgttgtcaccaaggccctgtgccgcccgcctcgcccccctgctctgtggattcctttgggaagggctccctgggcaggacaataaagagttttgactcca

SEQ ID NO: 99350 - DNA, 1286 bp, Homo sapiens
gccaagcaagtgtccagagcccttctctccccccaggtactggaagttggaccctgctcaggtctatgctagcgggcccaacgcatgggacacggctgtgcacgacgcctctgaggagtacaagcaccgcatgcacaatctctgctgtgacaactgccactcgcacgtggcattggccctgaatctgatgcgctacaacaacagcaccaactggaatatggtgacgctctgcttcttctgcctgctctacgggaagtacgtcagcgttggggccttcgtgaagacctggctgcccttcatccttctcctgggcatcatcctcaccgtcagcctggtctttaacctccggtgatggctgctcggtggccccacacccaccagggtcccgaggaaacagccgccatcccttttggttccagatttttttctcctcaccccaaaaggcagggttgggcctgctgttgtggaccgggggtcggggctggcaggatggaaggactgaggaccagcatgaagtgggggtttgttgtctccctgcctctcagaagcaccctgtcccctcctccccaggcctgtgactccggccctggaagcccctttgttcttctgttgaaaggctttggcttcccgctgtagagctgctcccgccaccacctgctggggtcctgcctcagcccagtgcccagtatggggagaggaggacatttgggctcacctgtcaaggtggccctgggaccagagctggtcccagcatggggtgcaccgggtacacttaacgtgtctctataagccaagttgcttcaggaccttcaccactggcctctagaatggtccagaggggctggctgggtccctttgtcagactcctgccggcagctgccctgggggacatgtgtgcccatctggcatcctccagcccgtgcagtccgctcttcactgttccacggcctcccagtgcctcccagcattggacccatctccccctgcagtttgaggccagagaggtgagtggacctgacaagtgccagagtaaccgtgtagacagagcagtgtagacagcactcagccccagccccaggtgtggacctcatgctggtgatggctcccctgggtggcctgccagcacagccagtgccatcagggagctgaaggggctgtcccccacctaactccagctcccccttcacgttgtcaccaaggccctgtgccgcccgcctcgcccccctgctctgtggattcctttgggaagggctccctgggcaggacaataaagagttttgactcca

SEQ ID NO: 99351 - DNA, 1676 bp, Homo sapiens
ggccagtcggagcggggcgcgcgccgcatggcggaagcggaagggagttctctgctcttgttgccgccgccgccacccccgcccaggatggcggaagtggaggcgccgacggcggccgagacggacatgaagcaatatcaaggctccggcggcgtcgccatggatgtggaacggagtcgcttcccctactgcgtggtgtggacgcccatcccggtgctcacgtggtttttccccatcatcggccacatgggcatctgcacatccacaggagtcattcgggacttcgcgggcccctactttgtctcagaggacaacatggcctttggaaagcctgccaagtactggaagttggaccctgctcaggtctatgctagcgggcccaacgcatgggacacggctgtgcacgacgcctctgaggagtacaagcaccgcatgcacaatctctgctgtgacaactgccactcgcacgtggcattggccctgaatctgatgcgctacaacaacagcaccaactggaatatggtgacgctctgcttcttctgcctgctctacgggaagtacgtcaggtcccttcctaggcagagagattgagtgagtcgcccatggtcgccacagcatggacacagcagagcccagactcgtgagccagcatagcgttggggccttcgtgaagacctggctgcccttcatccttctcctgggcatcatcctcaccgtcagcctggtctttaacctccggtgatggctgctcggtggccccacacccaccagggtcccgaggaaacagccgccatcccttttggttccagatttttttctcctcaccccaaaaggcagggttgggcctgctgttgtggaccgggggtcggggctggcaggatggaaggactgaggaccagcatgaagtgggggtttgttgtctccctgcctctcagaagcaccctgtcccctcctccccaggcctgtgactccggccctggaagcccctttgttcttctgttgaaaggctttggcttcccgctgtagagctgctcccgccaccacctgctggggtcctgcctcagcccagtgcccagtatggggagaggaggacatttgggctcacctgtcaaggtggccctgggaccagagctggtcccagcatggggtgcaccgggtacacttaacgtgtctctataagccaagttgcttcaggaccttcaccactggcctctagaatggtccagaggggctggctgggtccctttgtcagactcctgccggcagctgccctgggggacatgtgtgcccatctggcatcctccagcccgtgcagtccgctcttcactgttccacggcctcccagtgcctcccagcattggacccatctccccctgcagtttgaggccagagaggtgagtggacctgacaagtgccagagtaaccgtgtagacagagcagtgtagacagcactcagccccagccccaggtgtggacctcatgctggtgatggctcccctgggtggcctgccagcacagccagtgccatcagggagctgaaggggctgtcccccacctaactccagctcccccttcacgttgtcaccaaggccctgtgccgcccgcctcgcccccctgctctgtggattcctttgggaagggctccctgggcaggacaataaagagttttgactcca

SEQ ID NO: 99352 - DNA, 801 bp, Homo sapiens
ggccagtcggagcggggcgcgcgccgcatggcggaagcggaagggagttctctgctcttgttgccgccgccgccacccccgcccaggatggcggaagtggaggcgccgacggcggccgagacggacatgaagcaatatcaaggctccggcggcgtcgccatggatgtggaacggagtcgcttcccctactgcgtggtgtggacgcccatcccggtgctcacgtggtttttccccatcatcggccacatgggcatctgcacatccacaggagtcattcgggacttcgcgggcccctactttgtctcagaggacaacatggcctttggaaagcctgccaagtactggaagttggaccctgctcaggtctatgctagcgggcccaacgcatgggacacggctgtgcacgacgcctctgaggagtacaagcaccgcatgcacaatctctgctgtgacaactgccactcgcacgtggcattggccctgaatctgatgcgctacaacaacagcaccaactggaatatggtgacgctctgcttcttctgcctgctctacgggaagtacgtcaggtcccttcctaggcagagagattgagtgagtcgcccatggtcgccacagcatggacacagcagagcccagactcgtgagccagcataggttagtgctgatctggccgcctctccaagctttcctcttagccacgttcatcattaagaggttctgaaaagaagacttttagggatatttttaagtactgcatggcttttagaagtcccctgagaataactggtcacacagaggttg

SEQ ID NO: 99353 - DNA, 415 bp, Homo sapiens
acatccccatggggagtaaagagtggatagcggaggccagtttggagcttggcccctatgcaaacactgggcacacaggcagttaagaaagaactaaacattgtgtcctacgtccctggcactggggggctctgttagtagctacccaggcaggaatccccaattctcaagctttggagaagttaggatgtagaggctaaatcatactcaattcagaaaaacactggtagggatacactgacctagttcaatagctacagtagaggggtaggaaaggttgacagtcagatcacataggacaaaaaccagaatcaaattacaaggctcaattaggcaacaaagacatattttgtagatcacacattaacagtaagtaaagttctatagactggagtttccagccccataccctccc

SEQ ID NO: 99354 - DNA, 695 bp, Homo sapiens
ttttttgcccttactactcttcagcaatttccctcttctcaaatatttatattacccttttatctgtaggattatataccaagaaagcaaaacaaaacagagcagccacgggctcgaaccgaatccccgccgtccttagaaacggatttttttttgttttgttttgttttctggcagagtctcgatcaccaccctacttccacccccactaaggttcttgctcaatctccctagaaaacctgaattgtttcatccctttcagtcagccccctacgtggtctgaaacaaaatgaaagcacaagccacggagtttaagaaggcagcctgaaggcggggggctgaagaggggtcggggcgctgcagagtcagccaagtagccaaggaagggccccctccgcgtcgcgacggccctcgccccccgcccggcgcgcgcgcgcacaaatacacacacacagtcactcacacactcactcacactcacgccgcgctccgacaccgcctcacctctcgctccgcccgtccggcccccttccctgccccctgcgggaccggcctgcgcgcagcactggaaccacgtaggaggaggcggcggcgcccccgggagtggcagagtctccggcccggcccagagtgaacgagcagtggggctccagggcgcatcccaatccccgcagcgcctcctccgcggcggccgc

SEQ ID NO: 99355 - DNA, 259 bp, Homo sapiens
tgtttgtacctaatcagtcaggctatggctttatcaatttctgatcttcaaattcaccttttagcttccttcattttttctactctttttctgtcttatgctttactagtttctgctgtgattttttcaaaatttttctctctttctaaacattgacctccatttcttctttttttttattttcttaaatggaaaacaaaatattgatttgagacacttcttgtctctaatttttcattctattttcctttggtccaag

SEQ ID NO: 99356 - DNA, 437 bp, Homo sapiens
cataattctggcaatgagagtatttttttattcaatgatcaaggagcaatgtcagtatatagtagaatatcaattaaattatatcctaaaatgtatattttgcataaaagagatattctttaatcaattacttttttgtgagttttgtggcaaatgaagcttgtacgtgtctttaaaactgttgtagatgaaactgtataagatttttacatcttgcttaatcaatattttcagagtctattagttcccctgggattctgaatataacatatagcctattataaatccctgtatcgtggaccttttgtgaacatttcaaggcgcatgcacaaccttgatgataaccagtggaaatgtaactaactgaaatgaagaataaaaggcaaatgagctggggataaacttgaatgttatctgattaaattactcaaattatt

SEQ ID NO: 99357 - DNA, 325 bp, Homo sapiens
taatgaaagagacacaaaaatagtcaatagaagacagacaaatattcaagtatttgtttctttctttccccgcttcaaatccttggttccaagtcaggcagggagaagagtatgcaaattcatgggtagcagaagttttaaattacctatcaagccttccatgactataaaagcgacaccaacctttccccaagtttcatctggatattttatcaggaatgacagagtggggaggttaaaaaacagtattgttttctacccttaaagtgttataggttttactggctggggataataaatagggaaacactgagggagatagaag

SEQ ID NO: 99358 - DNA, 384 bp, Homo sapiens
tcggcctcccaaagtactgggattacagacgtgagccaccgtgcacggctagtgattaatttcttataggccaagttctacatttcactttcctcaaaaaaaccttttctgattgtggcaggcagggcaatgggaacaaatacgtccgtgtcaaaatccctagtacctgtaaatatgtgaccttttattgaaaatgagactttgcagatgtgagtgagttaaaaatcttagcataagattatcctggatgatgaggttgggcccaatataatcacatgagtcctttaagtgtaaaaaagtgaggcagaagacagagaatcagagtaagatagggtgagaaagactggatcagccattgctggctttgaaggtggaagggggcct

SEQ ID NO: 99359 - DNA, 221 bp, Homo sapiens
ctccccaaaccctcttccccactggctggtgcctgctcacaaaaagccctttcagaatcttcctactgccccaacacactcaagaggcagcttccagggtccacagtccaaagtgatttgcatgcgatttgttccagcaaatgcctgagaagctatttaatatctgaggaatagattaggacccagggtcatggaatgtaaatattctaaatataaatact

SEQ ID NO: 99360 - DNA, 467 bp, Homo sapiens
acgctgtatacgacatcgctaacgaggacaccctacaagccgtcgctaacaaggacactgtacacaacatcgctaatgagggcaccatacaagacatcaccaatgagggcgctttatacgacattgctaatgataccgacaaggcacgctaacgcggacactgtacacgacatcgctaatgaggacaccgtataagacatcgctagtaactatcgcaagaacaaaaaaccaaacactgcatattctcactcataggtgggaattgaacaatgagatcacatggacacaggaaggggaatatcacactctggggactgttgtggggtgggggggggagggatagcatcgggagatatacctaatgctagatgacgagttagtgcgtgcagcacaccagcatggcacatgtatacatatgtaactagcctgcacaatgtgcacatgtaccctaaaacttaaagtataat

SEQ ID NO: 99361 - DNA, 298 bp, Homo sapiens
gacatcgtgtcactgcactccagcctggcgacagagcgagactccatctcaaaaacaaaaaacaaaacaaaaaaacaaaaaactagatgatactgtctgtctcctttgataactatgcaaactgcaaaagctcccagaagcatagggtagaataaaggctgaaccaaaaagaaaccaggccatgattaagtattttaagctttcataaaaagtagaaatggggtcgggcatggtggctcacgcctgtaatcccagcactttgggaggccgaggtgggtggatcgcctgaggtcagcag

SEQ ID NO: 99362 - DNA, 527 bp, Homo sapiens
tacctggatcatggcagcagcctccttgctggtcttccttcctcagtcctctcctcccttcaccatcccttgagagaacagacctgcagcccaggcatcctcagcgcctcttttcagataaccacattcctatttaaaacagaaccagcccatgcccactctcagtccacgaggtccaggtgtagatggccctatacgccaccctttcaggagagacgtgaacctggtctagcctgtctgaaaccagaggctcaattctaggacactacctgggtttctgagaattggatgtaggcctggagcttctagccatcagcttagtgctggagaaaggcacctccctgagaaaggagctggcacagagatggtaagaagagacccataaatcgtgactttgccagagcccctggatccagcaggctgaaagccaggctatctttggtcttcagtaacttgagccaataaattcttttttgatccaactactttgaattgggtttttgtcacgtgcagctgaaacggtcatg

SEQ ID NO: 99363 - DNA, 392 bp, Homo sapiens
tttagatggagttttgctcttgttgcccaggctggaacacaatggcacgatctcagctcaccgcaacctccacctccccggttcaagcgattctcctggctgagcctcccaaattgctgggattacaggcgcccaccaccaggcccggctaattttttgtatttttagtagagacggggttttgccacattggacaggctggtctcaaactcctgacctcaggtgatccacttgcctcggcctcccaaagtgctgggattactggcatgagccaccgcgcccggccaggaataagtattttagaactggttttccaatctttcatttcataatgttcataaactaccttctgaattgtatctacaattaaaaatcacaatctccattaaccg

SEQ ID NO: 99364 - DNA, 380 bp, Homo sapiens
ttttttttttttgagatggagtctggctctgttgcccaggctggagtgccgtggtgcaatcttggctcactgcaaactccgccgcctgggttcacaccattgtcctgcctcagcctcccaagtagcttggtctacaggtacccgccaccatgcccggctaattttttgtatttttagtagagacggggtttcgctgtgttagccaggatggtctccatctcctgatctggtgagctgcttgcctcggcctcccaaagtgctgggattataggcgtgagccaccacgcccagcctccatcaaaacaatcttaattataaacgactagctatgggtagactacaatattatatatgcactgggaaaaaaattattacatatg

SEQ ID NO: 99365 - DNA, 378 bp, Homo sapiens
gatgcccggagctattatgactatataaaagctatgggccaggcttcaggaggaataattggtgcaacagtagtacatccctggagatttagacagagattgagactattttagctaaaacacaaatgaaatattaatctttggctcatgactggcctagtcatttccaaacatgtctactggctgtatgcagtggattcttttgaaatacaaattcctctgtgacttttcccactgcccacaagatgaagtccacatcctcgagaacccatgcaaggccctccatggctggcttcagtttgttctgtcaagctgcctttcgttgcatggtgcttcagccaaacaagtcgattagcttattcaggtcctcaaaacact

SEQ ID NO: 99366 - DNA, 435 bp, Homo sapiens
aaaggcagtgtcacttagcagagcgccttcacccagaacaccagaggctgaatgtaacctctttatttctccaacttttcaccagttaaagggaaaaagtgaattaaagtgaaaaataaaagattagttgaagtaccttttcaaagactatattgcaaaaccaagtaatagcattagagatgatgaaattgtgtacctgcaggtatattggacagaaaggaaaaaatgcaatttgactgtgctttgcttttctgaataatctgccacctttttttaaatttgaagataagtctcaaaaaagtaatcagtgtttacattttagagcaaattttgtatttaaggtttatccagggttttattttatgctgtttcaggtatttaaagattctttgttaattaattgtaagacaaacttcacatgtttgtattaaagag

SEQ ID NO: 99367 - DNA, 339 bp, Homo sapiens
cccaagtccaacctctcaggctgcagccataaggacccaggatggctgacatcacttcacatttatcgggtgcccactgcataccaactacacactgggatcccagcagagaacagagtagacaagaaatttcactccatggagccaatattctggacatggtggagatgagggagtggcaaagactctatatcttaattttttttcagaaatggggtcttgctatgttgcccaggctggtcttgaactcctgggctcaagtgatctgcccaacttgcctctcaaagtgctgggattacaggcatgagccacctgatctggccctgcattttgataatt

SEQ ID NO: 99368 - DNA, 676 bp, Homo sapiens
cgcctcccaggctcaagtgattcttccacctcagcctcccaagtagttgggactacaggcttgtgccaccacacctggctaatttttgtatttttagtagagatggggtttcctggcctcaagtgatccacctgcctcggcctcccaaagtgctgggattacaggcatgagtcactgcacctgagctatagcaagcttttcaagacatgagtcttcatcctcaaaaaaaaaaaagaaatgccattggtcagtttcagcctatgggcttcccttttcttttgggaagatgaagctgtcactcagattaatcacccaaataaccactgggggcccagtgactaaagtgataatctcacagccacctcttgttaagtaagagagtctgacatggaagacctttacctaaacacagtaagaagtagcagttatgaagactttataaagccttgccctacagtaatgtcacctaaaccttccccttttccagtatccatttaaagaaagccccgtctaagctgcccatgtggctgtggcttacgtgggcaagcagggaaagcaacagacagcaagctgaattcttagcaggaaactggcccttcgaagtgcccccttccccttcaaattgcccccttcccctctcttgttttctacaacacccaggtaatccctaattcct

SEQ ID NO: 99369 - DNA, 5512 bp, Homo sapiens
aaggggccttctgaggtttgggggctgtagggccatgggcctcagggccagaggtggttgttagcctggcaagacaggtctgggcaacatgcatgcccagaggcagttcgttgtagctgcagtgagagcagaagtcagacgacatgaggtggccaagcaggctctaaaccgcctcaggaagctggcagagagggtggacgaccccgaactccaggacagcatccaggcctcattggacagcattcgagaggctgtgatcaatagccaggaatggactttgagccgctccattcctgaactgcgcctgggtgtgctgggcgatgccaggagtgggaagtcatcgctcatccaccgattcctgactggctcataccaggtgctggagaagacagagagtgagcagtacaagaaagaaatgttggtggatggacagacacatctggtgctaatccgagaggaagctggggcacctgatgccaagttctcaggctgggcagatgctgtgatcttcgtcttcagcctggaggatgagaacagtttccaggctgtgagccgtctccatgggcagctgagttcccttcgcggggagggacgaggaggcctggccttggcactggtggggacacaagacaggatcagtgcttcctcccctcgggtggtgggagatgctcgtgccagagctctgtgcgcggacatgaaacgctgcagctactatgagacttgtgcaacctatgggctcaatgtggatcgggtcttccaggaggtggcccagaaggtggtgaccttgcgcaagcagcaacagcttctggctgcctgcaagtccctgcccagctccccaagccactcagctgcatccactccggtagctggccaggctagtaacgggggccacactagcgactactcttcttccctcccgtcctcaccgaatgttggtcaccgggagctccgagccgaggcagctgcagtggctggattgagcaccccagggtccctgcaccgggcagccaagcgcaggaccagcctttttgcgaatcgtcggggtagtgactccgagaaacgaagcttggatagtcggggagagacaacagggagtgggcgagccatccccatcaaacagagcttcctactaaaacgaagtggcaattccttgaacaaagaatggaagaagaaatatgtaaccctgtccagtaatggctttctactctaccaccccagtattaacgattacatccacagtacccacggcaaggagatggacttgctgcgaacaacagtcaaagtcccgggcaagcggcccccgagggccatctctgcctttggcccctcagccagcattaacgggctcgtcaaggacatgagcactgtccagatgggtgaaggcctggaagccactactcccatgccaagccctagccccagccccagttccctgcagccaccaccagatcagacatccaaacacctgctgaagccagaccggaatttggcccgagccctcagcacggactgtaccccatctggagacctgagccccctgagtcgggaaccccctccttctcccatggtgaagaagcagaggaggaaaaaattgacaacaccatccaagactgaaggctcggctgggcaggctgaagaggaaaactttgagttcctgatcgtgtccagcacgggtcagacgtggcactttgaggcagccagttttgaggagcgggatgcctgggtccaggccatcgagagtcagatcctagccagtctgcaatgctgtgagagcagcaaggtcaagctgcgcacagacagccaaagcgaggccgtggccatccaggcgatccggaacgccaaggggaattcaatctgcgtggactgcggggcccccaaccccacgtgggccagcttgaacctgggcgccctcatctgcatcgagtgttctggcatccaccgcaacctgggcacacacctgtcccgcgttcgctcgctggacttggacgactggccacgggagctgaccctggtgctgacggctattggcaacgacacggccaaccgcgtgtgggaaagcgacacgcgaggccgtgccaagccctcgcgggactcttcgcgggaggagcgcgagtcgtggattcgcgccaagtacgagcagctactgttcctggcgccgctgagcacctcggaggagccgctgggccgccagctgtgggccgccgtgcaggcccaggacgtggctaccgttctcctgcttttggcccatgcgcgacacgggccgctcgacaccagcgtagaggacccacagctgcgctccccactccacctggcggccgagctcgcccacgtcgtcatcacgcaactgctgctgtgggtacgtgagtacggcgcggacgtggcggcccgtgacgcccagggccgcacggcgctgttctacgcccgccaggctggaagccagctgtgcgccgacatccttctccagcacggctgcccgggtgagggcggcagcgcggccaccacgcccagcgcggccaccacgcccagcatcaccgccacgcccagcccccgccgccggagcagcgccgctagcgtgggccgcgccgacgccccggttgcgctggtatagttgcccagcgggagagacacccccatccccacgcgggccgggcacgaccacaccgggcggaccgctggacagacgcacccactcacctctccgatccgcaccccgccccacgggagcacttcctacccccacgagggcacagcccccacgccttccagaagacacaaactcacctccctctccccaacgaggcatggagaccccagctcaacacgccccctctccattgtttccacactcggattgctctgggtctacccgctcggggttcgcggaaggggaggtccccagcggtacgggctcctaggcgcttggacatgcccgcttgtgccccctaggggcggaaagaagacccggtcctgcccgagctcaacaatcccagggcgggagcccatacccaggctggctcctggggcgacgccacgccagagggagggtttagtacatgggagggctagccccgggacttggggccaatacggaaaccctaccccttccatgctcatctcactgcccagtgaagggggcaagggcagcgaggggcaggacccctgctgctcatgggggtgggggttcccaaccctttccgtgaaagggaccgtgagtagtggaaaccaggacgtcccctacacctacccatgggtggaagctaaagagtccggggggaaccaagagcctgggtccctcccactactatcttgggagggagaagggatggagcaggagcgggctaagagggctgcgggggccttgtaatttattgctttgttccccaacatggggatgggggcgggcaggggcgtggggagggcgttttggggtaggggaagcccagggtgggcagggggtgggttggggtgggggtgctctcgggttgtgtctgtgaccgtgactgcgtacctgtgactgtgcagcgcccgtggtgatctggggtagggggcacccctacagtgggacccctcccccattattctttctgtccagcccctccctcccactggagcagctccagagccattcctcacccccgtgacctctcccagccagggctgagaggattcgaggtggctgggagggtttccaggccccctgccccttccccacaaactgggtgatagggcggacttacctggcccagccctgcctccctcagccaacccagcccttgggctgtctgtgtcagtggtttccggtctttttttttttttttttttctggctaaaatagtttgcaaaggaccaggtaattggggaggggagagaggtgggggcaagggggaaatgcccccccatctccttggaggcagtggtgtgaatcttcttcaacagcaattaaagaggaagtgattttgtctagggggtgagctgctggtctgttcttggaggcaggtcagggcatggccttggtcaagatggggtactggggttggacagggacaggcagaggtgcctcccactggggctggtggcaggacagtacccatgggcatggaggtggttccatcatgtacaacagttctgggttcatgtagtggaggacgtgggcaggttggagtcagtggggaccctgggaacagagaaggcactgactcttaagatgatgccagtcctgggagagttgggatatggtacttagaggagaggacaggcccatggagaggggtgggaagatgggacagctttgtttaagagcaggaactttggagacagatctgattttgaaacctgcccctccactgcacagctaggggaccttggtggcatctgtttatctgtattctgaacagtatctgttcagagggcacctgaaaggcgctccagctctgaggagggctgccccgagccagcctgctcaccgtgagcactaggtaccagagtagaacatagagtaggggttcctcccctggcctcgtcagggggtgttccagagggaaggggtgggagacctcctgggaaagatttcccagctagctgcagaggtccctggtgtccacaaactcagtgtcagctgatgcaggcatttatccacctccgtgccatcaaagggaccaccaaggccacagcggcctgaagccggtgctgcctccatgagctgcagtgccactaggctcagcacatagccaatcctaccatttctcgagggcagctgaaagtgtttactcaggtagaggggctggacagggtagggttgggtcagcagccagtgcaggttgggcacagccatatgttgttatctaccttgaggagttagttggtagcaccagcatctttgggtagaattgcttctgacccttggtgcccaccagccccaagaggttcagctgcaagtgtgccactgaactgaggacacagcaccagacctgaatccagttcacatggaggctgcggctctacagggtcctaggctgtgaccacccagcacagcggcgtgacccaggaaaggtggattcaacagtgcaggtgcagtgacaagtacagaggcagctccactccttcctcgtggccaaagtttgctcccttcttcagaagtttgggagtgtgagagaatatgggaaggaaataaggaccctggagagaatgaaattgccttcaaagagcaagtgggaagttcctttcatttccagccagtgaaaaatggtcaaggtgtcagcaaacctcacaacaaatcccaacaccaagtaatccacttgcctcttgtcttaatggggagtgtctttggtcttgcgggggagatgtaaagggtggtagtggatggaatgacaaaatatcaagccctccaggttatgacaaaataggagcccagaaggggactccctgggtgggtgaaggagagctgctgcccctttgtgcccatgcccccttcacagctcaccctgggctgccttgcttggatgccctgccatgc

SEQ ID NO: 99370 - DNA, 4800 bp, Homo sapiens
aaggggccttctgaggtttgggggctgtagggccatgggcctcagggccagaggtggttgttagcctggcaagacaggtctgggcaacatgcatgcccagaggcagttcgttgtagctgcagtgagagcagaagtcagacgacatgaggtggccaagcaggctctaaaccgcctcaggaagctggcagagagggtggacgaccccgaactccaggacagcatccaggcctcattggacagcattcgagaggctgtgatcaatagccaggaatggactttgagccgctccattcctgaactgcgcctgggtgtgctgggcgatgccaggagtgggaagtcatcgctcatccaccgattcctgactggctcataccaggtgctggagaagacagagagtgagcagtacaagaaagaaatgttggtggatggacagacacatctggtgctaatccgagaggaagctggggcacctgatgccaagttctcaggctgggcagatgctgtgatcttcgtcttcagcctggaggatgagaacagtttccaggctgtgagccgtctccatgggcagctgagttcccttcgcggggagggacgaggaggcctggccttggcactggtggggacacaagacaggatcagtgcttcctcccctcgggtggtgggagatgctcgtgccagagctctgtgcgcggacatgaaacgctgcagctactatgagacttgtgcaacctatgggctcaatgtggatcgggtcttccaggaggtggcccagaaggtggtgaccttgcgcaagcagcaacagcttctggctgcctgcaagtccctgcccagctccccaagccactcagctgcatccactccggtagctggccaggctagtaacgggggccacactagcgactactcttcttccctcccgtcctcaccgaatgttggtcaccgggagctccgagccgaggcagctgcagtggctggattgagcaccccagggtccctgcaccgggcagccaagcgcaggaccagcctttttgcgaatcgtcggggtagtgactccgagaaacgaagcttggatagtcggggagagacaacagggagtgggcgagccatccccatcaaacagagcttcctactaaaacgaagtggcaattccttgaacaaagaatggaagaagaaatatgtaaccctgtccagtaatggctttctactctaccaccccagtattaacgattacatccacagtacccacggcaaggagatggacttgctgcgaacaacagtcaaagtcccgggcaagcggcccccgagggccatctctgcctttggcccctcagccagcattaacgggctcgtcaaggacatgagcactgtccagatgggtgaaggcctggaagccactactcccatgccaagccctagccccagccccagttccctgcagccaccaccagatcagacatccaaacacctgctgaagccagaccggaatttggcccgagccctcagcacggactgtaccccatctggagacctgagccccctgagtcgggaaccccctccttctcccatggtgaagaagcagaggaggaaaaaattgacaacaccatccaagactgaaggctcggctgggcaggctgaagaggaaaactttgagttcctgatcgtgtccagcacgggtcagacgtggcactttgaggcagccagttttgaggagcgggatgcctgggtccaggccatcgagagtcagatcctagccagtctgcaatgctgtgagagcagcaaggtcaagctgcgcacagacagccaaagcgaggccgtggccatccaggcgatccggaacgccaaggggaattcaatctgcgtggactgcggggcccccaaccccacgtgggccagcttgaacctgggcgccctcatctgcatcgagtgttctggcatccaccgcaacctgggcacacacctgtcccgcgttcgctcgctggacttggacgactggccacgggagctgaccctggtgctgacggctattggcaacgacacggccaaccgcgtgtgggaaagcgacacgcgaggccgtgccaagccctcgcgggactcttcgcgggaggagcgcgagtcgtggattcgcgccaagtacgagcagctactgttcctggcgccgctgagcacctcggaggagccgctgggccgccagctgtgggccgccgtgcaggcccaggacgtggctaccgttctcctgcttttggcccatgcgcgacacgggccgctcgacaccagcgtagaggacccacagctgcgctccccactccacctggcggccgagctcgcccacgtcgtcatcacgcaactgctgctgtgggtacgtgagtacggcgcggacgtggcggcccgtgacgcccagggccgcacggcgctgttctacgcccgccaggctggaagccagctgtgcgccgacatccttctccagcacggctgcccgggtgagggcggcagcgcggccaccacgcccagcgcggccaccacgcccagcatcaccgccacgcccagcccccgccgccggagcagcgccgctagcgtgggccgcgccgacgccccggttgcgctggtatagttgcccagcgggagagacacccccatccccacgcgggccgggcacgaccacaccgggcggaccgctggacagacgcacccactcacctctccgatccgcaccccgccccacgggagcacttcctacccccacgagggcacagcccccacgccttccagaagacacaaactcacctccctctccccaacgaggcatggagaccccagctcaacacgccccctctccattgtttccacactcggattgctctgggtctacccgctcggggttcgcggaaggggaggtccccagcggtacgggctcctaggcgcttggacatgcccgcttgtgccccctaggggcggaaagaagacccggtcctgcccgagctcaacaatcccagggcgggagcccatacccaggctggctcctggggcgacgccacgccagagggagggtttagtacatgggagggctagccccgggacttggggccaatacggaaaccctaccccttccatgctcatctcactgcccagtgaagggggcaagggcagcgaggggcaggacccctgctgctcatgggggtgggggttcccaaccctttccgtgaaagggaccgtgagtagtggaaaccaggacgtcccctacacctacccatgggtggaagctaaagagtccggggggaaccaagagcctgggtccctcccactactatcttgggagggagaagggatggagcaggagcgggctaagagggctgcgggggccttgtaatttattgctttgttccccaacatggggatgggggcgggcaggggcgtggggagggcgttttggggtaggggaagcccagggtgggcagggggtgggttggggtgggggtgctctcgggttgtgtctgtgaccgtgactgcgtacctgtgactgtgcagcgcccgtggtgatctggggtagggggcacccctacagtgggacccctcccccattattctttctgtccagcccctccctcccactggagcagctccagagccattcctcacccccgtgacctctcccagccagggctgagaggattcgaggtggctgggagggtttccaggccccctgccccttccccacaaactgggtgatagggcggacttacctggcccagccctgcctccctcagccaacccagcccttgggctgtctgtgtcagtggtttccggtctttttttttttttttttttctggctaaaatagtttgcaaaggaccaggtaattggggaggggagagaggtgggggcaagggggaaatgcccccccatctccttggaggcagtggtgtgaatcttcttcaacagcaattaaagaggaagtgattttgtctagggggtgagctgctggtctgttcttggaggcaggtcagggcatggccttggtcaagatggggtactggggttggacagggacaggcagaggtgcctcccactggggctggtggcaggacagtacccatgggcatggaggtggttccatcatgtacaacagttctgggttcatgtagtggaggacgtgggcaggttggagtcagtggggaccctgggaacagagaaggcactgactcttaagatgatgccagtcctgggagagttgggatatggtacttagaggagaggacaggcccatggagaggggtgggaagatgggacagctttgtttaagagcaggaactttggagacagatctgattttgaaacctgcccctccactgcacagctaggtgcagtgacaagtacagaggcagctccactccttcctcgtggccaaagtttgctcccttcttcagaagtttgggagtgtgagagaatatgggaaggaaataaggaccctggagagaatgaaattgccttcaaagagcaagtgggaagttcctttcatttccagccagtgaaaaatggtcaaggtgtcagcaaacctcacaacaaatcccaacaccaagtaatccacttgcctcttgtcttaatggggagtgtctttggtcttgcgggggagatgtaaagggtggtagtggatggaatgacaaaatatcaagccctccaggttatgacaaaataggagcccagaaggggactccctgggtgggtgaaggagagctgctgcccctttgtgcccatgcccccttcacagctcaccctgggctgccttgcttggatgccctgccatgc

SEQ ID NO: 99371 - DNA, 5781 bp, Homo sapiens
aaggggccttctgaggtttgggggctgtagggccatgggcctcagggccagaggtggttgttagcctggcaagacaggtctgggcaacatgcatgcccagaggcagttcgttgtagctgcagtgagagcagaagtcagacgacatgaggtggccaagcaggctctaaaccgcctcaggaagctggcagagagggtggacgaccccgaactccaggacagcatccaggcctcattggacagcattcgagaggctgtgatcaatagccaggaatggactttgagccgctccattcctgaactgcgcctgggtgtgctgggcgatgccaggagtgggaagtcatcgctcatccaccgattcctgactggctcataccaggtgctggagaagacagagagtgagcagtacaagaaagaaatgttggtggatggacagacacatctggtgctaatccgagaggaagctggggcacctgatgccaagttctcaggctgggcagatgctgtgatcttcgtcttcagcctggaggatgagaacagtttccaggctgtgagccgtctccatgggcagctgagttcccttcgcggggagggacgaggaggcctggccttggcactggtggggacacaagacaggatcagtgcttcctcccctcgggtggtgggagatgctcgtgccagagctctgtgcgcggacatgaaacgctgcagctactatgagacttgtgcaacctatgggctcaatgtggatcgggtcttccaggaggtggcccagaaggtggtgaccttgcgcaagcagcaacagcttctggctgcctgcaagtccctgcccagctccccaagccactcagctgcatccactccggtagctggccaggctagtaacgggggccacactagcgactactcttcttccctcccgtcctcaccgaatgttggtcaccgggagctccgagccgaggcagctgcagtggctggattgagcaccccagggtccctgcaccgggcagccaagcgcaggaccagcctttttgcgaatcgtcggggtagtgactccgagaaacgaagcttggatagtcggggagagacaacagggagtgggcgagccatccccatcaaacagagcttcctactaaaacgaagtggcaattccttgaacaaagaatggaagaagaaatatgtaaccctgtccagtaatggctttctactctaccaccccagtattaacgattacatccacagtacccacggcaaggagatggacttgctgcgaacaacagtcaaagtcccgggcaagcggcccccgagggccatctctgcctttggcccctcagccagcattaacgggctcgtcaaggacatgagcactgtccagatgggtgaaggcctggaagccactactcccatgccaagccctagccccagccccagttccctgcagccaccaccagatcagacatccaaacacctgctgaagccagaccggaatttggcccgagccctcagcacggactgtaccccatctggagacctgagccccctgagtcgggaaccccctccttctcccatggtgaagaagcagaggaggaaaaaattgacaacaccatccaagactgaaggctcggctgggcaggctgaagccaagcgcaaaatgtggaaactaaaatcctttggtagtttaagaaatatttataaagcaggtaacaagtggggagccgggaggggcgctcagctggggtgcagaagggtgggggtgcccccgccttcccctgcatgtgctcgggcttcctgctgccccccaccctctgctttccctacccccactgccccactcccaggggctcgggatggacatcagggaggacggtcttgggaaaggcagcccctgcttgaactctgtcccttaatgaccccatcccatcccccactcagaggaaaactttgagttcctgatcgtgtccagcacgggtcagacgtggcactttgaggcagccagttttgaggagcgggatgcctgggtccaggccatcgagagtcagatcctagccagtctgcaatgctgtgagagcagcaaggtcaaggtaagagtttgaggtggagtggaggactggccgcaggaactgaccctggtgctgacggccattggcaacgacacggccgaagtcgtgtgagaggagagcagaggtgtctgagaaggaggtggggcttggaggcagagtcagtgccaacccaaaccctctctgcagctgcgcacagacagccaaagcgaggccgtggccatccaggcgatccggaacgccaaggggaattcaatctgcgtggactgcggggcccccagtgagtgccaggaggcagcggaggggctagggagtgtagtgaatgccggggtgcctgtgctgcccggctgggagccgacctctacgctccttccgcagaccccacgtgggccagcttgaacctgggcgccctcatctgcatcgagtgttctggcatccaccgcaacctgggcacacacctgtcccgcgttcgctcgctggacttggacgactggccacgggagctgaccctggtgctgacggctattggcaacgacacggccaaccgcgtgtgggaaagcgacacgcgaggccgtgccaagccctcgcgggactcttcgcggtaagcgtgagggaacagagcggggggagggttgctgagggtgtgcgaacctgagacggtcccgtgggtaggggcagaagtcctggctgggggtccctagagccttttccgttgatccctggtcttgcagggaggagcgcgagtcgtggattcgcgccaagtacgagcagctactgttcctggcgccgctgagcacctcggaggagccgctgggccgccagctgtgggccgccgtgcaggcccaggacgtggctaccgttctcctgcttttggcccatgcgcgacacgggccgctcgacaccagcgtagaggacccacagctgcgctccccactccacctggcggccgagctcgcccacgtcgtcatcacgcaactgctgctgtgggtacgtgagctccctctccccaacgaggcatggagaccccagctcaacacgccccctctccattgtttccacactcggattgctctgggtctacccgctcggggttcgcggaaggggaggtccccagcggtacgggctcctaggcgcttggacatgcccgcttgtgccccctaggggcggaaagaagacccggtcctgcccgagctcaacaatcccagggcgggagcccatacccaggctggctcctggggcgacgccacgccagagggagggtttagtacatgggagggctagccccgggacttggggccaatacggaaaccctaccccttccatgctcatctcactgcccagtgaagggggcaagggcagcgaggggcaggacccctgctgctcatgggggtgggggttcccaaccctttccgtgaaagggaccgtgagtagtggaaaccaggacgtcccctacacctacccatgggtggaagctaaagagtccggggggaaccaagagcctgggtccctcccactactatcttgggagggagaagggatggagcaggagcgggctaagagggctgcgggggccttgtaatttattgctttgttccccaacatggggatgggggcgggcaggggcgtggggagggcgttttggggtaggggaagcccagggtgggcagggggtgggttggggtgggggtgctctcgggttgtgtctgtgaccgtgactgcgtacctgtgactgtgcagcgcccgtggtgatctggggtagggggcacccctacagtgggacccctcccccattattctttctgtccagcccctccctcccactggagcagctccagagccattcctcacccccgtgacctctcccagccagggctgagaggattcgaggtggctgggagggtttccaggccccctgccccttccccacaaactgggtgatagggcggacttacctggcccagccctgcctccctcagccaacccagcccttgggctgtctgtgtcagtggtttccggtctttttttttttttttttttctggctaaaatagtttgcaaaggaccaggtaattggggaggggagagaggtgggggcaagggggaaatgcccccccatctccttggaggcagtggtgtgaatcttcttcaacagcaattaaagaggaagtgattttgtctagggggtgagctgctggtctgttcttggaggcaggtcagggcatggccttggtcaagatggggtactggggttggacagggacaggcagaggtgcctcccactggggctggtggcaggacagtacccatgggcatggaggtggttccatcatgtacaacagttctgggttcatgtagtggaggacgtgggcaggttggagtcagtggggaccctgggaacagagaaggcactgactcttaagatgatgccagtcctgggagagttgggatatggtacttagaggagaggacaggcccatggagaggggtgggaagatgggacagctttgtttaagagcaggaactttggagacagatctgattttgaaacctgcccctccactgcacagctaggggaccttggtggcatctgtttatctgtattctgaacagtatctgttcagagggcacctgaaaggcgctccagctctgaggagggctgccccgagccagcctgctcaccgtgagcactaggtaccagagtagaacatagagtaggggttcctcccctggcctcgtcagggggtgttccagagggaaggggtgggagacctcctgggaaagatttcccagctagctgcagaggtccctggtgtccacaaactcagtgtcagctgatgcaggcatttatccacctccgtgccatcaaagggaccaccaaggccacagcggcctgaagccggtgctgcctccatgagctgcagtgccactaggctcagcacatagccaatcctaccatttctcgagggcagctgaaagtgtttactcaggtagaggggctggacagggtagggttgggtcagcagccagtgcaggttgggcacagccatatgttgttatctaccttgaggagttagttggtagcaccagcatctttgggtagaattgcttctgacccttggtgcccaccagccccaagaggttcagctgcaagtgtgccactgaactgaggacacagcaccagacctgaatccagttcacatggaggctgcggctctacagggtcctaggctgtgaccacccagcacagcggcgtgacccaggaaaggtggattcaacagtgcaggtgcagtgacaagtacagaggcagctccactccttcctcgtggccaaagtttgctcccttcttcagaagtttgggagtgtgagagaatatgggaaggaaataaggaccctggagagaatgaaattgccttcaaagagcaagtgggaagttcctttcatttccagccagtgaaaaatggtcaaggtgtcagcaaacctcacaacaaatcccaacaccaagtaatccacttgcctcttgtcttaatggggagtgtctttggtcttgcgggggagatgtaaagggtggtagtggatggaatgacaaaatatcaagccctccaggttatgacaaaataggagcccagaaggggactccctgggtgggtgaaggagagctgctgcccctttgtgcccatgcccccttcacagctcaccctgggctgccttgcttggatgccctgccatgc

SEQ ID NO: 99372 - DNA, 5955 bp, Homo sapiens
agcttcgacctctggtggggtcggggctggggctggagcccgagggaagttgtcccctcggaaaggcaagagtaagaccttggacaacagtgacttgcatccgggaccgcctgccggctctcctcctccgctaaccctcccaccaactccgagtccagccactgctgtcaccgctgcttccgcgcagccccccgggcctgcacctccaatcactctggagcctccagctccggggctgaaacggggccgggaggggggccgagcatccactcgtgaccgcaagatgctcaagtttatcagcggcatcttcaccaagagcacaggagggcctcctggctccgggccccttcccggaccccccagcctgtcttctggcagcgggtccagggagctgctgggcgccgagctccgcgcttcccctaaggctgtgatcaatagccaggaatggactttgagccgctccattcctgaactgcgcctgggtgtgctgggcgatgccaggagtgggaagtcatcgctcatccaccgattcctgactggctcataccaggtgctggagaagacagagagtgagcagtacaagaaagaaatgttggtggatggacagacacatctggtgctaatccgagaggaagctggggcacctgatgccaagttctcaggctgggcagatgctgtgatcttcgtcttcagcctggaggatgagaacagtttccaggctgtgagccgtctccatgggcagctgagttcccttcgcggggagggacgaggaggcctggccttggcactggtggggacacaagacaggatcagtgcttcctcccctcgggtggtgggagatgctcgtgccagagctctgtgcgcggacatgaaacgctgcagctactatgagacttgtgcaacctatgggctcaatgtggatcgggtcttccaggaggtggcccagaaggtggtgaccttgcgcaagcagcaacagcttctggctgcctgcaagtccctgcccagctccccaagccactcagctgcatccactccggtagctggccaggctagtaacgggggccacactagcgactactcttcttccctcccgtcctcaccgaatgttggtcaccgggagctccgagccgaggcagctgcagtggctggattgagcaccccagggtccctgcaccgggcagccaagcgcaggaccagcctttttgcgaatcgtcggggtagtgactccgagaaacgaagcttggatagtcggggagagacaacagggagtgggcgagccatccccatcaaacagagcttcctactaaaacgaagtggcaattccttgaacaaagaatggaagaagaaatatgtaaccctgtccagtaatggctttctactctaccaccccagtattaacgattacatccacagtacccacggcaaggagatggacttgctgcgaacaacagtcaaagtcccgggcaagcggcccccgagggccatctctgcctttggcccctcagccagcattaacgggctcgtcaaggacatgagcactgtccagatgggtgaaggcctggaagccactactcccatgccaagccctagccccagccccagttccctgcagccaccaccagatcagacatccaaacacctgctgaagccagaccggaatttggcccgagccctcagcacggactgtaccccatctggagacctgagccccctgagtcgggaaccccctccttctcccatggtgaagaagcagaggaggaaaaaattgacaacaccatccaagactgaaggctcggctgggcaggctgaagccaagcgcaaaatgtggaaactaaaatcctttggtagtttaagaaatatttataaagcaggtaacaagtggggagccgggaggggcgctcagctggggtgcagaagggtgggggtgcccccgccttcccctgcatgtgctcgggcttcctgctgccccccaccctctgctttccctacccccactgccccactcccaggggctcgggatggacatcagggaggacggtcttgggaaaggcagcccctgcttgaactctgtcccttaatgaccccatcccatcccccactcagaggaaaactttgagttcctgatcgtgtccagcacgggtcagacgtggcactttgaggcagccagttttgaggagcgggatgcctgggtccaggccatcgagagtcagatcctagccagtctgcaatgctgtgagagcagcaaggtcaaggtaagagtttgaggtggagtggaggactggccgcaggaactgaccctggtgctgacggccattggcaacgacacggccgaagtcgtgtgagaggagagcagaggtgtctgagaaggaggtggggcttggaggcagagtcagtgccaacccaaaccctctctgcagctgcgcacagacagccaaagcgaggccgtggccatccaggcgatccggaacgccaaggggaattcaatctgcgtggactgcggggcccccagtgagtgccaggaggcagcggaggggctagggagtgtagtgaatgccggggtgcctgtgctgcccggctgggagccgacctctacgctccttccgcagaccccacgtgggccagcttgaacctgggcgccctcatctgcatcgagtgttctggcatccaccgcaacctgggcacacacctgtcccgcgttcgctcgctggacttggacgactggccacgggagctgaccctggtgctgacggctattggcaacgacacggccaaccgcgtgtgggaaagcgacacgcgaggccgtgccaagccctcgcgggactcttcgcggtaagcgtgagggaacagagcggggggagggttgctgagggtgtgcgaacctgagacggtcccgtgggtaggggcagaagtcctggctgggggtccctagagccttttccgttgatccctggtcttgcagggaggagcgcgagtcgtggattcgcgccaagtacgagcagctactgttcctggcgccgctgagcacctcggaggagccgctgggccgccagctgtgggccgccgtgcaggcccaggacgtggctaccgttctcctgcttttggcccatgcgcgacacgggccgctcgacaccagcgtagaggacccacagctgcgctccccactccacctggcggccgagctcgcccacgtcgtcatcacgcaactgctgctgtgggtacgtgagctccctctccccaacgaggcatggagaccccagctcaacacgccccctctccattgtttccacactcggattgctctgggtctacccgctcggggttcgcggaaggggaggtccccagcggtacgggctcctaggcgcttggacatgcccgcttgtgccccctaggggcggaaagaagacccggtcctgcccgagctcaacaatcccagggcgggagcccatacccaggctggctcctggggcgacgccacgccagagggagggtttagtacatgggagggctagccccgggacttggggccaatacggaaaccctaccccttccatgctcatctcactgcccagtgaagggggcaagggcagcgaggggcaggacccctgctgctcatgggggtgggggttcccaaccctttccgtgaaagggaccgtgagtagtggaaaccaggacgtcccctacacctacccatgggtggaagctaaagagtccggggggaaccaagagcctgggtccctcccactactatcttgggagggagaagggatggagcaggagcgggctaagagggctgcgggggccttgtaatttattgctttgttccccaacatggggatgggggcgggcaggggcgtggggagggcgttttggggtaggggaagcccagggtgggcagggggtgggttggggtgggggtgctctcgggttgtgtctgtgaccgtgactgcgtacctgtgactgtgcagcgcccgtggtgatctggggtagggggcacccctacagtgggacccctcccccattattctttctgtccagcccctccctcccactggagcagctccagagccattcctcacccccgtgacctctcccagccagggctgagaggattcgaggtggctgggagggtttccaggccccctgccccttccccacaaactgggtgatagggcggacttacctggcccagccctgcctccctcagccaacccagcccttgggctgtctgtgtcagtggtttccggtctttttttttttttttttttctggctaaaatagtttgcaaaggaccaggtaattggggaggggagagaggtgggggcaagggggaaatgcccccccatctccttggaggcagtggtgtgaatcttcttcaacagcaattaaagaggaagtgattttgtctagggggtgagctgctggtctgttcttggaggcaggtcagggcatggccttggtcaagatggggtactggggttggacagggacaggcagaggtgcctcccactggggctggtggcaggacagtacccatgggcatggaggtggttccatcatgtacaacagttctgggttcatgtagtggaggacgtgggcaggttggagtcagtggggaccctgggaacagagaaggcactgactcttaagatgatgccagtcctgggagagttgggatatggtacttagaggagaggacaggcccatggagaggggtgggaagatgggacagctttgtttaagagcaggaactttggagacagatctgattttgaaacctgcccctccactgcacagctaggggaccttggtggcatctgtttatctgtattctgaacagtatctgttcagagggcacctgaaaggcgctccagctctgaggagggctgccccgagccagcctgctcaccgtgagcactaggtaccagagtagaacatagagtaggggttcctcccctggcctcgtcagggggtgttccagagggaaggggtgggagacctcctgggaaagatttcccagctagctgcagaggtccctggtgtccacaaactcagtgtcagctgatgcaggcatttatccacctccgtgccatcaaagggaccaccaaggccacagcggcctgaagccggtgctgcctccatgagctgcagtgccactaggctcagcacatagccaatcctaccatttctcgagggcagctgaaagtgtttactcaggtagaggggctggacagggtagggttgggtcagcagccagtgcaggttgggcacagccatatgttgttatctaccttgaggagttagttggtagcaccagcatctttgggtagaattgcttctgacccttggtgcccaccagccccaagaggttcagctgcaagtgtgccactgaactgaggacacagcaccagacctgaatccagttcacatggaggctgcggctctacagggtcctaggctgtgaccacccagcacagcggcgtgacccaggaaaggtggattcaacagtgcaggtgcagtgacaagtacagaggcagctccactccttcctcgtggccaaagtttgctcccttcttcagaagtttgggagtgtgagagaatatgggaaggaaataaggaccctggagagaatgaaattgccttcaaagagcaagtgggaagttcctttcatttccagccagtgaaaaatggtcaaggtgtcagcaaacctcacaacaaatcccaacaccaagtaatccacttgcctcttgtcttaatggggagtgtctttggtcttgcgggggagatgtaaagggtggtagtggatggaatgacaaaatatcaagccctccaggttatgacaaaataggagcccagaaggggactccctgggtgggtgaaggagagctgctgcccctttgtgcccatgcccccttcacagctcaccctgggctgccttgcttggatgccctgccatgc

SEQ ID NO: 99373 - DNA, 5489 bp, Homo sapiens
aaggggccttctgaggtttgggggctgtagggccatgggcctcagggccagaggtggttgttagcctggcaagacaggtctgggcaacatgcatgcccagaggcagttcgttgtagctgcagtgagagcagaagtcagacgacatgaggtggccaagcaggctctaaaccgcctcaggaagctggcagagagggtggacgaccccgaactccaggacagcatccaggcctcattggacagcattcgagaggctgtgatcaatagccaggaatggactttgagccgctccattcctgaactgcgcctgggtgtgctgggcgatgccaggagtgggaagtcatcgctcatccaccgattcctgactggctcataccaggtgctggagaagacagagagtgagcagtacaagaaagaaatgttggtggatggacagacacatctggtgctaatccgagaggaagctggggcacctgatgccaagttctcaggctgggcagatgctgtgatcttcgtcttcagcctggaggatgagaacagtttccaggctgtgagccgtctccatgggcagctgagttcccttcgcggggagggacgaggaggcctggccttggcactggtggggacacaagacaggatcagtgcttcctcccctcgggtggtgggagatgctcgtgccagagctctgtgcgcggacatgaaacgctgcagctactatgagacttgtgcaacctatgggctcaatgtggatcgggtcttccaggaggtggcccagaaggtggtgaccttgcgcaagcagcaacagcttctggctgcctgcaagtccctgcccagctccccaagccactcagctgcatccactccggtagctggccaggctagtaacgggggccacactagcgactactcttcttccctcccgtcctcaccgaatgttggtcaccgggagctccgagccgaggcagctgcagtggctggattgagcaccccagggtccctgcaccgggcagccaagcgcaggaccagcctttttgcgaatcgtcggggtagtgactccgagaaacgaagcttggatagtcggggagagacaacagggagtgggcgagccatccccatcaaacagagcttcctactaaaacgaagtggcaattccttgaacaaagaatggaagaagaaatatgtaaccctgtccagtaatggctttctactctaccaccccagtattaacgattacatccacagtacccacggcaaggagatggacttgctgcgaacaacagtcaaagtcccgggcaagcggcccccgagggccatctctgcctttggcccctcagccagcattaacgggctcgtcaaggacatgagcactgtccagatgggtgaaggcctggaagccactactcccatgccaagccctagccccagccccagttccctgcagccaccaccagatcagacatccaaacacctgctgaagccagaccggaatttggcccgagccctcagcacggactgtaccccatctggagacctgagccccctgagtcgggaaccccctccttctcccatggtgaagaagcagaggaggaaaaaattgacaacaccatccaagactgaaggctcggctgggcaggctgaagaggaaaactttgagttcctgatcgtgtccagcacgggtcagacgtggcactttgaggcagccagttttgaggagcgggatgcctgggtccaggccatcgagagtcagatcctagccagtctgcaatgctgtgagagcagcaaggtcaaggtaagagtttgaggtggagtggaggactggccgcaggaactgaccctggtgctgacggccattggcaacgacacggccgaagtcgtgtgagaggagagcagaggtgtctgagaaggaggtggggcttggaggcagagtcagtgccaacccaaaccctctctgcagctgcgcacagacagccaaagcgaggccgtggccatccaggcgatccggaacgccaaggggaattcaatctgcgtggactgcggggcccccagtgagtgccaggaggcagcggaggggctagggagtgtagtgaatgccggggtgcctgtgctgcccggctgggagccgacctctacgctccttccgcagaccccacgtgggccagcttgaacctgggcgccctcatctgcatcgagtgttctggcatccaccgcaacctgggcacacacctgtcccgcgttcgctcgctggacttggacgactggccacgggagctgaccctggtgctgacggctattggcaacgacacggccaaccgcgtgtgggaaagcgacacgcgaggccgtgccaagccctcgcgggactcttcgcggtaagcgtgagggaacagagcggggggagggttgctgagggtgtgcgaacctgagacggtcccgtgggtaggggcagaagtcctggctgggggtccctagagccttttccgttgatccctggtcttgcagggaggagcgcgagtcgtggattcgcgccaagtacgagcagctactgttcctggcgccgctgagcacctcggaggagccgctgggccgccagctgtgggccgccgtgcaggcccaggacgtggctaccgttctcctgcttttggcccatgcgcgacacgggccgctcgacaccagcgtagaggacccacagctgcgctccccactccacctggcggccgagctcgcccacgtcgtcatcacgcaactgctgctgtgggtacgtgagctccctctccccaacgaggcatggagaccccagctcaacacgccccctctccattgtttccacactcggattgctctgggtctacccgctcggggttcgcggaaggggaggtccccagcggtacgggctcctaggcgcttggacatgcccgcttgtgccccctaggggcggaaagaagacccggtcctgcccgagctcaacaatcccagggcgggagcccatacccaggctggctcctggggcgacgccacgccagagggagggtttagtacatgggagggctagccccgggacttggggccaatacggaaaccctaccccttccatgctcatctcactgcccagtgaagggggcaagggcagcgaggggcaggacccctgctgctcatgggggtgggggttcccaaccctttccgtgaaagggaccgtgagtagtggaaaccaggacgtcccctacacctacccatgggtggaagctaaagagtccggggggaaccaagagcctgggtccctcccactactatcttgggagggagaagggatggagcaggagcgggctaagagggctgcgggggccttgtaatttattgctttgttccccaacatggggatgggggcgggcaggggcgtggggagggcgttttggggtaggggaagcccagggtgggcagggggtgggttggggtgggggtgctctcgggttgtgtctgtgaccgtgactgcgtacctgtgactgtgcagcgcccgtggtgatctggggtagggggcacccctacagtgggacccctcccccattattctttctgtccagcccctccctcccactggagcagctccagagccattcctcacccccgtgacctctcccagccagggctgagaggattcgaggtggctgggagggtttccaggccccctgccccttccccacaaactgggtgatagggcggacttacctggcccagccctgcctccctcagccaacccagcccttgggctgtctgtgtcagtggtttccggtctttttttttttttttttttctggctaaaatagtttgcaaaggaccaggtaattggggaggggagagaggtgggggcaagggggaaatgcccccccatctccttggaggcagtggtgtgaatcttcttcaacagcaattaaagaggaagtgattttgtctagggggtgagctgctggtctgttcttggaggcaggtcagggcatggccttggtcaagatggggtactggggttggacagggacaggcagaggtgcctcccactggggctggtggcaggacagtacccatgggcatggaggtggttccatcatgtacaacagttctgggttcatgtagtggaggacgtgggcaggttggagtcagtggggaccctgggaacagagaaggcactgactcttaagatgatgccagtcctgggagagttgggatatggtacttagaggagaggacaggcccatggagaggggtgggaagatgggacagctttgtttaagagcaggaactttggagacagatctgattttgaaacctgcccctccactgcacagctaggggaccttggtggcatctgtttatctgtattctgaacagtatctgttcagagggcacctgaaaggcgctccagctctgaggagggctgccccgagccagcctgctcaccgtgagcactaggtaccagagtagaacatagagtaggggttcctcccctggcctcgtcagggggtgttccagagggaaggggtgggagacctcctgggaaagatttcccagctagctgcagaggtccctggtgtccacaaactcagtgtcagctgatgcaggcatttatccacctccgtgccatcaaagggaccaccaaggccacagcggcctgaagccggtgctgcctccatgagctgcagtgccactaggctcagcacatagccaatcctaccatttctcgagggcagctgaaagtgtttactcaggtagaggggctggacagggtagggttgggtcagcagccagtgcaggttgggcacagccatatgttgttatctaccttgaggagttagttggtagcaccagcatctttgggtagaattgcttctgacccttggtgcccaccagccccaagaggttcagctgcaagtgtgccactgaactgaggacacagcaccagacctgaatccagttcacatggaggctgcggctctacagggtcctaggctgtgaccacccagcacagcggcgtgacccaggaaaggtggattcaacagtgcaggtgcagtgacaagtacagaggcagctccactccttcctcgtggccaaagtttgctcccttcttcagaagtttgggagtgtgagagaatatgggaaggaaataaggaccctggagagaatgaaattgccttcaaagagcaagtgggaagttcctttcatttccagccagtgaaaaatggtcaaggtgtcagcaaacctcacaacaaatcccaacaccaagtaatccacttgcctcttgtcttaatggggagtgtctttggtcttgcgggggagatgtaaagggtggtagtggatggaatgacaaaatatcaagccctccaggttatgacaaaataggagcccagaaggggactccctgggtgggtgaaggagagctgctgcccctttgtgcccatgcccccttcacagctcaccctgggctgccttgcttggatgccctgccatgc

SEQ ID NO: 99374 - DNA, 377 bp, Homo sapiens
aaagtcccgggcaagcggcccccgagggccatctctgcctttggcccctcagccagcattaacgggctcgtcaaggacatgagcactgtccagatgggtgaaggcctgggtgagtaaggtttatgacataggagcagaagaggggccagggctggggaaaaagaggggtaagagggaagagggggctggcactgggcgagtaggaagctgggtgataaagagggaccacataaggaatggggccagaagaaagaggctcactgaggtttcatcttcttccgacagaagccactactcccatgccaagccctagccccagccccagttccctgcagccaccaccagatcagacatccaaacacctgctgaagccagac

SEQ ID NO: 99375 - DNA, 586 bp, Homo sapiens
tcttttcatctttttttttcttcttgattctttttttctcttccgtaggagaggggtgggaagatgggacagctttgtttaagagcaggaactttggagacagatctgattttgaaacctgcccctccactgcacagctaggtgcagtgacaagtacagaggcagctccactccttcctcgtggccaaagtttgctcccttcttcagaagtttgggagtgtgagagaatatgggaaggaaataaggaccctggagagaatgaaattgccttcaaagagcaagtgggaagttcctttcatttccagccagtgaaaaatggtcaaggtgtcagcaaacctcacaacaaatcccaacaccaagtaatccacttgcctcttgtcttaatggggagtgtctttggtcttgcgggggagatgtaaagggtggtagtggatggaatgacaaaatatcaagccctccaggttatgacaaaataggagcccagaaggggactccctgggtgggtgaaggagagctgctgcccctttgtgcccatgcccccttcacagctcaccctgggctgccttgcttggatgccctgccatgc

SEQ ID NO: 99376 - DNA, 5622 bp, Homo sapiens
aaggggccttctgaggtttgggggctgtagggccatgggcctcagggccagaggtggttgttagcctggcaagacaggtctgggcaacatgcatgcccagaggcagttcgttgtagctgcagtgagagcagaagtcagacgacatgaggtggccaagcaggctctaaaccgcctcaggaagctggcagagagggtggacgaccccgaactccaggacagcatccaggcctcattggacagcattcgagaggctgtgatcaatagccaggaatggactttgagccgctccattcctgaactgcgcctgggtgtgctgggcgatgccaggagtgggaagtcatcgctcatccaccgattcctgactggctcataccaggtgctggagaagacagagagtgagcagtacaagaaagaaatgttggtggatggacagacacatctggtgctaatccgagaggaagctggggcacctgatgccaagttctcaggctgggcagatgctgtgatcttcgtcttcagcctggaggatgagaacagtttccaggctgtgagccgtctccatgggcagctgagttcccttcgcggggagggacgaggaggcctggccttggcactggtggggacacaagacaggatcagtgcttcctcccctcgggtggtgggagatgctcgtgccagagctctgtgcgcggacatgaaacgctgcagctactatgagacttgtgcaacctatgggctcaatgtggatcgggtcttccaggaggtggcccagaaggtggtgaccttgcgcaagcagcaacagcttctggctgcctgcaagtccctgcccagctccccaagccactcagctgcatccactccggtagctggccaggctagtaacgggggccacactagcgactactcttcttccctcccgtcctcaccgaatgttggtcaccgggagctccgagccgaggcagctgcagtggctggattgagcaccccagggtccctgcaccgggcagccaagcgcaggaccagcctttttgcgaatcgtcggggtagtgactccgagaaacgaagcttggatagtcggggagagacaacagggagtgggcgagccatccccatcaaacagagcttcctactaaaacgaagtggcaattccttgaacaaagaatggaagaagaaatatgtaaccctgtccagtaatggctttctactctaccaccccagtattaacgattacatccacagtacccacggcaaggagatggacttgctgcgaacaacagtcaaagtcccgggcaagcggcccccgagggccatctctgcctttggcccctcagccagcattaacgggctcgtcaaggacatgagcactgtccagatgggtgaaggcctggaagccactactcccatgccaagccctagccccagccccagttccctgcagccaccaccagatcagacatccaaacacctgctgaagccagaccggaatttggcccgagccctcagcacggactgtaccccatctggagacctgagccccctgagtcgggaaccccctccttctcccatggtgaagaagcagaggaggaaaaaattgacaacaccatccaagactgaaggctcggctgggcaggctgaagaggaaaactttgagttcctgatcgtgtccagcacgggtcagacgtggcactttgaggcagccagttttgaggagcgggatgcctgggtccaggccatcgagagtcagatcctagccagtctgcaatgctgtgagagcagcaaggtcaagctgcgcacagacagccaaagcgaggccgtggccatccaggcgatccggaacgccaaggggaattcaatctgcgtggactgcggggcccccaaccccacgtgggccagcttgaacctgggcgccctcatctgcatcgagtgttctggcatccaccgcaacctgggcacacacctgtcccgcgttcgctcgctggacttggacgactggccacgggagctgaccctggtgctgacggctattggcaacgacacggccaaccgcgtgtgggaaagcgacacgcgaggccgtgccaagccctcgcgggactcttcgcgggaggagcgcgagtcgtggattcgcgccaagtacgagcagctactgttcctggcgccgctgagcacctcggaggagccgctgggccgccagctgtgggccgccgtgcaggcccaggacgtggctaccgttctcctgcttttggcccatgcgcgacacgggccgctcgacaccagcgtagaggacccacagctgcgctccccactccacctggcggccgagctcgcccacgtcgtcatcacgcaactgctgctgtgggtacgtgagtacggcgcggacgtggcggcccgtgacgcccagggccgcacggcgctgttctacgcccgccaggctggaagccagctgtgcgccgacatccttctccagcacggctgcccgggtgagggcggcagcgcggccaccacgcccagcgcggccaccacgcccagcatcaccgccacgcccagcccccgccgccggagcagcgccgctagcgtgggccgcgccgacgccccggttgcgctggtatagttgcccagcgggagagacacccccatccccacgcgggccgggcacgaccacaccgggcggaccgctggacagacgcacccactcacctctccgatccgcaccccgccccacgggagcacttcctacccccacgagggcacagcccccacgccttccagaagacacaaactcacctccctctccccaacgaggcatggagaccccagctcaacacgccccctctccattgtttccacactcggattgctctgggtctacccgctcggggttcgcggaaggggaggtccccagcggtacgggctcctaggcgcttggacatgcccgcttgtgccccctaggggcggaaagaagacccggtcctgcccgagctcaacaatcccagggcgggagcccatacccaggctggctcctggggcgacgccacgccagagggagggtttagtacatgggagggctagccccgggacttggggccaatacggaaaccctaccccttccatgctcatctcactgcccagtgaagggggcaagggcagcgaggggcaggacccctgctgctcatgggggtgggggttcccaaccctttccgtgaaagggaccgtgagtagtggaaaccaggacgtcccctacacctacccatgggtggaagctaaagagtccggggggaaccaagagcctgggtccctcccactactatcttgggagggagaagggatggagcaggagcgggctaagagggctgcgggggccttgtaatttattgctttgttccccaacatggggatgggggcgggcaggggcgtggggagggcgttttggggtaggggaagcccagggtgggcagggggtgggttggggtgggggtgctctcgggttgtgtctgtgaccgtgactgcgtacctgtgactgtgcagcgcccgtggtgatctggggtagggggcacccctacagtgggacccctcccccattattctttctgtccagcccctccctcccactggagcagctccagagccattcctcacccccgtgacctctcccagccagggctgagaggattcgaggtggctgggagggtttccaggccccctgccccttccccacaaactgggtgatagggcggacttacctggcccagccctgcctccctcagccaacccagcccttgggctgtctgtgtcagtggtttccggtctttttttttttttttttttctggctaaaatagtttgcaaaggaccaggtaattggggaggggagagaggtgggggcaagggggaaatgcccccccatctccttggaggcagtggtgtgaatcttcttcaacagcaattaaagaggaagtgattttgtctagggggtgagctgctggtctgttcttggaggcaggtcagggcatggccttggtcaagatggggtactggggttggacagggacaggcagaggtgcctcccactggggctggtggcaggacagtacccatgggcatggaggtggttccatcatgtacaacagttctgggttcatgtagtggaggacgtgggcaggttggagtcagtggggaccctgggaacagagaaggcactgactcttaagatgatgccagtcctgggagagttgggatatggtacttagaggagaggacaggcccatggagaggggtgggaagatgggacagctttgtttaagagcaggaactttggagacagatctgattttgaaacctgcccctccactgcacagctaggggaccttggtggcatctgtttatctgtattctgaacagtatctgttcagagggcacctgaaaggcgctccagctctgaggagggctgccccgagccagcctgctcaccgtgagcactaggtaccagagtagaacatagagtaggggttcctcccctggcctcgtcagggggtgttccagagggaaggggtgggagacctcctgggaaagatttcccagctagctgcagaggtccctggtgtccacaaactcagtgtcagctgatgcaggcatttatccacctccgtgccatcaaagggaccaccaaggccacagcggcctgaagccggtgctgcctccatgagctgcagtgccactaggctcagcacatagccaatcctaccatttctcgagggcagctgaaagtgtttactcaggtagaggggctggacagggtagggttgggtcagcagccagtgcaggttgggcacagccatatgttgttatctaccttgaggagttagttggtagcaccagcatctttgggtagaattgcttctgacccttggtgcccaccagccccaagaggttcagctgcaagtgtgccactgaactgaggacacagcaccagacctgaatccagttcacatggaggctgcggctctacagggtcctaggctgtgaccacccagcacagcggcgtgacccaggaaaggtggattcaacagtgcaggtgcagtgacaagtacagaggcaggtgtgtggtctgggcaaagcgagaagaggggggaggtagcaaagaagattggactagaggacctggccgttcccccttcacctccaagaccctggactctcttatttcagctccactccttcctcgtggccaaagtttgctcccttcttcagaagtttgggagtgtgagagaatatgggaaggaaataaggaccctggagagaatgaaattgccttcaaagagcaagtgggaagttcctttcatttccagccagtgaaaaatggtcaaggtgtcagcaaacctcacaacaaatcccaacaccaagtaatccacttgcctcttgtcttaatggggagtgtctttggtcttgcgggggagatgtaaagggtggtagtggatggaatgacaaaatatcaagccctccaggttatgacaaaataggagcccagaaggggactccctgggtgggtgaaggagagctgctgcccctttgtgcccatgcccccttcacagctcaccctgggctgccttgcttggatgccctgccatgc

SEQ ID NO: 99377 - DNA, 5549 bp, Homo sapiens
aaggggccttctgaggtttgggggctgtagggccatgggcctcagggccagaggtggttgttagcctggcaagacaggtctgggcaacatgcatgcccagaggcagttcgttgtagctgcagtgagagcagaagtcagacgacatgaggtggccaagcaggctctaaaccgcctcaggaagctggcagagagggtggacgaccccgaactccaggacagcatccaggcctcattggacagcattcgagaggctgtgatcaatagccaggaatggactttgagccgctccattcctgaactgcgcctgggtgtgctgggcgatgccaggagtgggaagtcatcgctcatccaccgattcctgactggctcataccaggtgctggagaagacagagagtgagcagtacaagaaagaaatgttggtggatggacagacacatctggtgctaatccgagaggaagctggggcacctgatgccaagttctcaggctgggcagatgctgtgatcttcgtcttcagcctggaggatgagaacagtttccaggctgtgagccgtctccatgggcagctgagttcccttcgcggggagggacgaggaggcctggccttggcactggtggggacacaagacaggatcagtgcttcctcccctcgggtggtgggagatgctcgtgccagagctctgtgcgcggacatgaaacgctgcagctactatgagacttgtgcaacctatgggctcaatgtggatcgggtcttccaggaggtggcccagaaggtggtgaccttgcgcaagcagcaacagcttctggctgcctgcaagtccctgcccagctccccaagccactcagctgcatccactccggtagctggccaggctagtaacgggggccacactagcgactactcttcttccctcccgtcctcaccgaatgttggtcaccgggagctccgagccgaggcagctgcagtggctggattgagcaccccagggtccctgcaccgggcagccaagcgcaggaccagcctttttgcgaatcgtcggggtagtgactccgagaaacgaagcttggatagtcggggagagacaacagggagtgggcgagccatccccatcaaacagagcttcctactaaaacgaagtggcaattccttgaacaaagaatggaagaagaaatatgtaaccctgtccagtaatggctttctactctaccaccccagtattaacgattacatccacagtacccacggcaaggagatggacttgctgcgaacaacagtcaaagtcccgggcaagcggcccccgagggccatctctgcctttggcccctcagccagcattaacgggctcgtcaaggacatgagcactgtccagatgggtgaaggcctggaagccactactcccatgccaagccctagccccagccccagttccctgcagccaccaccagatcagacatccaaacacctgctgaagccagaccggaatttggcccgagccctcagcacggactgtaccccatctggagacctgagccccctgagtcgggaaccccctccttctcccatggtgaagaagcagaggaggaaaaaattgacaacaccatccaagactgaaggctcggctgggcaggctgaagccaagcgcaaaatgtggaaactaaaatcctttggtagtttaagaaatatttataaagcagaggaaaactttgagttcctgatcgtgtccagcacgggtcagacgtggcactttgaggcagccagttttgaggagcgggatgcctgggtccaggccatcgagagtcagatcctagccagtctgcaatgctgtgagagcagcaaggtcaaggtaagagtttgaggtggagtggaggactggccgcaggaactgaccctggtgctgacggccattggcaacgacacggccgaagtcgtgtgagaggagagcagaggtgtctgagaaggaggtggggcttggaggcagagtcagtgccaacccaaaccctctctgcagctgcgcacagacagccaaagcgaggccgtggccatccaggcgatccggaacgccaaggggaattcaatctgcgtggactgcggggcccccagtgagtgccaggaggcagcggaggggctagggagtgtagtgaatgccggggtgcctgtgctgcccggctgggagccgacctctacgctccttccgcagaccccacgtgggccagcttgaacctgggcgccctcatctgcatcgagtgttctggcatccaccgcaacctgggcacacacctgtcccgcgttcgctcgctggacttggacgactggccacgggagctgaccctggtgctgacggctattggcaacgacacggccaaccgcgtgtgggaaagcgacacgcgaggccgtgccaagccctcgcgggactcttcgcggtaagcgtgagggaacagagcggggggagggttgctgagggtgtgcgaacctgagacggtcccgtgggtaggggcagaagtcctggctgggggtccctagagccttttccgttgatccctggtcttgcagggaggagcgcgagtcgtggattcgcgccaagtacgagcagctactgttcctggcgccgctgagcacctcggaggagccgctgggccgccagctgtgggccgccgtgcaggcccaggacgtggctaccgttctcctgcttttggcccatgcgcgacacgggccgctcgacaccagcgtagaggacccacagctgcgctccccactccacctggcggccgagctcgcccacgtcgtcatcacgcaactgctgctgtgggtacgtgagctccctctccccaacgaggcatggagaccccagctcaacacgccccctctccattgtttccacactcggattgctctgggtctacccgctcggggttcgcggaaggggaggtccccagcggtacgggctcctaggcgcttggacatgcccgcttgtgccccctaggggcggaaagaagacccggtcctgcccgagctcaacaatcccagggcgggagcccatacccaggctggctcctggggcgacgccacgccagagggagggtttagtacatgggagggctagccccgggacttggggccaatacggaaaccctaccccttccatgctcatctcactgcccagtgaagggggcaagggcagcgaggggcaggacccctgctgctcatgggggtgggggttcccaaccctttccgtgaaagggaccgtgagtagtggaaaccaggacgtcccctacacctacccatgggtggaagctaaagagtccggggggaaccaagagcctgggtccctcccactactatcttgggagggagaagggatggagcaggagcgggctaagagggctgcgggggccttgtaatttattgctttgttccccaacatggggatgggggcgggcaggggcgtggggagggcgttttggggtaggggaagcccagggtgggcagggggtgggttggggtgggggtgctctcgggttgtgtctgtgaccgtgactgcgtacctgtgactgtgcagcgcccgtggtgatctggggtagggggcacccctacagtgggacccctcccccattattctttctgtccagcccctccctcccactggagcagctccagagccattcctcacccccgtgacctctcccagccagggctgagaggattcgaggtggctgggagggtttccaggccccctgccccttccccacaaactgggtgatagggcggacttacctggcccagccctgcctccctcagccaacccagcccttgggctgtctgtgtcagtggtttccggtctttttttttttttttttttctggctaaaatagtttgcaaaggaccaggtaattggggaggggagagaggtgggggcaagggggaaatgcccccccatctccttggaggcagtggtgtgaatcttcttcaacagcaattaaagaggaagtgattttgtctagggggtgagctgctggtctgttcttggaggcaggtcagggcatggccttggtcaagatggggtactggggttggacagggacaggcagaggtgcctcccactggggctggtggcaggacagtacccatgggcatggaggtggttccatcatgtacaacagttctgggttcatgtagtggaggacgtgggcaggttggagtcagtggggaccctgggaacagagaaggcactgactcttaagatgatgccagtcctgggagagttgggatatggtacttagaggagaggacaggcccatggagaggggtgggaagatgggacagctttgtttaagagcaggaactttggagacagatctgattttgaaacctgcccctccactgcacagctaggggaccttggtggcatctgtttatctgtattctgaacagtatctgttcagagggcacctgaaaggcgctccagctctgaggagggctgccccgagccagcctgctcaccgtgagcactaggtaccagagtagaacatagagtaggggttcctcccctggcctcgtcagggggtgttccagagggaaggggtgggagacctcctgggaaagatttcccagctagctgcagaggtccctggtgtccacaaactcagtgtcagctgatgcaggcatttatccacctccgtgccatcaaagggaccaccaaggccacagcggcctgaagccggtgctgcctccatgagctgcagtgccactaggctcagcacatagccaatcctaccatttctcgagggcagctgaaagtgtttactcaggtagaggggctggacagggtagggttgggtcagcagccagtgcaggttgggcacagccatatgttgttatctaccttgaggagttagttggtagcaccagcatctttgggtagaattgcttctgacccttggtgcccaccagccccaagaggttcagctgcaagtgtgccactgaactgaggacacagcaccagacctgaatccagttcacatggaggctgcggctctacagggtcctaggctgtgaccacccagcacagcggcgtgacccaggaaaggtggattcaacagtgcaggtgcagtgacaagtacagaggcagctccactccttcctcgtggccaaagtttgctcccttcttcagaagtttgggagtgtgagagaatatgggaaggaaataaggaccctggagagaatgaaattgccttcaaagagcaagtgggaagttcctttcatttccagccagtgaaaaatggtcaaggtgtcagcaaacctcacaacaaatcccaacaccaagtaatccacttgcctcttgtcttaatggggagtgtctttggtcttgcgggggagatgtaaagggtggtagtggatggaatgacaaaatatcaagccctccaggttatgacaaaataggagcccagaaggggactccctgggtgggtgaaggagagctgctgcccctttgtgcccatgcccccttcacagctcaccctgggctgccttgcttggatgccctgccatgc

SEQ ID NO: 99378 - DNA, 1871 bp, Homo sapiens
aaggggccttctgaggtttgggggctgtagggccatgggcctcagggccagaggtggttgttagcctggcaagacaggtctgggcaacatgcatgcccagaggcagttcgttgtagctgcagtgagagcagaagtcagacgacatgaggtggccaagcaggctctaaaccgcctcaggaagctggcagagagggtggacgaccccgaactccaggacagcatccaggcctcattggacagcattcgagaggctgtgatcaatagccaggaatggactttgagccgctccattcctgaactgcgcctgggtgtgctgggcgatgccaggagtgggaagtcatcgctcatccaccgattcctgactggctcataccaggtgctggagaagacagagagtgagcagtacaagaaagaaatgttggtggatggacagacacatctggtgctaatccgagaggaagctggggcacctgatgccaagttctcaggctgggcagatgctgtgatcttcgtcttcagcctggaggatgagaacagtttccaggctgtgagccgtctccatgggcagctgagttcccttcgcggggagggacgaggaggcctggccttggcactggtggggacacaagacaggatcagtgcttcctcccctcgggtggtgggagatgctcgtgccagagctctgtgcgcggacatgaaacgctgcagctactatgagacttgtgcaacctatgggctcaatgtggatcgggtcttccaggaggtggcccagaaggtggtgaccttgcgcaagcagcaacagcttctggctgcctgcaagtccctgcccagctccccaagccactcagctgcatccactccggtagctggccaggctagtaacgggggccacactagcgactactcttcttccctcccgtcctcaccgaatgttggtcaccgggagctccgagccgaggcagctgcagtggctggattgagcaccccagggtccctgcaccgggcagccaagcgcaggaccagcctttttgcgaatcgtcggggtagtgactccgagaaacgaagcttggatagtcggggagagacaacagggagtgggcgagccatccccatcaaacagagcttcctactaaaacgaagtggcaattccttgaacaaagaatggaagaagaaatatgtaaccctgtccagtaatggctttctactctaccaccccagtattaacgattacatccacagtacccacggcaaggagatggacttgctgcgaacaacagtcaaagtcccgggcaagcggcccccgagggccatctctgcctttggcccctcagccagcattaacgggctcgtcaaggacatgagcactgtccagatgggtgaaggcctggaagccactactcccatgccaagccctagccccagccccagttccctgcagccaccaccagatcagacatccaaacacctgctgaagccagaccggaatttggcccgagccctcagcacgggtcagtggggatgaccttccatctgctgtcttccacacccaaataggatgagtgtgggaaatgaatatggggtgaaggcttggaggctggaataaatgcatgagtgaacacatggagccccacacatgaataagttcaatcataccatgtctatcataatggttaagacaagtggactctaacgtcaactgcctgagcttgaatcctggcttgccacatgggcaagttacttgacctctccgtgcctcagtttcctcatctgtaacatggagataatagtttctacctcagagggttgctttgaggtttaaacaaactgagaatattgtctagtacatagtcagccatgtttgacatgtttga

SEQ ID NO: 99379 - DNA, 608 bp, Homo sapiens
gaaatgatgagatgagataaaatgagatgaaatgatgagatgaaatgagatgaaatgatgagatgaaatgatgagatgagatgaaatatgatgagatgaaatgacataatgaatgaaatgatgaaatggaataatggaaatgatgagatgagatgcaatgagttgaaatgagatgaaatgatgaaatgatgagatgaaatgagatgagatgtgatgaaatgatgacatgaaatgatgacataaaatgagatgaaatgagatgtaatgatggaatgagatgagatgaaatgagatgaaatgagataaaatgatgatatgaaatgatgagatgaatgatgagatgaaatgatgagatgaatgatgaaatgatgagatgagatgatgaaatgaaatggtgagatgaactgatgaaatgaaatgaaataatgaaatgaaattgaaataaaattgaaatgagatgagatgaaatgatgagatgatgaaataaaatgatgaaatgagatgtgatgagatgaaatgatgagatgaaatgatgagatgagatgacatgaaataaatgaaataatgaaatcgaaatgagatgagaagatacgagatgagatgaaatg

SEQ ID NO: 99380 - DNA, 238 bp, Homo sapiens
tggtgagaattaaatgaaatgatacatgtccaagttctgatcttttacacagcaagtacacaatgatacttagctaccatcatcatcatcatcagtatttaatgataataaagtgcaatattactatgaagtatgtaacccagtactcagcatgtgctaggttctcagtaaatatttactccttttctcttctctctcccttccacaaataactcgaagatttaactctgataagatg

SEQ ID NO: 99381 - DNA, 1011 bp, Homo sapiens
gaatttcatgtgcaatctatacttttttgtgaagttatttggtatggttatgctgttggttggattataagtgaaatcagtaagaccgactagagtatggttaggaggatagaatctgtggccagaatgctcaaatacatatgctgaccctgccacacagtagctgtgtgtgtattcagacaaattaaattacttctgcctttgtttcctaatctgtaaaatgccaactctgagggttaaatgagaaaataaacataaagcacttttttgggttcttatttctatcttttgtcagattttttagtggaagaaaatatgcaaatataagagactttctgtgaaattccagtcatccaaaatctgagttggaaataatcagtatgaacccatggtttattttctttccaagtgtattttctagctctggcttggaagcaataaccaatctaatgagtgcctctagtgaccagattgtagtctctctgtactttttctgactaaaagggatcaaggatccatgctgataaggctgattatagatgggggcaagaaacatacaagctaaacctagaatatcacgtcataacagaaagcagaaatgctcacaaatattattggagtcacatcaaaagatgaaggagctaacatgaagaagccgttttgctggccaaagatgggacaatttgagcatcaaaaaagattgatacaagcaaaatatgtatgactctgaattaataatgatactgaaggaatgaaatatttgattgtctttgggcaatgtcaggtccctaacatgttattctgaaaaatttgaaataatatctttggactcctttttttttccccctaaaaaaaagaaaaaaagaaaaagaggcttgctctgttgctgaggctggagtgcagtagcatagtcatagcttactgtagcctctcaacttcgtgggcccaagcggttttcccacctcagcctcccaagtagctgggactacaagtatgtaccaccatacccat

SEQ ID NO: 99382 - DNA, 403 bp, Homo sapiens
tcctgacttggctggctccctgctttagggtttttggctcacttgggttaagtgagtgaccactatggagaagtggctctgggttacataacttttctagagctctaaagaatagtttcctggcctatttaatgtctcttctttccctagctgacccctgaaatatttggtttgtaaaccataaaaattgattaaatgccatcaactttatcccctgtagaagtgatctgtttttcaactcccatggcttctgatttgtgtaactctttgaacacccaatattgacttgtattgtgttcgctgtttgcatcattcatagaactggcaaatgctctttatgggcaatagggtctcattaaatgattgctgaataaataacacaaatttttaccattatccctta

SEQ ID NO: 99383 - DNA, 169 bp, Homo sapiens
aggacagcatttgttttttttaacaattttaacgtcttaagatatttattttctttttccaggttgtcatttttcattgtgcatatttcctgtctgagtatagcaatatctgtcttcaaaatgcaattttcatccatcagatctttcatttcttcgtgattatgaaaat

SEQ ID NO: 99384 - DNA, 449 bp, Homo sapiens
acttttgacaggctgacctcactacttggtaacatcaccattaccaccttctgaatctcccactttctaagtctactcttcagtcactgttaagtttcatatataatagatagataaatgattgatagatagctagagatcaaatagtgccaggaactgtgatttaaactgaagatcctctttcatcaggccccacttccttcgcttgctgacctcacttcctacagctctgaattcacttccctttcagaacgacagatctttttctctgagtgcccttcctggaagggcctgctttctgccccagtttcccccccattacccttgaccttaacaccacttcttggcattctcagggtttctggcttatggtgggcttgatgccctatgtgcaagaatgagagaggatcttttgggacagctaactatcagtctctaagttcctctag

SEQ ID NO: 99385 - DNA, 482 bp, Homo sapiens
ttccttggcaccattgatgcccacctagaatgatcttttagagctcaactgttcactggctaaagttctaccttctccaccggactggaatgaaggcagggatcaggtcatgctggtcatattccagcatttagcacagagtgtaacatccagagatgctgaggacacaattctgaaaaaagtagtaacaatgatgacagcagtatcatttactgacagctttataagaacagtcgttttctcacataactctatgaggtggaaggcacaaacctcattttataggcgaggaaacagagcctcagagaagtttagtaatatggtcaggcttgcaaggtgaagcaggcagaggagctaggctttgattccaggcagtcggaccccaaaatcttatgttctacaacattctattccccaaggaaaaaccaagtgctctgaaaatctagtctaaaacagaacataattttcaatacacaaattta

SEQ ID NO: 99386 - DNA, 1167 bp, Homo sapiens
gaatgtgatcatggtcttggtttttaagttctttggagtgaaagtgttactgaattactgtcattccttgattgccttgcagctcattattgcttatctgatttccattggcttcatgctccttttcttccagtacttgcatccattgcgctcactcttcacccataatgtagtagactacctccattgtgtctgctgtcaccagcaccctcggaccagggttgagaactcagagccaccctttgagactgaagcaaggcaaagtgttgtctgattctattttctgggtattttaggaagagttgggagttgccaagagtaaccatgaaattgaacgaaaggatgaggttcatgggtgagatacccatcagtacattttcttgacttttctgttaagcctatcagaagaaagagcaactcccaaataggttttattttcttaagagttaccactatgtttggaaacagggggtatcgactatatagttgaaagggtcagaaataccattcacacccttcttacccaagtcaattggaataacttgtcttcaaacactttaggctctctaaagtgaccttctagctctgctcatttgcttgatgcatttctgagctttcctgggctgagctgaaggcccagaatcccgctagaatatatcctgactgatcagaggatatgacagcttaccagctaagagtacctcccaggaaacagtctgactaatgtggaacctgcaactgtcagtgtggctggggtctttttaattccagtgagaagctctggctgagaagaaaatcaccactattaaaaaagctgctccccaagcagattagctctctgttaggattttactagtggccattcagcaaggacctctctttacagtggcacttcataggcacactctaaggagaaagtgcagagtagaattccttcagggcataagccaaaatgactctttttctcagggacctgcatgggcctccagcttgtctattggaattgttaagtgaagcctctcacttagtgcctcattagcagagatttcctccaacccagcttttctgtgctcttggtattttactacttgatgtggacctcagagaagctgaactgtaattgaaaatgtttccgatgtgtggaagaaatgaagactgctttgtgtc

SEQ ID NO: 99387 - DNA, 1345 bp, Homo sapiens
ttcccggcgtgcccggcggcccccttccgctctccctctcgcgtcctccgcctagcaccgacctcagctaggaacggggacgggtcgctgttcggggaaggggctgggtggagtctcgcgaggtgcgagaactggctgggggcctgcgggattctgggaggcgatgctgggaaggggcggtggctgggctcccccggccacccttaaccccttcggtgctttttgcttcaggacctcctggcgggtgcgggtggggagtgaggatggggagctcgactcgcagttcccacttcgtgcttctcctcgcctaaacggttcttacctacacttctcgtaggggacgagaggcaggactttcccttttggtcacctctaaatgactcactgccacataataatgagacaaaaagaccctcataccagtaaaacggttattccacggctgatggacttagacggttcttcatttcttcctgtgctttcaggccgctgtgtatttgcagagcctgcaccagcagcctagagcgttcttaggaacttggtgatatgttgacgggtcgtgtaaagaacttggactctggggccatactgaccagaatgcacctgagggcgtttttagaggcagtaccctggagagaattcaggccctggagtccagcggacctagactggaatcttggctgagtcactccctggctgtccactcaacctctctgagcctcagttttctgatctgcatttgtcttgtatttcatggcattattggaattaaaattaacatacaattcttgacagattggaagaggatgtgaagggagatcttgacattatcaggtccgtatgatatggcgcctggcatagagcaaatgtttaataaatggtagctgttattaccagctgagaaacaataggcaatatacttagcctctctgagccttagttttagaacctgaaatgaaattcagagcgcccagcacataggttttctgtaactataggttcagtcgttgtccagaaacatttctagagtccgtccggagttggattgatgccagctcttaaaaactatgaaggcaggatcagtggccacatttaaacggtttccctgggtgaggaaacacactctccactccctaatgttaacacgtagcgagagccagtattgataggagaccattatggtgtagcccaaactctaacgccaaggggttcagtgttttctgcttctaatactggtcacagaaaacttgtgagtccggtaagcaaaatcctacaaagggaaaagactgcaagttagaataagacacctcttaaaaatctctctagctttaccctgagagaaagg

SEQ ID NO: 99388 - DNA, 671 bp, Homo sapiens
gcggccgccgactactactactactactactactattaaattcgcggccggtcgacaaaaactcttaactgtaaatgttgtctgtggtaatttagaggcacccctcagcacgtgttttagggagctgaacagtgtcatccattttctatgtactgtggccgcaaggctgacgttttatacacttttgcagatgaacctctttgtgaatgtcatgagcagttatcagtctatcatgcagagtagaaagggcaaagctgaactgtaagggcgtcagcacattatggcaataaaatttttcacagcctcagataaaaaaatactgtacttgacaagtgaatctgttttaaattatttcaaatgctatggaaactgaatttctatttgttcggttctcccattaaaagtgggatgttttccaaaagttggttttcaagtcagttgttataaatttgcaacttcttttttttttttttgagactgagtcttgctctgttgcccaggctggaggtgcagtggcctgattttggctcactgcaacctccacctcccaggttctcccacagttctcctgcctcagcctcctgagtagctgggactacaggtatgcaccaccatgcctggctaatttttgtatttttagtagagacggggtttcaccatgttggccaggc

SEQ ID NO: 99389 - DNA, 337 bp, Homo sapiens
gctacttgaggccaaaggtgagcaccccacgtgctccctgatgttccaggtcctgcctgggctcagaggattaagaagtcaacatctcattctctgcacaccagtattttatacaacacatagtgagaagcttgctgatctaaggacattggtcagattatatgaccatagggtcaatatctattatcatattgtccaccctggctatgatggccacacaggccagcagccatactgctaatcaatatccttggcttctccccattccaactagccggctgataacacagactcagttcagattctacccttggagagagaactatatccatctcct

SEQ ID NO: 99390 - DNA, 638 bp, Homo sapiens
atgtccagtaatttcctggatagaaattttattatctgcaaagaatgatatcacatcacaaggatgtccaggtaatccagttccctgtgcactatattactacacatgccaaaagagttaacactacccttgagcaagaagtgacaccagtttctacaaaatccatcaagattatgtaaatatatgtgtatccaagagaataaaatacctaggaatacagctaacaagggaagtgaaggacctctttaaggagagctacaaaccattgctaaaggaaatcagacaggacacaaacagatggaaaaacattccatgctcatggatggaagaaatatcaaaaaaatggccatactgcccaaaacaatttgtagattcagtgctattcccattaaactaccattgacattcttcaaagaattagaaaaaaactattttaaaaaatcatacagaacgtcaaaaaagctcatatagccaagacaatcctaagcaaagagaagaaagctgaaggcattatattgcctgacttcaaactatactacaaggctacaggaagcaaatcagcatgctactagtacaaaaacaggcacatagaccaatggaaagaatagagaactcagaaataaaaccacacatctcca

SEQ ID NO: 99391 - DNA, 118 bp, Homo sapiens
tggtggggtagcagatggatggcaggcatggggtggttgggggaggtggttctaagccacagccatactcaccaactcttgtgaactgcccagccctgctccttctcccacctcgtct

SEQ ID NO: 99392 - DNA, 255 bp, Homo sapiens
gtgaatgtatcaatgtggattttccctttctcctaaatcggtggtagatagagaggccccaaatcattgctgggctgctgaaacaggaggctttgacttggataaggaggagtgtgtctgtgtgtgtgtgtgtgtgtgtctgtgtgtgtgtgtgtgtctctgtgtgtgtgtgtgtgtgtgtgtgtgttgtgcgtctatatatttgtatttacagaacattttgggttgctcttgactgaaaccacaagaagcata

SEQ ID NO: 99393 - DNA, 766 bp, Homo sapiens
aaccatttatgcttcattaacacaaagtaaatgcttcatatttgtttattatcatgatgacctgcacaataagaaccaaaaccaagccagatagtgtagaattggcctgttcaactggcagtattaataaacagcacctgcaagaacgggtgcagtctagcttacaaaacaggaaaatcattcactgaagaatttgcatatggaatacagatacattgcatggaaagaaagccgacctggagactgacaggcagctgtggtgtgaatgcctcatgatggtgaaagtcaggatggtggatggatgctgcattgctttgttgatgcagttatgaacattattgggcaatatgcatatgcaagtgtggaccacattcagcacatttaccttgtgtaacctacacaggttcagtaaagagatttgtgagaccgtgatattcccccatggtagacccaaatgctcgctttcagctcagttttatcacagagactgaaggaataatatctttagcttttaatagcaggacacatttaggaaattatacatgagttgaagatagagaaattctggaacaggagaggtcatcagtgcatttctgcaagtagaagcttgtttagtcagataatgtggtctcaacagattaaaacatcacttgtgattaaattgattggtataaaactataagtgaaccattctgttcgttccatgtattagatgggaacagccaaattaatttgaaatcaagaaattattaaaataaaattctca

SEQ ID NO: 99394 - DNA, 256 bp, Homo sapiens
ctggagggcctgctgtcctgtgggtagggggtggcacttatccttcagtgtaggaaagtgtctgccctcatttgtagctcatattggaaaggatctgggggaggcttgggcagcagggaatggagaaaatgggtaaaaacaggagtgtgtgtgtctttgggggtggtcaagaccgggaataggataggccttgggtctcagcctattttataaaacctgtttgacctttgaagagactcatctactcactcaccca

SEQ ID NO: 99395 - DNA, 801 bp, Homo sapiens
ggtggacgctgatcgggggagagaactgagcctcggggtctgacgccgtctgctgatctgaagcgttgaactcacggacttctaagtctctcaacaccgtgcgggagcgccaggcccggcgggaccgcgtggcccccctctctccctcccctccttctggagggtcatggacgcagagccgtgtcctcccattgctgaatgtgggggtgactgtgggggccggagagtgggggcagctcattgcagcttgtggcgtagcccccccgccatcttgcagctctggaaatgcgcccctgagccccgggggccgccggctcctctctcctccgctccctgtcggaagagagaagaagacaagagcggcctcggctgggcgagggtccccggtacccagccctcagagcgggaggaacgcagcttcaactcaggccagctctgaagagggcctgggagggcgagtagcccctgctgtggttcgagcggcgtggctgctgtgccgggcgtggccggtgctgacttgcgaccatctccatgtgctggttgcaggcgatgagcatttccagggctgggcctcttgttagcgtggtctctagggtgtcctgtcgagtgtacctccccgtgggctggcgcatcgtgcaggaaatggggacacggcggtcctcactgtgtgtccactgcccctttgcggtacggggtgccgggtggggatcccaccgcctgcccagttctcctcgtcatgaatgcgccgtggttcaacaaacagcgtccggccgtggcaattctgcacaaaaatgggatggt

SEQ ID NO: 99396 - DNA, 797 bp, Homo sapiens
ttcagtatccttcttccaccaggaggaagaagaactgtgtctctgaagtttgggaagtatacgtagacatggagtctggccttgagctttctgtagtagaaaggcccatgtcagcagcccttaaagggacagggtgaggtgtactcgggggaaagatggtagtaaccatactcctcccaattttccgtgatacaccacagtgtaaaagaggaccccagtggtttccacggctacacagaaaattcatggagggtagcagaagaagatgagccatggagctgccaggtggctgccagtccaatcttttaaggttcaatttagggaaaaggactttttctcagtaagccctgataccttgatgtgagaaggccaagaagaagcctatagagatgcccacaagaggagactaaagctgagagaaactgaggcccctggccctagagctttcactgagctccagctgacaaccatcatcaaatcaccagccatgtgactgtgccatgatgggagggaatcacccagtgtccaaatgatctgatgccacatgtaaaagagaagagccttcccctttgagccctgcccagattgctactctgcaccaagtttgttctttactcccagcctaatggatgaaatgaaacttggtgagctcccagagttggacaaccttcagaatgctgagacatactaaatgaaggaagaaagtccttttgtgagttctccaaaactcagacctcccagtgactacagcaaggtcctgttgtttcagtgaaaagctgttcaacttggtgaaccag

SEQ ID NO: 99397 - DNA, 288 bp, Homo sapiens
ttaaaagtgtttaaagtttaagctatctccattgttagaatgttctccattacgtgagttggtaaaattaatcatgggacagactttcattcttgctaagtttgatacatagaactaaatagcccattctgaataatccatgtattttttcttctcttttgaaatacaagtttaaaggttttaatcactattccctcctcattataggacactaatttgttatgattaagaaaacctgtgttcatcattgtaaggaaaatttagctttttagactgcaatgcatagta

SEQ ID NO: 99398 - DNA, 2453 bp, Homo sapiens
taattgtaaatggttctttgtcagtttagtaaaccagtgaaatgttgaaatgttttgacatgtactggtcaaacttcagaccttaaaatattgctgtatagctatgctataggttttttcctttgttttggtatatgtaaccatacctatattattaaaatagatggatatagaagccagcataattgaaaacacatctgcagatctcttttgcaaactattaaatcaaaacattaactactttatgtgtaatgtgtaaatttttaccatattttttatattctgtaataatgtcaactatgatttagattgacttaaatttgggctctttttaatgatcactcacaaatgtatgtttcttttagctggccagtacttttgagtaaagcccctatagtttgacttgcactacaaatgcattttttttttaataacatttgccctacttgtgctttgtgtttctttcattattatgacataagctacctgggtccacttgtctttttttttttttgtttcacagaaaagatgggttcgagttcagtggtcttcatcttccaagcatcattactaaccaagtcagacgttaacaaatttttatgttaggaaaaggaggaatgttatagatacatagaaaattgaagtaaaatgttttcattttagcaaggatttagggttctaactaaaactcagaatctttattgagttaagaaaagtttctctaccttggtttaatcaatatttttgtaaaatcctattgttattacaaagaggacacttcataggaaacatctttttctttagtcaggtttttaatattcagggggaaattgaaagatatatattttagtcgatttttcaaaaggggaaaaaagtccaggtcagcataagtcattttgtgtatttcactgaagttataaggtttttataaatgttctttgaaggggaaaaggcacaagccaatttttcctatgatcaaaaaattctttctttcctctgagtgagagttatctatatctgaggctaaagtttaccttgctttaataaataatttgccacatcattgcagaagaggtatcctcatgctggggttaatagaatatgtcagtttatcacttgtcgcttatttagctttaaaataaaaattaataggcaaagcaatggaatatttgcagtttcacctaaagagcagcataaggaggcgggaatccaaagtgaagttgtttgatatggtctacttcttttttggaatttcctgaccattaattaaagaattggatttgcaagtttgaaaactggaaaagcaagagatgggatgccataatagtaaacagcccttgtgttggatgtaacccaatcccagatttgagtgtgtgttgattatttttttgtcttccacttttctattatgtgtaaatcacttttatttctgcagacattttcctctcagataggatgacattttgttttgtattattttgtctttcctcatgaatgcactgataatattttaaatgctctattttaagatctcttgaatctgtttttttttttttaatttgggggttctgtaaggtctttatttcccataagtaaatattgccatgggaggggggtggaggtggcaaggaaggggtgaagtgctagtatgcaagtgggcagcaattatttttgtgttaatcagcagtacaatttgatcgttggcatggttaaaaaatggaatataagattagctgttttgtattttgatgaccaattacgctgtattttaacacgatgtatgtctgtttttgtggtgctctagtggtaaataaattatttcgatgatatgtggatgtctttttcctatcagtaccatcatcgagtctagaaaacacctgtgatgcaataagactatctcaagctggaaaagtcataccacctttccgattgccctctgtgctttctcccttaaggacagtcacttcagaagtcatgctttaaagcacaagagtcaggccatatccatcaaggatagaagaaatccctgtgccgtctttttattcccttatttattgctatttggtaattgtttgagatttagtttccatccagcttgactgccgaccagaaaaaatgcagagagatgtttgcaccatgctttggctttctggttctatgttctgccaacgccagggccaaaagaactggtctagacagtatcccctgtagccccataacttggatagttgctgagccagccagatataacaagagccacgtgctttctggggttggttgtttgggatcagctacttgcctgtcagtttcactggtaccactgcaccacaaacaaaaaaacccaccctatttcctccaatttttttggctgctacctacaagaccagactcctcaaacgagttgccaatctcttaataaataggattaataaaaaaagtaattgtgactcaat

SEQ ID NO: 99399 - DNA, 1838 bp, Homo sapiens
taattgtaaatggttctttgtcagtttagtaaaccagtgaaatgttgaaatgttttgacatgtactggtcaaacttcagaccttaaaatattgctgtatagctatgctataggttttttcctttgttttggtatatgtaaccatacctatattattaaaatagatggatatagaagccagcataattgaaaacacatctgcagatctcttttgcaaactattaaatcaaaacattaactactttatgtgtaatgtgtaaatttttaccatattttttatattctgtaataatgtcaactatgatttagattgacttaaatttgggctctttttaatgatcactcacaaatgtatgtttcttttagctggccagtacttttgagtaaagcccctatagtttgacttgcactacaaatgcattttttttttaataacatttgccctacttgtgctttgtgtttctttcattattatgacataagctacctgggtccacttgtctttttttttttttgtttcacagaaaagatgggttcgagttcagtggtcttcatcttccaagcatcattactaaccaagtcagacgttaacaaatttttatgttaggaaaaggaggaatgttatagatacatagaaaattgaagtaaaatgttttcattttagcaaggatttagggttctaactaaaactcagaatctttattgagttaagaaaagtttctctaccttggtttaatcaatatttttgtaaaatcctattgttattacaaagaggacacttcataggaaacatctttttctttagtcaggtttttaatattcagggggaaattgaaagatatatattttagtcgatttttcaaaaggggaaaaaagtccaggtcagcataagtcattttgtgtatttcactgaagttataaggtttttataaatgttctttgaaggggaaaaggcacaagccaatttttcctatgatcaaaaaattctttctttcctctgagtgagagttatctatatctgaggctaaagtttaccttgctttaataaataatttgccacatcattgcagaagaggtatcctcatgctggggttaatagaatatgtcagtttatcacttgtcgcttatttagctttaaaataaaaattaataggcaaagcaatggaatatttgcagtttcacctaaagagcagcataaggaggcgggaatccaaagtgaagttgtttgatatggtctacttcttttttggaatttcctgaccattaattaaagaattggatttgcaagtttgaaaactggaaaagcaagagatgggatgccataatagtaaacagcccttgtgttggatgtaacccaatcccagatttgagtgtgtgttgattatttttttgtcttccacttttctattatgtgtaaatcacttttatttctgcagacattttcctctcagataggatgacattttgttttgtattattttgtctttcctcatgaatgcactgataatattttaaatgctctattttaagatctcttgaatctgtttttttttttttaatttgggggttctgtaaggtctttatttcccataagtaaatattgccatgggaggggggtggaggtggcaaggaaggggtgaagtgctagtatcatagcgacaacctgtctttttttgttattcaacagatcatcttgagtgtgggcgcggtcatctgttgttccagcaactcagaaggtttgggctcaaaaatcccatgaccccggaagtcaaaggtagcaatgagtgtttttcacgtccttgcacgccagcttgggtgtctgagggatactctgtctca

SEQ ID NO: 99400 - DNA, 593 bp, Homo sapiens
caaagagaatatcatagatacagagatcagacaatgagaatccagagtcttgttaagtgatagaaggaaaatactaacagaacacatgtaacaggaacaacattttagaggaaacaggacaaaaacttccctaaactcaagatactacaccagaagtgggcagtactcactatgttcaggggaacaaaaagataaaaactaaaaagcatcagactgttttttgtgtgaaggaaatttgtaaggtaggagaattaggtcacttactacagcacaaattgcatgtctatctaaattgacgtttaagtgcaaaagcatggatattactcatgcagttttactggaaaaccatacagatgtttttcaggaatgtacagaatgaatcaaaggaaataactgatcgacaggaaaactgtaggaaatttgtgggctggctgtgaggcagtggctcctattatgtacaattttagtgctaagtactgtgttaatgatggctatcaaacaatatgttaacatctgaaaggaaatatgtatattgagcataataaatattttataaataacaataaatcatttgattttatgctagttcccag

SEQ ID NO: 99401 - DNA, 301 bp, Homo sapiens
ccacacctggcagggaaagaggcctgtgtatccaggggacaaggctaagggatccaaagacacaccgacatgcagagccttcagaatggacaggtcaggaaggctgcagggaggaggtggccttgtcaacaggctaggtttcaatcgactgagatggcgaaaggggaaggacatcccaggcctgccgagagtggggtgggggtgacagaacttgccacagtggagaggctggacagagagtagtgggactcagctgttcatggtggagctgctggtggcaagggaagaggggagaggccct

SEQ ID NO: 99402 - DNA, 1044 bp, Homo sapiens
ggaaagcaggtggtgtaattctgagattgaagtcttgagaaccgggggagtcaatggtgtaactcccaatctagggcttaaggcccaaggaccagggctgctggtgtgcagatgcaaatcctggagttcaaaggattgagaaccaggagctctggtgtctgagggcagtagaagatggatgttccagctcaagaagggaaagtaagaatccgtccttcctccacttttttgttctattcagatgagccctcaatggactgaacgatgctcacccacactgtgagggctggtcttctttattcaatccactgacttaagtgctgatctcttctggaaacaccttcacagacacacccagaaataatgttctaccagccatgggcctgttacttagcccagtcaagttgacacagaaaattagctatcacaacatctgtgtgtgtatatacatatgtatttgcatgtgtgtgtatatatgtgtatatatattcatgtgtgtgtatatgtgtgtatgttgtgactgggtgtatacacatccatatacataaaatatttcaatatattatattttgtatatatgttatatatgttatatattatatagtaatataaaatatatttaagacatttttataatctatattgttatacattatgtaaatatatgtatatataaattatatacttataaatatgttatatgttatgtatattatatatgctatatgtattatatgttatgtcatatataatttattgaatatatttatagtatatgaaacatatatagtctgtcttcttggaaaagcatacaaacaatgagactccagatccagatttctttttttttttgagacagagtcttactctgtcacccaggcaggagtgtggtggtgtgatcttcgctcactgcaacctctgcctcctgagttcaagcaattctcctgcctcagccttcggagtagctgggattacaggcaagcaccactacgcctggctaatttttgtattcagatccagatttctaaatgtctttctccagtt

SEQ ID NO: 99403 - DNA, 551 bp, Homo sapiens
agacaagtcataagataaaatgttaagatgtgttcccaggctttccttctttttcctttttcactatgtttaattcctactactagtcttttaaaactggttgtatataatactcattagtttgttcaacgttgtggcccaattatttggccaccgtttgcagtcttaattgtaggacaggaatgttaagtctaatacttctttgtatttctggtgctaagcatagtgatttgtatatatcgttcaataaatattggttaatattaaccaggtgtgttggctcacgcctgtaatcccaatactttgagagcccagggacaggcagattgcttgaacccaggagttcaagatcagcctgggcaacatggcgaaaccctgtctctacaaaaaaaaattacaaaaattaggtgtggtggcacacccctgtagtcccagctactcgggggcagaggtgggaggattgcttgagtctggtgggagacccaggttgaagtgagccatgattgtgccactggactccagcctgggcgacagagtgagactccgtctca

SEQ ID NO: 99404 - DNA, 515 bp, Homo sapiens
gtgacgaaggaaggcttcctggaggacgagactggagagcttacttgtgaggagatgatggcataggtgaacagggaggcatgggcctcactccgtgccaggaagaagagcggacagtgtgggagctggaactgggaagaggcctaaccggggcgtgggcttaaatggtcccatccctctgcatggtaaatgcgcctgacagcaatcacttaggcacaccctgagaatggccctgtatggcagcggcacctgcatggggttcagggttccaagctaaggaatccaggagaggccaactggagattcgttccttatctatgaggaacatctgagcagcttccccgccctgctgccaccactgcatgcacagggggtctggactgtttgttttggggtatgtgaaggctgccaggtggagattgtcggggaggtgccaagtggacatgctattgctatataaactgcatgccttttgaaagcggttgtggttctcccactcagcccgctgccactgg

SEQ ID NO: 99405 - DNA, 693 bp, Homo sapiens
tgagtgttaaatggccagcaggaattatccactagagaagcggaagggagagaatggaaatggccgcatgcagctcctctccctcagacagctcggggctcagcggaatgagcacagtctgcaggacaagtgcggaggacttcagtcccctctactgtatattggctttaggactcaagttgtccctgaaatagaggaaggtgttttctagggtagtggtaattatcacagtcaaaaaagtaggcgagagcacttaggaaaactgtgcggagatcggctgctgatgtgtaaatactgctgaagctgcttattcaagattagaaaacctgagacccagacgggggaaactgctttccatggttaatcgtcaacaactggccaggatgggacagaagcccatacatagccttcattccagggctcagaacaaaaagaaggcagtggcctgggctgcacctgagcttggcttcacataggagggattctggaacgcaggatcctgacaacgacctcaagcccctgtaaagcaacacattttttggcaagaatccctgggacagagaaagaatttcttctcacttattattgagaatgttctcatgtcttgcaaggctcactgcccagtagaagctgaaaagattcagtatgagtaaaagaagagatctgaaatttgcagcttgtcatagaaaggta

SEQ ID NO: 99406 - DNA, 399 bp, Homo sapiens
caacaaataacgtacccagtgctgaaaaggataatatccttaacttcctctcagggtgcttgtgaaggtcaaataagacaccacaggtaaagcactcagcaccttgcgtgacacagtacctgcatcataagcccagctgtcattattgctaacaacacgtgcaagccgctactcagggccagaccctcaagtccacagagatgaacacgactcctgccctggggaatttgtggtttatggttcaggagttaatggattcaggtagaacagcctgaggcaggcccatccaggtaaaggcatcccccaggaggaagcctcctgattattcactcctgttggaaattgaggaagttggaagggtcctaggcagggagcggtgatgagggaaagggcccagaa

SEQ ID NO: 99407 - DNA, 444 bp, Homo sapiens
aatgaataagtatttccgtcaagaaaaaggaaacaacaaaataaaaccaacccaagtaaagaacagccactgcgcctgaccaatatatttccatattatcagtttataatattcccacaagcttcctaaagtagaaatcatttgcagtgagcagtttgccccaaaagcctgaaccgctgggaactcgtcctccaccttccccatgtggggcacttggacgcacgcctgtaagggctgcacatgccatttgccattttgaaagtagatggtcagatgacagcatataaacacatttttcttactagaaagtgtcagctgggcatggtaactttcccctataatcccaacactttgggaggccaggggggagggatcatttgagcccaggagttcaggaccagccacaggcaacatgacgagatccccatctctacaaaaaaaaaa

SEQ ID NO: 99408 - DNA, 381 bp, Homo sapiens
gaccagctccggggagggacccctggaggaggcgcccacccctccctgctgaccccaatttccaaaaagcccattcattcatcccggggttgggggtgtgggggtggtcggaggaggacccccccatcctgtcctgcacccccagtccccgggggggcgcaggatgggggacccttagcagcggtggcgaccccgaggaggcctgggcacaggaagaaagaaagatatttctgtctccctccccgcctcaggtttcgcccttcccttcccttcccggggacaatcccgaccttcaccgtcaaggccttttgcaaacacacacgcacgcacatgtatttttggaagaaggggaaaaattccaagagaacctccgctgggtta

SEQ ID NO: 99409 - DNA, 338 bp, Homo sapiens
aacactgctcccattgaaatagctattttattggcacttagaaagtcagaccctagtaaggaagaaaatgttttatatgtcaatatttaccctgcagaacagacaacaaaaggggagtagagcttaaggcaaaacaggaggtatctgggttaacagccttctaaaatgaaagttgaaaagcactggcccgagttaccaagaaggctctggaccctctttccacttaaaatgttaagacaagtcatcacctcggttcagaatggtatggcacaatacggcttgaaagcagagaaacatgctatgtgaccttctaaggacccttgcttttttttttttta

SEQ ID NO: 99410 - DNA, 716 bp, Homo sapiens
ggattaacatgacgaggaaagagtgacatttagctgagggtattaagtagatgtctcagatgaactgacactaaaggtaattagctttacaaatagagagatgagagaagagaaccacttcctaggtaggataaaagaacatgtaaaaaagggatatgaaaaaaatttatattcctttaaaaatgttattctctaccagcctaatgagtatttccatgtgatagaaatagagataaaggttgctcatagaggtagtggcaggaaatgaggtcaaagagggagatattccagtaaggaggctgttgaacactttttaggcagaatatcattgttttctatagtgaagccattgggaaagttgtgtacaattacagatgaacttctgcaagttaaatggacaaccttttgtgatgttggtgcttcagaagtactctcaaagggttgctttacaatattgaaaatgctaaaaaatggccgggcacagtgtctcacgcctgtaatcccagcactttaggaggctgaggcgggtggatcacgaggtcaggagttcaagaccagtctggccaagatggcgaaaccccgtctctctactaaaaatacaaaaattagccgggcgtggtggtggatgcttgggcgcctgtaatcccagctactcgggaggctgaggcagagaattatatgaacccaggatgacggaggttgcagtgagcttaggg

SEQ ID NO: 99411 - DNA, 428 bp, Homo sapiens
catttcccccttcctgtatttagagctattgttgtcattcctttgtatagtaccttggtgttgttttgctgtttatgtttatcctgctcaaggagttgtttgagcttcttgaatttccattcctgttttccagagaaagtcaatttgaacgtgttttttcttttttttttttttcttttgacagggtcttactctggcacccaggctggagtgcactggtacgatcttggctcactgcacacctcccagactcaagtgatcctcctatctcagcctcacaagtagctgggactacaggtgcgtgccaccacacccgggtaatttttgtattttttggtagagatgggttttcaccatgttggccaggctggtcttgaactcctacctcaaacaatctgccctgcctcagcctcccaaagcactgggat

SEQ ID NO: 99412 - DNA, 368 bp, Homo sapiens
ttagctttctgcatacattgttgggagtgcatctgagaaggagaaattaggtatacagaagcaagggaatgctggcctagcatgaagatgggccacatcatgcccagctaccaagggaagaacaggcttcatcacaagatctccaagcatccatgatttgacttgtatcatcttatacattcttactatgtattatgtgattttataggaaatataatataaatcaatatataacttcatattcatgttaatatatagctatgtctttatccaaactaaaatataaattatactttaagacattccaaaagatttaatagagttggtagaaattaaatagctaataaataaatactagtctcattttc

SEQ ID NO: 99413 - DNA, 1114 bp, Homo sapiens
gtcgttgctggccagcacttgtgtagaaagatcgctcttcacaccagatttcacttttgatccttccagctccagggtctcgggcttcagctttgtgccgaggcaccaacactgctgcggtcctctctccgactgatcgctgatctcaccgttcccgctcctgtctcctggaaccatgtctctggtaagccagaatgcacgccactgtagcgcagagatcactgcagattacggcgacggcagaggtgaaatacaagctactaacgcctccgggtcccccacctccatgctagtcgttgatgccccccagtgccctcaggcgccaatcaactctcagtgtgtcaacacttcccaggccgttcaggacccgaatgacctggaggtcctgatcgacgagcagtccagacgtttgggggcgctcagggtccatgaccctctagaagacaggtcgattgctttggtgaatttcatgagaatgaaaagccagacggaggggtctatccagcagtccgagatgctggagtttctcagagagtactcagatcagttccctgagatcctcagacgagcctcagctcacctggaccaggtctttgggttgaacctgagagttattgatcctcaggctgacacctacaatttagtcagcaaacggggtttccagatcaccgataggatagcggagtccctggacatgccaaaagcaagtctcctggccctagtcctaggccacatcctcttgaatgggaaccgagcaagagaggcctccatttgggacttgctgctaaaagttgatatgtgggataagcctcagaggatcaacaacctctttgggaacacaaggaacctcctcactactgactttgtgtgcatgcgattcttggagtactggccggtgtatggcactaatccccttgagtttgagttcttgtggggctctagagcccacagggaaatcacaaagatggaagccctgaagtttgtgtcagatgcccatgatgaagaaccctggagctggccagaagaatataataaggccctggaaggtgacaaaaccaaagaaagaagcctgactgctggcttagagttctggtcggaggacactatgaatgat

SEQ ID NO: 99414 - DNA, 266 bp, Homo sapiens
atttataatagtccagtctccccatagagactgcctaaggctatagtgttatgctgctttggggtgggagcagtaggccaagttcaagtcccaactcggaatttgtgtgtgtctcttttgaaggggggaagggactctggaatatgaattatcttcacttgttaatcctgaacatgcctctgactcatgagtggcagcagtcatgggagcaactccagcctttctcagcagatgtcactattactgtgtatgttgaagtatttaca

SEQ ID NO: 99415 - DNA, 479 bp, Homo sapiens
agagttggagaccggctgggtgaggttgctcacgcctgcaatcccagcactttgggaggccgaggcgggcggatcatgaggtcaggagatcgaagccatcctgactaatatggtgaaaccccatctctactaaaaggacaaaaaattagccgggcgtggtggcgggcgcctgtagtcccagctactcgggaggctgaggcaggagaatcgcttgaacctgggaggtggaggttgcagtgagccgagatcgtgccactgcattccagcctgggcaacagagcaagactccgtctcaaaaacaataaaataaaaaaagttggttgctacaaaaaaaataaaaataaaaattagccaggcctgctggggcacacctgtagtcccagctacttgggagggttacacaggaggatcaaagaaacaaaaactgtcggtttcacttcaaaacatgctccgcgtcagtcctcagggaaatgcaaatc

SEQ ID NO: 99416 - DNA, 113 bp, Homo sapiens
acatagttggtaagtgatagaagtgggactcctgtatcagtatgtctccactttgactaagggaactccaaagtcaatttatccaagcttcagggatcttgattttgtaatac

SEQ ID NO: 99417 - DNA, 351 bp, Homo sapiens
tagagggactctggcatatttgggatcatgttaacacttttcgatgtggtctttgagcatggaggaattattataggtttttagtcacaggattacatcataaattatctttgaaaaataccctggctgcattttgctggatgtattggagtagaatgaggatggattcaaggacagcagtgaggtagttactgtgataatcaggtgacaaaaagatggtggcttagactaggctggcagcaatagagatgtagagaagtgggtggattgagatagatttggtggtaaaaatcaatagagcttggctatatggtaaatttagaggtacgctgggaataatggagtggggga

SEQ ID NO: 99418 - DNA, 481 bp, Homo sapiens
ggagttctgggaaagaaagatgtggctgggctgatggcgtttcaggaggaacagcagccagggcctgcatggggcagggcagggtttcctctcctacgataatgcgggacagaacatcctaaagacaaggagcagacctggttctcctccctcttctgccaatttccagctgtgtggctttaggcagatcagttaacctctcaagcacaattcactcggaggatggagagcgtcagaaagtgttccaattcatacacattatatacaggcatcaaaatatcacatgaggccgggtaatcccagcactttgggaggccaaggcgggtggattgtttgaggttgggagttcaagaccagcctgggccaacatggtgaaaccctatccctattaaaaatacaaaaattagccgggtgtgttggtgggcgcctgtaatcccagctactcgggaggctgaggcacgagaatcacttgaacctggca

SEQ ID NO: 99419 - DNA, 809 bp, Homo sapiens
ccatatcctgttctgttgttggatttcattcttatactggttgcctcattataagggacaatttggacacagagacagaacacatagaggcaacacgatgtgaagaggcacagggagaaaattgccatctacaagtctgcaccatatccttccctcacagccttcagaaggaaacaagtctgtggacaccttgatgctggacttagaggcctccagaactgtgagacagtaaaattatactcttcaagccaattcaagccaatctctctgatgatttctgctcaggtctctttgtccggaataagtttgtataatcaccccaagatgctaataaaggtgtggtggtgatgggagacaagaaaagatagcccattcttatttttgccttttaaaatttcagtactgggacatttcttccttgaaaaaataaacttttttgttgacccatacaaaatggaatgatagcagtgcccaccgtaacagagacttcatttatttcaccacttgtacacattttcacttcatgtagacatctgattgttctatgagagattctatgattgttctatgagacccagctatatttatgaagatgaatattatttaaacagatagataagattaaaagagaagatagactgggaaaaggatacatttagtatagatttcggggagtttgaagcaaggcaactatgatataattctagatgtattatttacattttataactttttctttccaaccattctccacacttcatctcacaggtttttaaaaaactaatctatttactaaatagtatgccact

SEQ ID NO: 99420 - DNA, 317 bp, Homo sapiens
aaggtaacaggaaaataaccaaacacttggaaattaaataacacacctctatataacccatgaatcaaagaggaactctcaagagaaattttaaaatgcattatactaaatgaaaatgaaaatgtagcatatcaaaatttgtaggacacagctaatgcagtgataatacatacattagaaaagaccaaaagtctcaaatcaataatcaaagctttcaccttgagaacccaaagtaaaataaatacaataaaagaaaagcaaaataaacacaaagcaaacaaaggaaagaaataataaagagcataaatgaaattgaa

SEQ ID NO: 99421 - DNA, 167 bp, Homo sapiens
ggtacatagcaggactgcctctcctagcatcccttgcagctaggtgaagtcatgtgactgcattctggccaatgaagatggcacagccaccagatgaaagaagcctgatccctaactaatgtgtggagctgagtggaggggagcaaaaatgatgaccctgggctgtg

SEQ ID NO: 99422 - DNA, 485 bp, Homo sapiens
  misc_feature (474)..(474): n is a, c, g, or t
  misc_feature (476)..(477): n is a, c, g, or t
  misc_feature (482)..(482): n is a, c, g, or t
atttgttttaattaactgggtctggtagtgcatgcctgtagctacttgggaagctgaggtgaggcaagagaattgcttgagcccaggaatttgaggttacagtgagctatgatcataccactgctctccagcctgtgtgacagcctgtagtgaccctatgtcaaaaaaataaaaaaaaataaaacagcatgcagatttggcctacaggccatagtttgccaacccatgctctaatacatagtttttttgtttttgttttttagtttttttgtttgttcagttggttggttttttttgagacagagtctcgctctgttgcccaggctggagtgcagtggcgcgatctcggctcactgcaagctccgcctcctgggttcacaccattctcctgcctcagcctcccgagtagctgaagtaggaggactgattgaggcaaggagtttgaaaaccagcctgggcaacatactgagactnannctttncta

SEQ ID NO: 99423 - DNA, 548 bp, Homo sapiens
agagtgggcaggggaggagatacaatatgggaatggggcggtagaggggtgggatttcatgaaatttcctgatttaaggcgatcatgaagtaggcctctttgggaggttggccctccagtcgctggtaagggtaacagcccaccagtctctggtgaggtccagtcgcgtcccccgactgcatttagagccaaaagcagaacgaggccggcgctgcggcctggcgtccagtgacccagctgtctgcatattccccagggtgcaagcacttggacttcaggtgtgaaggcaatgcggtcaccaccgcagtaagaaaagcaactagggaaaatggcaccttcttctcccaacttttttttgagactctcgctctgtcgtctaggctggagtgcagtggtgcgatcttggatttggaaactataatagaaacggctgatctaagattttcatggttatgttttgccgcgcaggttccgcgtgtggtttccgtagtgtagtggttatcacgttcgcctcacacgcgaaaggtccccggttcgaaactgggcgg

SEQ ID NO: 99424 - DNA, 300 bp, Homo sapiens
ctggaaaggggaaagagggaaacttctgggtctcaggaatgttctaaatctagatctgtgtgggagttccatgaagatagacatctgtaaatacttactgagctgtatactttagtgcacttcactcacagtgaaataaatgaataggcattagctaggtgagagaagaggaggagatgttgctggtagaaggaagggcatgtgcacaaaccctgtgacaggagggaatgggataaatgccaggtctagaagaaaaagccagtgtggctggagccacaagagggaacatggtgtgggttg

SEQ ID NO: 99425 - DNA, 410 bp, Homo sapiens
tttccctgaggcttttgaatatgtttctccttctctgtaaattagggaaaaaaaaaaacccaaaacaacctttgtcaatgtgaagaggactgaataagataatagatacaggaaagctcttggtttatttttgagtacaacagcagttagttcccctcacaaagaaaggatgaatcacaagtaaaagttaaaaatgcaccaacaagtaacagatctagagagaaatttttttccctcttaactaaaatagaatagtggtaaggtggataattatcagatgattagggattaagactagcaataataccaggtattggtttgtaagaaatgaaaaatgtcatttttttgtagatgattaaaactatgtacgtttttattcaagcaagaaaatcacatgatttatcatagtc

SEQ ID NO: 99426 - DNA, 761 bp, Homo sapiens
gctctgccctgcatgtcagagttggcatccggctggatccagaggaaagggaaactgctctctctctctcctctgcctccacttctcttggggtaacaaaaaggatcttcgagaaatcatgttcagtatttcaagctctatttctatggcacttatcttttgagaggagtcttcacctcttcagtgatgacttggtaggttgtttggtagggagatcttgattttctgaggatgttgcatttttctagggaatattttgtagttgtgtgtgtgtttagcctcgatccccattaccctatgcgttaggactggcttatgggtcaaaaactgttttatttctaaatgtttaaaaacaaaattcccactggtgatgcctgtgtgacacatttgggtatttagtaggaaacaatgcagtgtttcaaagcttcgagagaagcttcaaaatggacacaattgctgaaaacagaatgaatcatgaacattatctcaatgttttgcataatagacaagaccacggcgttttggttccctgacctgttttgtgtttatgttaggatctgaatcatgttctgggtaaggagaggaggagcgaacactgcactaagatttggtttgccaaatcagattctttggtcaagagtcagtttagggctgggtgcggtggttcaaccctgtaatcccagcccttcgggaggctgaggcaggtgcatcactagagaccagcctggccaatgtggtgaaatctgtctctactaaaaaga

SEQ ID NO: 99427 - DNA, 656 bp, Homo sapiens
acctgccatttttacccatgcttggtccaagagtacgccttccttcatccatatttctagctttctccccacccactcctttctttggaaggaagttattttcctttcctatcactgaaaattctaacagagccccactgagagtcttcttcatcctacgtcctcatttaaagccaaattttactgagcacttactatgcaccaggtgctgagctggggtaacaaagatggagcagccacagttataatccacaaggatctcctcatccaaaggtcctgtttatgtagagtgcttgcttgcaccatgtggacagtgagcatacttctaaaccccaaatctcaacatatggtccaagaaaagcctgcttttctaatttgcgaatgttttataagggtgtctttaaaaggcttacaaattgaattgtgttagtaagtcctataacaagttcctttactagaaaaaaataaattttattaaatcaggatttttgagaaaaatctgtgctgtgtgttctccaaatccatatgttttaacttgtaaaacctccctataatcacagtctattgcagttgggaaggatctgaaatgtcacctaatccagaagatgtaaattttttattttttaacaatgaaacaatttttaaaaacaaatatt

SEQ ID NO: 99428 - DNA, 595 bp, Homo sapiens
ttcgagggcatcagcaagttcaaagtcaacaacaccattcttcacccagagatcgtttagtgccgagtgtttaagacggacatagagctggaggttctgcactacaccaataaaatctccagtgagacccactgtgagttctggaatataaaggagagaaggctgaaaagtgaagggtgcaacctaagactctgaccagtgactaggagttttccagaggaggaagaacgggaaaggcatttcaggaaaaggccagcatgaacacgcatatgaagctgcacgcaggtgcagaaaaagggagtggcagcctattttttctgactgtaaaatggactacaagagaaaattcctgctcagagggtgccctctcttgcagtaaaaatcctttttgaagatggtcaataacatgaggacatagagcagaatcacattctgtttctacaaaacacccccaccaccattttaaactacaaatctgccaaacaaaagatcatccaaaagacactttttgagtgcattgcagaactgggagggtatcttcttccgaagtaatttcatttttcaggcttgcaataataaaatgatcttaagagtg

SEQ ID NO: 99429 - DNA, 888 bp, Homo sapiens
tgccgtgggagggcacagcaaccaggcaccatcttggaagcagagaccaggccctcaccagacaccaaacctgccagcatcttgatcttggacctctcagcctccaaagctatggagccccactctgttgcccagactggagtgcagtggcgtgatctcggctcaccgcaacttccgcctcccgggttcaagtgattctcctgcctcagccttccaactagctgggattgcaggtgcctgccacctctccctgctaatttttgtatttttagtagagacaagatttcaccatgttggtcaggctggtctcaaactcccgacctcaagtgatccacctgcctcagcctcccaaagtgctgggattaccagcgtgagccaccgcgcttggcttaaatattatttaatacatgttaaaatatatgagcattttaagaaagccataattttcagcaaactaacacaggaacagaaaagtgaacactgcatgttctcactcataagtgggagctgaacaataagaacacatggacacagggagcatcacaaactggggcctgttgatgtgtggaggcaaggggagggagagcattaggacaaatacctaatgcattcggggcttaaaacctaggtgatgggttgataggtgcagcaaaccaccatggcacaagtatgcctatgtaacaaacctgcacattctgcacatgtatcccagcacttaaagcaaaataaaaattaaacaattttaaaaaaatatatggacatttaaataatttaaatatgctatgcaaaagtgcttaatatgttaaattggcataatttattagcataataaaaattatttttcacattttaagtatatttatactagatgcagtgatatatataata

SEQ ID NO: 99430 - DNA, 427 bp, Homo sapiens
ctaggggttctggagggtgacagggtggaagaaaatagtatgcctatgaagagtggcaggaaggatcctttggtgttgaaactattatatcttgactacattcataacaagatctggtttttacattgtatgacagttctgcaagatattacccttagtggaaactgggtaaaggatacataggatctttctgtattacttttcacaactgcatgcgaatctacaattacctcaaaataaaaagtttaattaaaaatctctgcacttggatgcctctcatcagctccaggtgtatacattaactgaaagattttcaagcaggggaagtgctttgatttactttttttaaaaaaaatccttagctactgtgtggaatctgaattagaaaccagtgggacaggtattccaagggagcggtaagtcttct

SEQ ID NO: 99431 - DNA, 545 bp, Homo sapiens
actttcctagagaccatggccatgctcctagagggtgaacctgcattcgctgacccctccatgcaaccccacttcactgatggggaaagaggatcccagaggggtaaggaacaagcccaagataatagagcctgcattggaaccgggctgagctaacacttggcttaccggcactgtcactgccagggcccgcgcgaccagaccctggccctccccgggacccaaggtcatctgggcccaggaaaaggcccttaaaacaaattcagttccggtgacatccaaaagagcatattaaaaagcaaggaccagtcaggcgcggtggctcaagcctgtaatccctcactttgggaggctgaggcaggaggatcgcttgagcccaggagttcaagaccagcctgggtaacatagtaagaccctctcatcgctactaaaaatcaaaaaatgaggcaggaggatcactggagcccaggagatagaggctgcactgagctgagattgtgctactgcactccagcctgggcgacagggcaagattccgtcaaagg

SEQ ID NO: 99432 - DNA, 416 bp, Homo sapiens
caggaaggacagagctggggctcaaacccaggcatctgatgcccaaacctgtgttcttttttatttatttattagagacagaggctcattctgttgaacagcctgcagtgcagaggcgtgatcatacctcactgcagccttgaactcctgggctcaagccatcctcccacctcagcctcccaagtagctgggaccgcagacacctggctaatttatttatttatttatttatttatttatttatttatttatttatttagtagagactgggtaacatagtaagaccctctcatcgctactaaaaatcaaaaaatgaggcaggaggatcactggagcccaggagatagaggctgcactgagctgagattgtgctactgcactccagcctgggcgacagggcaagattccgtcaaagg

SEQ ID NO: 99433 - DNA, 680 bp, Homo sapiens
agcggagtaggctactgttgctctagggtggcaggggttagggaaaaatcaggagaggctgtaggctactgttcatctaggatggcagagtttagtgaagaagaggaagacactgtacgctactgttgttctacaatagaagatgttcctgaagaaataaaagaggctatagcctacttttgctctaagatggcggagattaacaaggagccagaagggaatataggccaccattgctacattatcccaaaggttaccgaagaagtaggagaagctagttcagacatgcctgaaccatccacaagcacaagccaagaaaatcccagcatgaaatggagaaagaaaactacttgtgaagctaaagaaggtgaaactgacgagttgttgaaggcagcaaagaagataagatcatttgttcagcagaattcagaaagacgtaaagcggggaaaaagtcaactgtattaattttttattaccacagtaataaaaaaagggatgaaaatcagccaagtgaggatgaagacagccacgagtaatctcccacctcaagtgattctgagagctcatcagaagaccaagacctatctcatctctaggttaacctctagaaatggtctcctgtgcagagaaactacatattgcaccaagattcttggatgttggtgattaaaattcaacc

SEQ ID NO: 99434 - DNA, 287 bp, Homo sapiens
aagtgtatttaatcatccacttatctgttaacaattatctctgagggcccgtcacattcagagaagattctaggttctctacaagtatcctctcactgtgtacatactaaatcaacatcctgctggatttcccccagacatctcccttcatcaccattggagagtatcctctaattgccagccctattcaccatactcatctcatttgatctggagttttctgagagtgaccgggggtgggatggacaggataatttagcaagagtgtataagtaaaatctatataa

SEQ ID NO: 99435 - DNA, 419 bp, Homo sapiens
taaacccagacttttatgtgaaatagaaaaaaaagactataaatctagaaacagttactctggattattttttcttctggaatttctatttgtattcagcataagtaataaaactgtttaaaaccccaagccagccctgcatgttagggcagtgggtcactagcttgtgtctgcagactttaagggggaattgccagagaagcaggaagtcccacctctcctggctgttgggattgtgagtatggcctgcctcatcactaatgacaaccagctctgctggaagggattgcaaattgctgtgtcttttgtctatttagaaccactaggattggcaggaaatgggaggcaaagggacaaggtggaatgactgacaggcctgttcataatgtgttttagttttcatttttaacttgtcttca

SEQ ID NO: 99436 - DNA, 816 bp, Homo sapiens
ggacttcagagaatcgttccgagaattttctgggaaaatatgcaacagcaggtcataaaacagatctcacagagatatgtgagatcaataggtatgtgctttgggccacatgaaactttaaaaaaatgtatcttaaaatttaaaataggaaaatattatgtcagaattcaaatagtgactgaggaacagataaatgtgtctatccacacagtggaatattattcagccataaaagggaatgaatacatgctacaacatgggtgaaccttgaaacacgctaagtgaaagaagccagtcacaaaaggataaatatgcgaacggatccaggtgtccacactgcatttagttgtcatggttccgtctcttctggtctgtgagagtttctccatctttccttgtctgtcatgactttgacattttttgaagagtgccggtcaggtgtttggtacagatttgtagtatttgtggaaatctgctggaatgagtacccttggcctacgaggcagagtcgggggtggtgagctacaccctgtgggacaaatctaggctgctgcctgtgtttgcaggtctccgagctaagaatgggtttcacatttttaaatggttgaaaaaaaaacaaaagacaaataatagtccatgatatgtggaaattatcatgaaatccaaatgtcagtgtccataggtgaagtggggctgggaggcagccacgggcattcttttctgtgttgtccctgggggcttttgcactacaatggcaggattgggaagtcactacggaggccctttggccccaagagcctcaatatttactccctg

SEQ ID NO: 99437 - DNA, 234 bp, Homo sapiens
gaaagagaacacataggtgtgtttcctttcttccaaaccagcaagtggcttgtttactgatcattttagttacaattaggaagtttctcattttttcagaaagtgggatttttgtgtctagttttcctaatgctaattcaggaaactttctttcttagaattgtctaattcttccacaactgttatagtcagagggacagagagaaaaaaaaactttctgatttctcaatgccc

SEQ ID NO: 99438 - DNA, 201 bp, Homo sapiens
aaaaaaaaaaagggaactgggagcagtcttaaattgtttattaaaaatgtcagcaaaatgcattgctaaacaggcccatgattttagaaatatgaaaaatgagtacagttatgtggcaattgcctctggaaaatcatgtgcagttgtgactttcatcatgcgaagttatgatttcatgctaggagagatataaaaggatta

SEQ ID NO: 99439 - DNA, 405 bp, Homo sapiens
gtcatggggtgaagaaaaaacgttctcataatgaatgaatacatgtggaatctcagcaagaaatgcacattattaaaaagaaccaaatagaaagataatgaaattttaaaatagtacttttaggttgattcatagattagaaaaagacagaacaatagaaattactgaatctgaaaaaaaagagtaaaaaaagtttgaagaaaatggacagtcttaccaataaatgcggtacaaaagtaacaactaatagctgaaaactattggtcaaaacccccaagttttgttttttttgttgttttttttttttgtttttttttgagatggagtctcactctgttgcccaggctgaagtgcagtggtgcgatctcagctcactgcaagctctgccttccgggttgacaccat

SEQ ID NO: 99440 - DNA, 299 bp, Homo sapiens
tggtgagtgatctagaggatcccatgggtgctccatccccctcccctttatggccacagtcatttacttcttgccctcacacccttggttgtcttttgttttctttttgagacagagtcttgctctagcctgggagagaagaacaaactctttctcaaaaaaaaaaaaaaaaaaggggggttggggggaaaaggatggaatattaaacggccctttgtggaaattcggggaaaataaacttgggagggaaaaaaccggcggtgcctaaccttgtgaccaagcgggggaagggtggtcac

SEQ ID NO: 99441 - DNA, 719 bp, Homo sapiens
actaaataaataacgagcctaatatttaccagtactagtaaaaatggcatataccttacaaaacatttgtcatcttataagatgcaaatcacattgattccctgattgatcataagacagagtatgtaagacagccaacgggccatccacacacaccaggaggaagactgttgtggagttaagggtgctggcaaacagcaactttaaacatttttttacattaaatttgttattttttaaagaaggttttttttcattaactattttagaaagcctgaaaaagtaattcccagatagcacattaaatgctgtgaattatgttatactccatagtaggttgctatgtggtttcttgattttatcaaaattacatccaagggaatgaaaaccatttgtctacatttaaaattcctcatctctacaactcaatatttttccttgatgcattctaaatgccctagtagaaattattttgaaaagaaaccattaaaggtatgctaatgactctgaattgtgacagatgctagggaaacaggcctgttggctgaggcacagcacccttaaccatctatcataaagtactccggacctgctcattcattactgctgtgttgctcaaggggagagaaaaacagcaagagtttctctttctgaggcaaaaatcataagccactcactaattctaatgtcatgatcccccactgtttgtctgcatgata

SEQ ID NO: 99442 - DNA, 567 bp, Homo sapiens
gctttgagagattaccataggaattacttttgagctgatctctaaattaagatagggacatcaggaatgatgccttactcaccattgtattcctggcgcctaacatagtgcctagcacagtgtagacactctgtgttttgattaaagaagacttcagtagataattaagaggtacagaatccacacagaacaatatgaaccccaaaaaaggtttgaaagtattgggaaatagtggtcgaggtaaaacatgcagttctttgaagacgtcttagtagagttagactggaaggtagattggagccatcttatggagggctgagagaatgatggtgccatttacttagatacgagataaggaactgaaaataagtttaatggggacaataatgaattagatacgttgaatatgaggtacctacagaatattcatatgacagcttttggtagctaattgatggttacagtgtggagctgagcaaaattgagtctggggatgtagataatatgttagcctttaggagtatatgagatcgcaagcagagagaatagagcaagaagtaaagaagg

SEQ ID NO: 99443 - DNA, 134 bp, Homo sapiens
cccacccagtcatgccgggaccagcccccaaacctgaccaccacagccagccccagacatgcccagtgtcccctggacaggatcacacctgggtgagaccctggtccaaagcaagagaggcgtggctgcgagca

SEQ ID NO: 99444 - DNA, 184 bp, Homo sapiens
ggcaactggacatataagcagtaagttagaaacacataacagagttagaaacacataacagaggcttctattctagctttttgtgtacttctgctacactctgatcctctagaaggctggtattgtttctgatttattataaactccctctttcaccagatatagcatgatatccagcctagag

SEQ ID NO: 99445 - DNA, 2483 bp, Homo sapiens
ggatccgcggtggcgcgaccctctgtccccgcctcggggcggagcccaggtcccagcctgcggagcgcgagacacgccgaaatccgcccgaggctacctgtgcgactccagccgccctgcaccggaatctggggagacccgccccccgccccaccggtctgcggccctccgccccagcgcaggtgcaggtgcggcttctctgcccctttcaccccaggcgcatccgccgcggcggccatggcgcgaggagacgccccgcgggacagctaccacctggtcgggatcagcttcttcatcctggggctgggcaccctccttccctggaacttcttcatcaccgccatcccgtacttccaggcgcgactggccggggccggcaacagcacagccaggatcctgagcaccaaccacacgggtcccgaggatgccttcaacttcaacaattgggtgacgctgctgtcccagctgcccctgctgctcttcaccctcctcaactccttcctgtaccagtgcgtcccggagacggtgcgcattctgggcagcctgctggccatactgctgctctttgccctgacagcagcgctggtcaaggtggacatgagccccggacccttcttctccatcaccatggcctccgtctgcttcatcaactccttcagtgcagtcctacagggcagcctcttcgggcagctgggcaccatgccctccacctacagcaccctcttcctcagcggccagggcctggctgggatctttgctgcccttgccatgctcctgtccatggccagtggcgtggacgccgagacctctgccctggggtactttatcacgccctgtgtgggcatcctcatgtccatcgtgtgttacctgagcctgcctcacctgaagtttgcccgctactacctggccaataaatcatcccaggcccaagctcaggagctggagaccaaagctgagctcctccagtctgatgagaacgggattcccagtagtccccagaaagtagctctgaccctggatcttgacctggagaaggagccggaatcagagccagatgagccccagaagccaggaaaaccttcagtcttcactgtcttccagaagtcaccctgtccgtcttccccgccatcacagccatggtgaccagctccaccagtcctgggaagtggagtcagttcttcaaccccatctgctgcttcctcctcttcaacatcatggactggctgggacggagcctgacctcttacttcctgtggccagacgaggacagccggctgctgcccctgctggtctgcctgcggttcctgttcgtgcccctcttcatgctgtgccacgtgccccagaggtcccggctgcccatcctcttcccacaggatgcctacttcatcaccttcatgctgctctttgccgtttctaatggctacctggtgtccctcaccatgtgcctggcgcccaggcaggtgctgccacacgagagggaggtggccggcgccctcatgaccttcttcctggccctgggactttcctgtggagcctccctctccttcctcttcaaggcgctgctctgaagtggcccctccaggctctttggcagcctcttctcgacgtctccttccggagctgagatccagcccagggcgaatggcgagcttggctcaggcctctgcggggtggaggcccctgggcctgaggctgccagcagcgggcaggagctgctcttcatccacttggagtgctgcggggaagaaatcaccaccggtcattctaaccctcacccaggaatgggggtgactcgcacaagacctcatggaaagggtgatgactagggaaaagagggtgcagggcacggctgctccccaccaccaggtctgcatttgttcatcatcatcaggagcagaggtgaccagagggttcagagtgggaggcagggccagcccaggccaggagcgcctcatcttcccaggcctcagccacccagggtaaaaggtgccagggaagttgtgggcacctgagaggaggaacagatgtggaggacctgagggtgctcaaagggccaggctcagcctcaagcagtgttttcattgccaacacttactgtacccactccgcagagccccgctgggcctgggccccagggccacagctagcctgcatgtgtgtactgcactttacagtttgcaaagctcttccatacccactctctcaccgaagcctaattgaggctcttggaaggagtcaggcaaggattgtgcttcccccattatacaggtgacaaaactgagtcctggggaaagtgactggtccgtggtagagccgggacccaatcccctctctctcctccctgttggtgctgttcttcctgcccaacacctgtttctcttttcctcaaggggtttggggcaggagcctgggcacttactccccgtttttgctgtttctccttctgaccctgctcttgggtctaataaccccatttatttgtc

SEQ ID NO: 99446 - DNA, 2455 bp, Homo sapiens
ggatccgcggtggcgcgaccctctgtccccgcctcggggcggagcccaggtcccagcctgcggagcgcgagacacgccgaaatccgcccgaggctacctgtgcgactccagccgccctgcaccggaatctggggagacccgccccccgccccaccggtctgcggccctccgccccagcgcaggtgcaggtgcggcttctctgcccctttcaccccaggcgcatccgccgcggcggccatggcgcgaggagacgccccgcgggacagctaccacctggtcgggatcagcttcttcatcctggggctgggcaccctccttccctggaacttcttcatcaccgccatcccgtacttccaggcgcgactggccggggccggcaacagcacagccaggatcctgagcaccaaccacacgggtcccgaggatgccttcaacttcaacaattgggtgacgctgctgtcccagctgcccctgctgctcttcaccctcctcaactccttcctgtaccagtgcgctggtcaaggtggacatgagccccggacccttcttctccatcaccatggcctccgtctgcttcatcaactccttcagtgcagtcctacagggcagcctcttcgggcagctgggcaccatgccctccacctacagcaccctcttcctcagcggccagggcctggctgggatctttgctgcccttgccatgctcctgtccatggccagtggcgtggacgccgagacctctgccctggggtactttatcacgccctgtgtgggcatcctcatgtccatcgtgtgttacctgagcctgcctcacctgaagtttgcccgctactacctggccaataaatcatcccaggcccaagctcaggagctggagaccaaagctgagctcctccagtctgatgagaacgggattcccagtagtccccagaaagtagctctgaccctggatcttgacctggagaaggagccggaatcagagccagatgagccccagaagccaggaaaaccttcagtcttcactgtcttccagaagatctggctgacagcgctgtgccttgtgttggtcttcacagtcaccctgtccgtcttccccgccatcacagccatggtgaccagctccaccagtcctgggaagtggagtcagttcttcaaccccatctgctgcttcctcctcttcaacatcatggactggctgggacggagcctgacctcttacttcctgtggccagacgaggacagccggctgctgcccctgctggtctgcctgcggttcctgttcgtgcccctcttcatgctgtgccacgtgccccagaggtcccggctgcccatcctcttcccacaggatgcctacttcatcaccttcatgctgctctttgccgtttctaatggctacctggtgtccctcaccatgtgcctggcgcccaggcaggtgctgccacacgagagggaggtggccggcgccctcatgaccttcttcctggccctgggactttcctgtggagcctccctctccttcctcttcaaggcgctgctctgaagtggcccctccaggctctttggcagcctcttctcgacgtctccttccggagctgagatccagcccagggcgaatggcgagcttggctcaggcctctgcggggtggaggcccctgggcctgaggctgccagcagcgggcaggagctgctcttcatccacttggagtgctgcggggaagaaatcaccaccggtcattctaaccctcacccaggaatgggggtgactcgcacaagacctcatggaaagggtgatgactagggaaaagagggtgcagggcacggctgctccccaccaccaggtctgcatttgttcatcatcatcaggagcagaggtgaccagagggttcagagtgggaggcagggccagcccaggccaggagcgcctcatcttcccaggcctcagccacccagggtaaaaggtgccagggaagttgtgggcacctgagaggaggaacagatgtggaggacctgagggtgctcaaagggccaggctcagcctcaagcagtgttttcattgccaacacttactgtacccactccgcagagccccgctgggcctgggccccagggccacagctagcctgcatgtgtgtactgcactttacagtttgcaaagctcttccatacccactctctcaccgaagcctaattgaggctcttggaaggagtcaggcaaggattgtgcttcccccattatacaggtgacaaaactgagtcctggggaaagtgactggtccgtggtagagccgggacccaatcccctctctctcctccctgttggtgctgttcttcctgcccaacacctgtttctcttttcctcaaggggtttggggcaggagcctgggcacttactccccgtttttgctgtttctccttctgaccctgctcttgggtctaataaccccatttatttgtc

SEQ ID NO: 99447 - DNA, 930 bp, Homo sapiens
  misc_feature (926)..(926): n is a, c, g, or t
ggatccgcggtggcgcgaccctctgtccccgcctcggggcggagcccaggtcccagcctgcggagcgcgagacacgccgaaatccgcccgaggctacctgtgcgactccagccgccctgcaccggaatctggggagacccgccccccgccccaccggtctgcggccctccgccccagcgcaggtgcaggtgcggcttctctgcccctttcaccccaggcgcatccgccgcggcggccatggcgcgaggagacgccccgcgggacagctaccacctggtcgggatcagcttcttcatcctggggctgggcaccctccttccctggaacttcttcatcaccgccatcccgtacttccaggcgcgactggccggggccggcaacagcacagccaggatcctgagcaccaaccacacgggtcccgaggatgccttcaacttcaacaattgggtgacgctgctgtcccagctgcccctgctgctcttcaccctcctcaactccttcctgtaccagtgcgtcccggagacggtgcgcattctgggcagcctgctggccatactgctgctctttgccctgacagcagcgctggtcaaggtggacatgagccccggacccttcttctccatcaccatggcctccgtctgcttcatcaactccttcagtgcagtcctacagggcagcctcttcgggcagctgggcaccatgccctccacctacagcaccctcttcctcagcggccagggcctggctgggatctttgctgcccttgccatgctcctgtccatggccagtggcgtggacgccgagacctctgccctggggtactttatcacgccctgtgtgggcatcctcatgtccatcgtgtgttacctgagcctgcctcacctgaagttgcccgttatactggcataatatccaggccaacttangact

SEQ ID NO: 99448 - DNA, 2396 bp, Homo sapiens
ggagcggctctggcatcacctcggagctgacgaagcgggaagagccccgcaccagtgctgcccctacagagctctcggcggggggtggaggcgcatccgccgcggcggccatggcgcgaggagacgccccgcgggacagctaccacctggtcgggatcagcttcttcatcctggggctgggcaccctccttccctggaacttcttcatcaccgccatcccgtacttccaggcgcgactggccggggccggcaacagcacagccaggatcctgagcaccaaccacacgggtcccgaggatgccttcaacttcaacaattgggtgacgctgctgtcccagctgcccctgctgctcttcaccctcctcaactccttcctgtaccagtgcgtcccggagacggtgcgcattctgggcagcctgctggccatactgctgctctttgccctgacagcagcgctggtcaaggtggacatgagccccggacccttcttctccatcaccatggcctccgtctgcttcatcaactccttcagtgcagtcctacagggcagcctcttcgggcagctgggcaccatgccctccacctacagcaccctcttcctcagcggccagggcctggctgggatctttgctgcccttgccatgctcctgtccatggccagtggcgtggacgccgagacctctgccctggggtactttatcacgccctgtgtgggcatcctcatgtccatcgtgtgttacctgagcctgcctcacctgaagtttgcccgctactacctggccaataaatcatcccaggcccaagctcaggagctggagaccaaagctgagctcctccagtctgatgagaacgggattcccagtagtccccagaaagtagctctgaccctggatcttgacctggagaaggagccggaatcagagccagatgagccccagaagccaggaaaaccttcagtcttcactgtcttccagaagatctggctgacagcgctgtgccttgtgttggtcttcacagtcaccctgtccgtcttccccgccatcacagccatggtgaccagctccaccagtcctgggaagtggagtcagttcttcaaccccatctgctgcttcctcctcttcaacatcatggactggctgggacggagcctgacctcttacttcctgtggccagacgaggacagccggctgctgcccctgctggtctgcctgcggttcctgttcgtgcccctcttcatgctgtgccacgtgccccagaggtcccggctgcccatcctcttcccacaggatgcctacttcatcaccttcatgctgctctttgccgtttctaatggctacctggtgtccctcaccatgtgcctggcgcccaggcaggtgctgccacacgagagggaggtggccggcgccctcatgaccttcttcctggccctgggactttcctgtggagcctccctctccttcctcttcaaggcgctgctctgaagtggcccctccaggctctttggcagcctcttctcgacgtctccttccggagctgagatccagcccagggcgaatggcgagcttggctcaggcctctgcggggtggaggcccctgggcctgaggctgccagcagcgggcaggagctgctcttcatccacttggagtgctgcggggaagaaatcaccaccggtcattctaaccctcacccaggaatgggggtgactcgcacaagacctcatggaaagggtgatgactagggaaaagagggtgcagggcacggctgctccccaccaccaggtctgcatttgttcatcatcatcaggagcagaggtgaccagagggttcagagtgggaggcagggccagcccaggccaggagcgcctcatcttcccaggcctcagccacccagggtaaaaggtgccagggaagttgtgggcacctgagaggaggaacagatgtggaggacctgagggtgctcaaagggccaggctcagcctcaagcagtgttttcattgccaacacttactgtacccactccgcagagccccgctgggcctgggccccagggccacagctagcctgcatgtgtgtactgcactttacagtttgcaaagctcttccatacccactctctcaccgaagcctaattgaggctcttggaaggagtcaggcaaggattgtgcttcccccattatacaggtgacaaaactgagtcctggggaaagtgactggtccgtggtagagccgggacccaatcccctctctctcctccctgttggtgctgttcttcctgcccaacacctgtttctcttttcctcaaggggtttggggcaggagcctgggcacttactccccgtttttgctgtttctccttctgaccctgctcttgggtctaataaccccatttatttgtc

SEQ ID NO: 99449 - DNA, 1774 bp, Homo sapiens
tagaaatggggattcaccatgttgcccaggctggtctcgaactcctgggctcaagcaatatgcccgcctcggccttccaaaatgttgggattacaggcgtgagccaccatgctgagctgaggatcacttgttttaactgctgggaatctcccttcgttgggcctggctgtcgggaaacctgggtcacaagcatgacccttccccgtcccccctcaccccagatgagaacgggattcccagtagtccccagaaagtagctctgaccctggatcttgacctggagaaggagccggaatcagagccagatgagccccagaagccaggaaaaccttcagtcttcactgtcttccagaagatctggctgacagcgctgtgccttgtgttggtcttcacagtcaccctgtccgtcttccccgccatcacagccatggtgaccagctccaccagtcctgggaagtggagtcagttcttcaaccccatctgctgcttcctcctcttcaacatcatggactggctgggacggagcctgacctcttacttcctgtggccagacgaggacagccggctgctgcccctgctggtctgcctgcggttcctgttcgtgcccctcttcatgctgtgccacgtgccccagaggtcccggctgcccatcctcttcccacaggatgcctacttcatcaccttcatgctgctctttgccgtttctaatggctacctggtgtccctcaccatgtgcctggcgcccaggcaggtgctgccacacgagagggaggtggccggcgccctcatgaccttcttcctggccctgggactttcctgtggagcctccctctccttcctcttcaaggcgctgctctgaagtggcccctccaggctctttggcagcctcttctcgacgtctccttccggagctgagatccagcccagggcgaatggcgagcttggctcaggcctctgcggggtggaggcccctgggcctgaggctgccagcagcgggcaggagctgctcttcatccacttggagtgctgcggggaagaaatcaccaccggtcattctaaccctcacccaggaatgggggtgactcgcacaagacctcatggaaagggtgatgactagggaaaagagggtgcagggcacggctgctccccaccaccaggtctgcatttgttcatcatcatcaggagcagaggtgaccagagggttcagagtgggaggcagggccagcccaggccaggagcgcctcatcttcccaggcctcagccacccagggtaaaaggtgccagggaagttgtgggcacctgagaggaggaacagatgtggaggacctgagggtgctcaaagggccaggctcagcctcaagcagtgttttcattgccaacacttactgtacccactccgcagagccccgctgggcctgggccccagggccacagctagcctgcatgtgtgtactgcactttacagtttgcaaagctcttccatacccactctctcaccgaagcctaattgaggctcttggaaggagtcaggcaaggattgtgcttcccccattatacaggtgacaaaactgagtcctggggaaagtgactggtccgtggtagagccgggacccaatcccctctctctcctccctgttggtgctgttcttcctgcccaacacctgtttctcttttcctcaaggggtttggggcaggagcctgggcacttactccccgtttttgctgtttctccttctgaccctgctcttgggtctaataaccccatttatttgtc

SEQ ID NO: 99450 - DNA, 2523 bp, Homo sapiens
ggatccgcggtggcgcgaccctctgtccccgcctcggggcggagcccaggtcccagcctgcggagcgcgagacacgccgaaatccgcccgaggctacctgtgcgactccagccgccctgcaccggaatctggggagacccgccccccgccccaccggtctgcggccctccgccccagcgcaggtgcaggtgcggcttctctgcccctttcaccccaggcgcatccgccgcggcggccatggcgcgaggagacgccccgcgggacagctaccacctggtcgggatcagcttcttcatcctggggctgggcaccctccttccctggaacttcttcatcaccgccatcccgtacttccaggcgcgactggccggggccggcaacagcacagccaggatcctgagcaccaaccacacgggtcccgaggatgccttcaacttcaacaattgggtgacgctgctgtcccagctgcccctgctgctcttcaccctcctcaactccttcctgtaccagtgcgtcccggagacggtgcgcattctgggcagcctgctggccatactgctgctctttgccctgacagcagcgctggtcaaggtggacatgagccccggacccttcttctccatcaccatggcctccgtctgcttcatcaactccttcagtgcagtcctacagggcagcctcttcgggcagctgggcaccatgccctccacctacagcaccctcttcctcagcggccagggcctggctgggatctttgctgcccttgccatgctcctgtccatggccagtggcgtggacgccgagacctctgccctggggtactttatcacgccctgtgtgggcatcctcatgtccatcgtgtgttacctgagcctgcctcacctgaagtttgcccgctactacctggccaataaatcatcccaggcccaagctcaggagctggagaccaaagctgagctcctccagtctgatgagaacgggattcccagtagtccccagaaagtagctctgaccctggatcttgacctggagaaggagccggaatcagagccagatgagccccagaagccaggaaaaccttcagtcttcactgtcttccagaagatctggctgacagcgctgtgccttgtgttggtcttcacagtcaccctgtccgtcttccccgccatcacagccatggtgaccagctccaccagtcctgggaagtggagtcagttcttcaaccccatctgctgcttcctcctcttcaacatcatggactggctgggacggagcctgacctcttacttcctgtggccagacgaggacagccggctgctgcccctgctggtctgcctgcggttcctgttcgtgcccctcttcatgctgtgccacgtgccccagaggtcccggctgcccatcctcttcccacaggatgcctacttcatcaccttcatgctgctctttgccgtttctaatggctacctggtgtccctcaccatgtgcctggcgcccaggcaggtgctgccacacgagagggaggtggccggcgccctcatgaccttcttcctggccctgggactttcctgtggagcctccctctccttcctcttcaaggcgctgctctgaagtggcccctccaggctctttggcagcctcttctcgacgtctccttccggagctgagatccagcccagggcgaatggcgagcttggctcaggcctctgcggggtggaggcccctgggcctgaggctgccagcagcgggcaggagctgctcttcatccacttggagtgctgcggggaagaaatcaccaccggtcattctaaccctcacccaggaatgggggtgactcgcacaagacctcatggaaagggtgatgactagggaaaagagggtgcagggcacggctgctccccaccaccaggtctgcatttgttcatcatcatcaggagcagaggtgaccagagggttcagagtgggaggcagggccagcccaggccaggagcgcctcatcttcccaggcctcagccacccagggtaaaaggtgccagggaagttgtgggcacctgagaggaggaacagatgtggaggacctgagggtgctcaaagggccaggctcagcctcaagcagtgttttcattgccaacacttactgtacccactccgcagagccccgctgggcctgggccccagggccacagctagcctgcatgtgtgtactgcactttacagtttgcaaagctcttccatacccactctctcaccgaagcctaattgaggctcttggaaggagtcaggcaaggattgtgcttcccccattatacaggtgacaaaactgagtcctggggaaagtgactggtccgtggtagagccgggacccaatcccctctctctcctccctgttggtgctgttcttcctgcccaacacctgtttctcttttcctcaaggggtttggggcaggagcctgggcacttactccccgtttttgctgtttctccttctgaccctgctcttgggtctaataaccccatttatttgtc

SEQ ID NO: 99451 - DNA, 2262 bp, Homo sapiens
ggagcggctctggcatcacctcggagctgacgaagcgggaagagccccgcaccagtgctgcccctacagagctctcggcggggggtggaggcgcatccgccgcggcggccatggcgcgaggagacgccccgcgggacagctaccacctggtcgggatcagcttcttcatcctggggctgggcaccctccttccctggaacttcttcatcaccgccatcccgtacttccaggcgcgactggccggggccggcaacagcacagccaggatcctgagcaccaaccacacgggtcccgaggatgccttcaacttcaacaattgggtgacgctgctgtcccagctgcccctgctgctcttcaccctcctcaactccttcctgtaccagtgcgtcccggagacggtgcgcattctgggcagcctgctggccatactgctgctctttgccctgacagcagcgctggtcaaggtggacatgagccccggacccttcttctccatcaccatggcctccgtctgcttcatcaactccttcagtgcagtcctacagggcagcctcttcgggcagctgggcaccatgccctccacctacagcaccctcttcctcagcggccagggcctggctgggatctttgctgcccttgccatgctcctgtccatggccagtggcgtggacgccgagacctctgccctggggtactttatcacgccctgtgtgggcatcctcatgtccatcgtgtgttacctgagcctgcctcacctgaagtttgcccgctactacctggccaataaatcatcccaggcccaagctcaggagctggagaccaaagctgagctcctccagtctgatctggctgacagcgctgtgccttgtgttggtcttcacagtcaccctgtccgtcttccccgccatcacagccatggtgaccagctccaccagtcctgggaagtggagtcagttcttcaaccccatctgctgcttcctcctcttcaacatcatggactggctgggacggagcctgacctcttacttcctgtggccagacgaggacagccggctgctgcccctgctggtctgcctgcggttcctgttcgtgcccctcttcatgctgtgccacgtgccccagaggtcccggctgcccatcctcttcccacaggatgcctacttcatcaccttcatgctgctctttgccgtttctaatggctacctggtgtccctcaccatgtgcctggcgcccaggcaggtgctgccacacgagagggaggtggccggcgccctcatgaccttcttcctggccctgggactttcctgtggagcctccctctccttcctcttcaaggcgctgctctgaagtggcccctccaggctctttggcagcctcttctcgacgtctccttccggagctgagatccagcccagggcgaatggcgagcttggctcaggcctctgcggggtggaggcccctgggcctgaggctgccagcagcgggcaggagctgctcttcatccacttggagtgctgcggggaagaaatcaccaccggtcattctaaccctcacccaggaatgggggtgactcgcacaagacctcatggaaagggtgatgactagggaaaagagggtgcagggcacggctgctccccaccaccaggtctgcatttgttcatcatcatcaggagcagaggtgaccagagggttcagagtgggaggcagggccagcccaggccaggagcgcctcatcttcccaggcctcagccacccagggtaaaaggtgccagggaagttgtgggcacctgagaggaggaacagatgtggaggacctgagggtgctcaaagggccaggctcagcctcaagcagtgttttcattgccaacacttactgtacccactccgcagagccccgctgggcctgggccccagggccacagctagcctgcatgtgtgtactgcactttacagtttgcaaagctcttccatacccactctctcaccgaagcctaattgaggctcttggaaggagtcaggcaaggattgtgcttcccccattatacaggtgacaaaactgagtcctggggaaagtgactggtccgtggtagagccgggacccaatcccctctctctcctccctgttggtgctgttcttcctgcccaacacctgtttctcttttcctcaaggggtttggggcaggagcctgggcacttactccccgtttttgctgtttctccttctgaccctgctcttgggtctaataaccccatttatttgtc

SEQ ID NO: 99452 - DNA, 1532 bp, Homo sapiens
ggatccgcggtggcgcgaccctctgtccccgcctcggggcggagcccaggtcccagcctgcggagcgcgagacacgccgaaatccgcccgaggctacctgtgcgactccagccgccctgcaccggaatctggggagacccgccccccgccccaccggtctgcggccctccgccccagcgcaggtgcaggtgcggcttctctgcccctttcaccccaggcgcatccgccgcggcggccatggcgcgaggagacgccccgcgggacagctaccacctggtcgggatcagcttcttcatcctggggctgggcaccctccttccctggaacttcttcatcaccgccatcccgtacttccaggcgcgactggccggggccggcaacagcacagccaggatcctgagcaccaaccacacgggtcccgaggatgccttcaacttcaacaattgggtgacgctgctgtcccagctgcccctgctgctcttcaccctcctcaactccttcctgtaccagtgcgtcccggagacggtgcgcattctgggcagcctgctggccatactgctgctctttgccctgacagcagcgctggtcaaggtggacatgagccccggacccttcttctccatcaccatggcctccgtctgcttcatcaactccttcagtgcagtcctacagggcagcctcttcgggcagctgggcaccatgccctccacctacagcaccctcttcctcagcggccagggcctggctgggatctttgctgcccttgccatgctcctgtccatggccagtggcgtggacgccgagacctctgccctggggtactttatcacgccctgtgtgggcatcctcatgtccatcgtgtgttacctgagcctgcctcacctggtgagcctgctgttgggctcgaggccccacctcaaagcatcttggatagagtcctgagcctgaggccctgagagaggccaggggaggtggaggagacctggtctcagccctgacccccagagaagacactgaggggccccagcctccaggccaatggtatggggagggatccagacacctcaggcaagccaggcaggcccaacactttcctgtccttctgcagaagtttgcccgctactacctggccaataaatcatcccaggcccaagctcaggagctggagaccaaagctgagctcctccagtctggtaagccctgagaccctcctggggaggtgggagatgcagaggaagctagagccacctcccctgggaagctgttccatctgttcccagccagagcccacccctagtagccttgtgcaaacaggaagatcatgaagggaagttggtaggattaaagtcatccctgctgttgtttgggcctcagtttccacctctataaaatggggaggcgacagaggttccatgcatgcaaactttggatccgaagacctctgaattggaatactagtttcacaacatcccagctgtgtggcctgagacaaaccacttagccactgcacccctctgaacctcaatgtgtca

SEQ ID NO: 99453 - DNA, 476 bp, Homo sapiens
atccttcagggcttgtaggttctgatgccaagaaaagacaggaatttgccagagttccctacttcctagcctttggcctgcttccatttgacaagtcacatatcatcatcaattcatgagtgccttcctaagacatcttgacccatccttttctcagcccctgagaaaaggattccttcctcatatgactgtcagaaagactgctcaccctcctgcaagactcttcacctaccaaaagagattaatctttaaaggcctttaatcataaaatgaccatatcatacattagcaaaaggtggttacttcctgttgggaaagtgctatcagagaagggggggaggaggctgggcacagtggctcacgcctgtaatctcaacactttgggaggccgaggcgggcagatcacttgagggcaggagttcaagaccagcctggccaacatggtgaaacctccatctctattaaaaatacaaaaa

SEQ ID NO: 99454 - DNA, 219 bp, Homo sapiens
gcggccgcctactactactaaattcgcggccgcgtcgacttgcacttccacaaccctttctcacctgcctcccaggctactctctgccccagaaagcaacttaaaaaatgtgcagatggagtttggactttacctgaaaatggtgggagctatggaaaaccttggagcaggggagtgaaggatagaaattatatgtaaaagaaaccctgggccgggcgc

SEQ ID NO: 99455 - DNA, 210 bp, Homo sapiens
gcatgggtgagcatgaccagtgccagcacctgtacgtgaatacacgtccccagcagtgcagagtccagcatctgatgaaaacgtgatcagacagagccctgtggcctaacactagagacttccctctctagattaacaacaaagaacttatcaatacttttgagcaacgttttttttctgaccagtcacaaatggcccgattgtacagcc

SEQ ID NO: 99456 - DNA, 189 bp, Homo sapiens
gggaggagagggatggcggtcgaggccagatcagggagagtggggtgggcaaggggatgaggaagggggcccctttccatgccggagaccacacgaggacgtgcagaaatgggcggggacctgtgcggaacccctgaggtccaagcttgggattctggaacccggcagtgtacctgtagccacacgggg

SEQ ID NO: 99457 - DNA, 306 bp, Homo sapiens
gcttttgagtaggaaataacctcttttcagtgtcttttatcaatttcaagtaaaattaaactctttaaaattagaatggtaggaaaacaggccattctgtttatctgacatcaggttaagacataattgtatgtatgtcatggaaattaccacattcaaagaaatgacatgcaggattcaaattgaatgaaatgtaagattaacataatttcatatttgtcaatcagaaagtccttcaagatttaaaaataaatcaagattaattactattgtataatactattaaaaagtgttttgaatttttta

SEQ ID NO: 99458 - DNA, 1413 bp, Homo sapiens
  misc_feature (1413)..(1413): n is a, c, g, or t
cagtagatctgataactgttggctactaagtgactaaggggcaggtgaagtatacagcttggatgcgatggacaaagaggaagatctacctcccagctgggatggagcaggacgatgcaagatttcatcacactactcagaaaggcatgcagtttaaagctcgtaaattatttcaggaattttccatttaatattttcaggctgtggctgaccgtgagtaacaaacccaggaaagcgaaactgcagaacagtggatgggagaaagggtgaattactgtatattcatgagggatattagtccatagtttcttttttcccttttaacaaatttttgggttttgtatatagtttgtctggttttggtatcagggtaatactagcttcataaaatgaattggaaagcgtttcttctgttttcctaaaaagattatatggaattagcattcattctttaaacacttggtagaaatcttaagtaaaaccatctgagctcggagatttttttgtgtgtgttataaaattacatattcagtttccttaatatttataagatcattttaattatctgtgtttttcagtgaaacgggtcaattttctgtatgttgtcaaattaatatttgtagaattgtattagtattcttcattatccttttgatgtctgcagaatctgtaatggtatccctgttttatttctgatattaatttgtgccattatgtctttttttctttgttgatcttgtcagaagtttgtcaattttatcaatttgttccaagaaccagctcattgatttggtttcagtttcattgatttctacttttatctttattatttccttctttttcttgcttttggtatattttgtgcttctttttctaggttctagaggtggaagcatacgttattgatttgagacctttcctcttttctaatgtgagcattttagttacatttagttccctcctaggactactttaattggattattgagaggtgttgaagtctccaactgtatttgtggatttatttatttttcctttcagttctattagttttagcttcacattattttgcagctctgatgtttaaaggtgcatgaacatttaggctcactatgtctcagtgaattgacccttttatcattacgtaatattcctctcagtctctggtcattttctttgtgctgaaatatactttatctgataatataatgactgttccctgtagattaatattttcaggatgtatcatttttatttttttattttcaacctgcctgtaatcattatatttgcagtgaattttttctagacactgtatagttaaatcatttaaaaaagtctgaaaaactaaaaaatccctctaatacctcttcgagcgcggccccggtaccctccgcctataggggtccgttn

SEQ ID NO: 99459 - DNA, 533 bp, Homo sapiens
catctaataccactaggagtccactgaaaatgttactatgttaaactattaatcaaaagtttaggaagatgtcattaattttacatttctacctgaatcacattgaaggcattcaacatacaaacacttgtatagttttttctaattaatatttatgttatttttttccctgattaaagaatcctggcaatcatctaacttttaaatatccttttttgttaaaatattatgctcttgttctcaaattatcggtagaatttagatcaattttaacaacaagtttttctttctattcctctttgcttatagcacttaactttctttctctgacccctcctgtgcatttaaaaaaatgaaaacccatactcccaaactgaaatatttgttctctttagtaagattctttctggcttcagggagaataaatttacagagacattctgggactttgggactccaacgattcaaatttttaccttgagtatctattcttgacttttccttctttttgaataaacatcccctaaagagaa

SEQ ID NO: 99460 - DNA, 364 bp, Homo sapiens
tgaaaagtccttcgggaaaggaacatgcttaactttggaagatctggcattttcaattctaatttttataaaagatacatttaaaaaattttaaatacttttatggaagtacattttacatgcagtataacacgcagactataagtgtataatttagtaagttttgatacatatatacacttgtgtaatcaccacccaaatcaagatgtaacacattcctatcgaccctctaaaattcactcttagactgtaccttccagtcatcagaaactactgttctggtttctattatgatatagtttgtgtatttgtccccacccaaaatctcatgttgaaatgtcattaccagtattagaggtggggc

SEQ ID NO: 99461 - DNA, 395 bp, Homo sapiens
aggtgggaggcaggagctgacggagagagaactgctcaggtgttataacccgtgaacttttccaggaagggtccaaagcaggaccaagacccatctctctgcaggtgagggcatgacacaaccaaagacattgacctggccttctgcccagcatcacattaagcccagggctctgtgaatcacatactcactggctcccctgcccagccgtcagtcccacgggagggctaagattgggagttgcagagaaaaccaattttttctaacattcaagctgatgggagaaacaaatttgcaaagtgaacacaaggtactttttttttttttttttggagaagggaaatatttgggctcttgttgctcaggctggagtgcaatggtgtgatcttggctca

SEQ ID NO: 99462 - DNA, 360 bp, Homo sapiens
tcctgggtgaggagatgccccacccagcttcagctcaccctccatgggctgcacccactgtctaaccagtcccaatgagatgagcccggtacctcagttggaaatgcagaaatcacccgccttttgcattgatctcactgggagctgcagatcgaagctgttcctatttggccatcttgccaaccacctccagtgcatttgttatttctctaattgtgttcttcatttccagaaattgtgattgttttttatgtatgctatctatttcactgaggaattttcctttcatatcctgtatcatgtttgttatttctttaagttagaattcacctttctctagtgcctttttgattagcttaa

SEQ ID NO: 99463 - DNA, 569 bp, Homo sapiens
ttctcccacttctggaggctaaaagtccaagatcaacgtgtaggcaggtttggtgtctcctaaggcctctctccttggcttacagatggctgccttcttgctgtgtcttcacgtagcctttccttgtctctctcttcttataacctttgttaccttcttaaagctcctatctgtaaatacagtcctgttgcgggttagggtttcaagatatgaatgttgagtccctaagaatgcacatctgcgaagtgatttttcaggcaaatgtggtttttctttcagacatttttaagttaatccatttgaaatattttctaaaatatcagactagaaaaaatcaagagtaatataataaactgttttatgttattttgttgtgagaattcattgggacaaaatccctgatcattattcttttttttttgcagccaacaaaagctgttctaatggagctctggtgtgtgcctcctccaacagctcgctgtgatggttttgccgactgcatggatttccagcttgatgagtccagctgctccggtaccccatttccattcagatattcttgtgatatg

SEQ ID NO: 99464 - DNA, 599 bp, Homo sapiens
  misc_feature (557)..(557): n is a, c, g, or t
agcaaggaagggacgttcagaaggggatgaatgaagcatggagagcacactgtcaatggaggaggagagaatttcaacacagagaaggaatgttagcaaaatctcacggcggctgtttgaaagtatgcacaccttctcaagcaccatttgtctttttaaaagaaaagccaaatacaaatggaaatgctctgggaggggagagataagaggtgtgcctcccctgctctgaagtcttgggtctttttgggtgcgaaggctggagtcaggtgtcctccggggactcaccacccgcccgagaggggagagacacatgcgattctggaagctgagagcattgcttattgttgattccttggttgccgtgctgagtcctgctttaaggaagcaggtcgcgtctccttcttcacctcggggtccgagaacctacaccgcgtggagaaggtccactggggcacccgttacgccattaccatcgccttcagctgcaaccccgagcatggcatcgaggacccagcgttcccgtagccagcagctgggccaaggtaacttcaggaggngccgtgtggaggcagccgcgccagtcgtgcacccaaccccaa

SEQ ID NO: 99465 - DNA, 434 bp, Homo sapiens
agcaaggaagggacgttcagaaggggatgaatgaagcatggagagcacactgtcaatggaggaggagagaatttcaacacagagaaggaatgttagcaaaatctcacggcggctgtttgaaagtatgcacaccttctcaagcaccatttgtctttttaaaagaaaagccaaatacaaatggaaatgctctgggaggggagagataagaggtgtgcctcccctgctctgaagtcttgggtctttttgggtgtgagaacctgtcttacccaagagtgagaacacaagagtccacacctacttcacaatgaaaacctactggaattgctttagctagtgaaaattatcctgagatggtttcaatctttcaaatcatttgtcaaaactgctgaccttgactcccatccctttatgcccttctaaagtgttgtttgtgg

SEQ ID NO: 99466 - DNA, 433 bp, Homo sapiens
agggtaatggtgaggacccagttaagaactgacatcaagtgctgtaagcaagtactagagagcttaccagctgcctccccgttgttgttatcaccggcccctcattccatatgtaagtaaatatgggggcatacaacgtgctgcccatcgtcgcacagccagttagcagcccaaagcggctagaagcactaatgactgcctgctctgaggctactgctttgcaggggaaaaccgaggtccctgggtcattcaggtggcaagtgaccatcccatatctgcttgactccagcccacgctcctcctgtacaggtacgccacctgcggcacacggagggcacagccttcttgtcagcgttatgcttacttattcaagatgatgccctgtaactacaagttacacgctcacatacacataaaatgtaatatcatccaa

SEQ ID NO: 99467 - DNA, 599 bp, Homo sapiens
  misc_feature (13)..(13): n is a, c, g, or t
acccttcaaaggnttttgtaaacaggtagttcatgcgtactatacggtctagtacagctggtgcatcggacgaggccgcatgaactctttctacaacagtttgtgaaaaatgcgcctttcgggtactgtgagcggcgtgcgggtaggagcgaactgcaggatctcttggtctccccgcccagaggttgtcgagggcagcctgctggggagagcgggaggtaccaggcatgcgctggggcggtggctccgcacccgagtccctgcaccctccgccacctgcaggccactcaggatatccaaagcgatccacatctccggccctcagcccccacccctgccgcccccgcgcttcctgaggctgtggctcccctggaggaatcgcccagtgaagacgggtgctcccagatgtcaccgcctcgtgttcccttggccgccttgcggggaagtcttagggttgaaaatccaggtctgcaatgaatgcattccacagatggtgtgtagggctactgcatgcccagcacggttctaggcggggagcaaaacggtaagtgagacacaaatcccaagccacgtggagaaagtgaccagccagtagatgc

SEQ ID NO: 99468 - DNA, 344 bp, Homo sapiens
agtgcctgccccaattctgttgtcacaggctgacctgctgaccagcacagagattcctgacaatgggttgcacatgcatgcaaacctgcagacctctgggatgcttgctgcggactccctcatcccaaccctctccccttctctcctgttccacattaattctgcactgtagaattttggtgttgatggtggttaccaatagcaacttcagtatccttcaagtatgatatgtagaggaaaccttgttgggaaaacagaggagtgctttctctcctctgtttaagtttcttttggttgcaagcaacagaaaccaactctggctagctctagccaaaaataataat

SEQ ID NO: 99469 - DNA, 451 bp, Homo sapiens
aatcacttgaacccaggaggaggaggttgcagtgagctgagatcacgtctcttatatagaacctagtttgaaaaggaagggatattttaagtcttttaagataatgttaactatttttctttctttagctctatttctgtgtgtagctgttttactacaccagaattcagcaagttatagtttcttaagagttagttgctttgtggaaattgaagccctatcagtaaccttttcctcctcgtgtatcttcaaatctattaccgagccttaaactttgaatggatcttgtatccctagcttattcaagggttaagaaaatacgttttctgtaggaaaagaagacatgttctgtggctcatccagagtattatttgagctgcatgtctatagttttaatcacatactattgggaggtcttcctggggagatgctggaggcccaggagtcaagg

SEQ ID NO: 99470 - DNA, 405 bp, Homo sapiens
tggagtgagaacacatcactaatgggacaatcacatggggtctcttggcagctccactggaaacatacagatttcgatattctgggccactggtgagtgacaactgttttatggcacagactagcaattatgcaaatattcatcctgctctttggaattaatagttatttcccagacaccccaggtacacatgatgtgaagagttaaatcttaatactatcccatgggcagataggccactctagttctagctaagtgttgcccagtggagccagtggcagaatagtatatgccttagaaacttccattctatagaactagaaaaaagatttaaagttgctcctgagactataagtcctacaactactaaatcatgtactgtctgaacactgacagggcactgtg

SEQ ID NO: 99471 - DNA, 432 bp, Homo sapiens
cagcagctgagctaagaagtgtggctaagaagttttaaggaaatgttattaggaatgacttctaattcataaaagattttctgaccaaatatctgctatgttaacattgctttggagcaggttccttttatcagttgcactatccccactagtgatcagtcttattgcagtcagagatgcagtaaacatcaagacccaatttaactagcaatggcaaaatagcaaataatcatgagtttgggggcttcgggccataaaatacagacatttaccttgaatgtagatttaaaccatctatatgttgtgctaaatgaaacttggaatatctcatctgaagttcggtgtccaaatgataaaaatagtcctgaaaactttacctgtgtgttaaaaagaggcttcaaagggtatggttctcttagagtgaggcagttt

SEQ ID NO: 99472 - DNA, 358 bp, Homo sapiens
tgccaccctactgacacttatgtatatccttaatgcccagttgttggtgcctaatagtgtttaccattaaaataaccaggagttcttggagggtagctgattacatttcttgagacaagaaaaatcaggatgggtctatagcatcctgttcattccagaaagtaaggatattttcaaggatattggggtagtggtacaaagacaaaggtgataataatttttttttgaggcggagttttgctcttgttgcccaggctgtagtgcaatagagcctcttgcctcactgcaatctctaggttcaagtgattctcctgcctcagcctcccgagtagctgggattacaggcgcccaccaccac

SEQ ID NO: 99473 - DNA, 252 bp, Homo sapiens
gaatgagctggtacggggatcttaagtgactgaggataagcttggatggcgtcgtttacaagttgtgactgggaggtggcagaaaggtaaggggtgaggccagtcatatgtgtggaatatgtgatgcacagccctgtactttggctgtgtgtaatgaaaagggttgggatgagttagggagagctagtgtgggggcagcttctagggctgtttttaaggaacagaaagaggagtggtgaaaggatttaggat

SEQ ID NO: 99474 - DNA, 175 bp, Homo sapiens
tcgagagtcgaccggaggtttgaatctgtggacctggccgacgcttgaacaccgtcgggatggggaggatgctagtatgactacacaattcttaccaggggaggagcgcacttgtataactactataattttttctttttcttttctttttttggtttcgtttgtttgtttttga

SEQ ID NO: 99475 - DNA, 470 bp, Homo sapiens
gattatatgaagggagtgggtgcaggagacaaaactgattacaatgaaaatgggagccatgagttcccatctgcagctccaacgtaagatgcctgcagatgtggtcggtgtggcatgtgcagcagggaggtgaagaagaatgggttgggcagggagagtgctccttgagagagcagtcagcctgctggccttcacttcttggccttgccctgggcagccacagcttccatggctttatgaatggtctcttcatccccaggaactttttttattcatgggcttgatgggcttcaagttcttgtccaatttatagaccatgggattaccagttggcaagttcagctccactgtggtctcttcagagagactctccggcagcttttaactgacaatatcttcatttctcccctttacttttgaaagaattttctcagatatagaattcttagttgacagttttcttctcttgc

SEQ ID NO: 99476 - DNA, 387 bp, Homo sapiens
ttacaagtgtgagccaccgtgcccagcccatgaacagactattacgggtgatttctagtgaggctccaaaagaaaagaggagatttgaaatcctcaaccagaatgttggtaaaaatgtgaacagtaaagctattcttatgaggtcccagatggaaatgagaaacgtgtggtgggcaatggaggaaaggccatccttcttatagtggcaaatcacttggctgaactgtgcttatgtattagtgttttgtggaaggtagaacttacgggccactgcaattggatatttggctgcagaaatatctaagcaaggttttgaaggtgcagcttgtgaaatgtgaaaagagagaagtgatttaaagatgggattgttacttaaaagggaagcag

SEQ ID NO: 99477 - DNA, 227 bp, Homo sapiens
tgtcacccaggctggagtgcagtggcacggtcatggtctctgtctcctgggttcaggtgaccctcctgccttggatcctttcaaagtgctgggattacaggcatgcaccactatgcctggctccttattttcttttttgcttgaggtgttttgctgtcctttttgctgggtgctgtgtggtcatcgcagtctgaatttgattttgtgaaaatggaagagctcgggag

SEQ ID NO: 99478 - DNA, 543 bp, Homo sapiens
gcccaagacggcaaggacaggaggcatcaatcccacgggtaggtcactggtgtgatagtgagaagggcttttgtactctcacaccaggtccccagctttaggagactttgaagacatagtattatacaccgcccatagtattatacatcacccactgtccactgaatttactacagactggaggacggctccctgggaggtagtgtcccccactggaacttggctgagcctctaaaaggctgtgctctgttccatcaggttggctgcttctgaatgatgggcttcatggtaaagctgatgaatcccacggccttgaacccattatgttaagttccttgctgagaatgggtcccttgttccagctgaaggtttgtgggatcccaactcaatgaataaggtttttctgtaagcccttagatgataatgcagacagaaacatcatgggccttcgaaggcaaccccatatctagaggatgttttgatcatgataagcatgaattgttgttctttgcagggtggaaaggtctcagtgtaagtgaccca

SEQ ID NO: 99479 - DNA, 341 bp, Homo sapiens
ctcccaggtgcaagcgattctcctgcctcagcctcccaagtggctgggattaccggtgcatgccaccacgcccagttaacttttttgtatttttagtagagcggggggtctcgagtcctgacctccgatgatcccacccgcctgagcctcccaaagtgtgggattacaggcatgagccactgcacccggtgatctgtcagccactttccttgtcctctacagctaatcacccagttctgtgcctgtgttttacacacaaaaacctgcacatatttatagcagctttatttataattgccaaaagttggaagcaaccatgatgtacctcagttgatgaatgg

SEQ ID NO: 99480 - DNA, 988 bp, Homo sapiens
tccagccccagccgggccccctcgcgccgctgcggctgctgcgcggtgaggtcgtgacaagtcacagctaacttgccctccgcgccattccacgccaccaggaagcgcagccggtgcctctcggcatcggcgaagaggccttgccggaccggcgcccagccctccaggctgtcgagctgctcgtcctccatggccgtcggcggcagcggccctaggactcggcgggcgcgggcctgacctcgtcgcactgcctgtcaggggacagtcccaggctggagtgcaatggcatgatctcggctcactgcgacctctgcctcttgggttcaagcgattttcttgcctcagccttcgcagtagctgggattacaggcataactgaaggtgaaaggacagaatcaccgtgtgttactggcacagatgcatcggctagtgaagaaagaagacattcaaactagtcccgctctgtcgcccagtctggagtgcagcagcgccatcatagctcactgccacctagaagccggggtgaagcaatcctcctccatcagccttcagagtagctgggactgcctgcgcggcccaccacacccggctaatctttgtggtttttgtttagttttccgttctgggtttccgtcgggcgcagtggctcaggcctgcaatcccagcactttggaaggcagaggtgggcggatcacccgaggtcggagaccagcctgaccaacatgaagaaatcccgtctctactaaaaaaaagaaacaaactacaaaattagccggatatggtggctcatgcctgtaatcccagctactagggaggcccaggcaggagaatcacctaaatccgggaggccgaggttgcggtgggcaaagatcacaccattgcactccagcctggacaacaagggtgaaactccatctcaaaacagagaccgggtttcaccatgttgcccaggcggtctggaactcctaggctcaagcgatctgccaca

SEQ ID NO: 99481 - DNA, 890 bp, Homo sapiens
tccagccccagccgggccccctcgcgccgctgcggctgctgcgcggtgaggtcgtgacaagtcacagctaacttgccctccgcgccattccacgccaccaggaagcgcagccggtgcctctcggcatcggcgaagaggccttgccggaccggcgcccagccctccaggctgtcgagctgctcgtcctccatggccgtcggcggcagcggccctaggactcggcgggcgcgggcctgacctcgtcgcactgcctgtcaggggacagtcccaggcataactgaaggtgaaaggacagaatcaccgtgtgttactggcacagatgcatcggctagtgaagaaagaagacattcaaactagtcccgctctgtcgcccagtctggagtgcagcagcgccatcatagctcactgccacctagaagccggggtgaagcaatcctcctccatcagccttcagagtagctgggactgcctgcgcggcccaccacacccggctaatctttgtggtttttgtttagttttccgttctgggtttccgtcgggcgcagtggctcaggcctgcaatcccagcactttggaaggcagaggtgggcggatcacccgaggtcggagaccagcctgaccaacatgaagaaatcccgtctctactaaaaaaaagaaacaaactacaaaattagccggatatggtggctcatgcctgtaatcccagctactagggaggcccaggcaggagaatcacctaaatccgggaggccgaggttgcggtgggcaaagatcacaccattgcactccagcctggacaacaagggtgaaactccatctcaaaacagagaccgggtttcaccatgttgcccaggcggtctggaactcctaggctcaagcgatctgccaca

SEQ ID NO: 99482 - DNA, 414 bp, Homo sapiens
ggaacaaatcccagtggtagtgttacttggtgctctgtgactttggaacctaaagcttcactagaccgttgcaattactaagtgagtaaataaagcacatagcacaaaggcctggcactgagatgcccaccctcttcatggggctcctgtcttcttccttcctgatagatcatgtgtaagttcatatgtatctataagggacatgaattatccagaattccttatagtcagaatgtacagtgatataatgttcctgagttacttacccatttccactgggtaagtcagcttgcagaactcatttccgtttctcttcaactagccaaacatccattttcacctacatggaaacttctactggccttgggacaaataaatcacatttggagtgtcccaggacaatttagctttaga

SEQ ID NO: 99483 - DNA, 660 bp, Homo sapiens
ttcaactgaccaaccctgcgtgagcagttcactgaaaatgtggccatcagggctggcgcttaagtgactgaatgaattaaatctgtgacccccactgtctcactgactacttatctgagcaactatctgagcaggctgaactaaggcctgcctgagaatgggcagtgtttaaatgaagcctattgaataacttggaagtcacacctcatgagaagggtactcgaatttaatgagacacagcgtgtgttcagtcatgcgtgaatactgtattacagagaagtgtaaacagaactgctagtaacttgagcggggggatacctggctctaactaacagcatgggaggcttcctgatcacctgaaacaatcaagacatagcaaaaggccaagagtacaaaatcattttacatctgaggcaaacattagtatttcagacctttaaaataagcattttagtattacagcagcagaattagaacctgggtgggggcggatgaaaatttaaaggagagagttatcatccaagccaagtataaagatgcgccttttccaggggaaaagaaacagaaggcaatgatgtgggacctgtaacttaggtgtaaagagacacagaaaaattcaaacctctgaggtataaatctgagaagtttaacaaaaaaaaa

SEQ ID NO: 99484 - DNA, 564 bp, Homo sapiens
tcatatctactgcctgcaaaagaggcatcaataagaagctctctaaaagacttagaatcctgaggcacctctgaaagctggatgtgggtggggtcgaaacagttgcctggtatgtcaagaagagatggcttgtaatcatcttctattcataagaaccatttgaaatatgtcattaccataaattcaaatggtaccaggtaaggcattagtttactcttccaccttcccatccatgtcagctgttgtgtacatgcacaagtacacttctctgctttgagactgtcatcagaaatagatgactcctatcccctaacagcagaaatagtaaacagcatgatttactaaaacactacaagataatcactgctagattataaaatgttcaaaagtctaccttatgctaaatactgatattcaggccaggggtggtagctcatgcctgtaatcccaacactttgggaggccaaggtaggagggtcactttaactcaggagttcgaaaccagcctgggcaacatagtgggaccatcatctctacaaaaaaatttaaaaattagctgggcgt

SEQ ID NO: 99485 - DNA, 236 bp, Homo sapiens
ctgagtagctgggaccataggcgcctccatgcccagctaattattaaactttgtcttgagacggagtctccccacgttgcccaggctggtgttgaactcctggctcaagcaaccctcccacctcggcctcccagagtgctgcaatgacaggcatgagccccggtgcccggccttcttttgtattaactggaattcgtgtgcaaaggctgctggcctcctccccttccttttttttt

SEQ ID NO: 99486 - DNA, 626 bp, Homo sapiens
gcctggccgtctcctaggttagtgtagcagagattctattctcagataagacttccgtgtcggctgaagatgtaagggactgtccacgtttgagggagaatttcttctcactattctagctagaatatgtgaatgaagaaagatttctattatcctggactcctttgtattttttataattgttttctttttctcacttatgctctgatatgtattggtttcttgaataaattaaaacttaaagcactgctttagtagacatttctggaattcctgtctcccgctttcctgaccacatacagctcttctccactgcctacagctgtatgttttagcatgatgatggatggatggactggagctagagcaaggttaaccacatatgctctggtttcagaaacatcagagagggaggtggtgacatttataagtattcatcttttatttacaaatttcacgcacatttgtagtctactgtaagcaacatagtgtcttctaccatctttttcctcttaagggtcaacactactattctatttcatatttaccatttttttcttttaaaagaattcatgtggtgggtcattgtagaaaatttagagaatatgcaaatattgaaaaaaaaa

SEQ ID NO: 99487 - DNA, 403 bp, Homo sapiens
aaggtgtgactttcattaatccctcctggatccagggaagacctgaaaagggaatccctggctgtattaatggagattcactacagatgcaaattttccccacaagaggtggctttgcagggccatttcaaaatatgccaggaattcagtttttctgatttctctggggtgcctttggtcaaagcagggtccattcagtcacttgaggggcttatgattttattctgggtttacacaatcttaagtcaaaatagaaaataaggaaaaaagccagacgcggtggctcactcctataatctcagcatttcgggaggccgaggtgggtggatcacctgaggtcagaagttccaggccagcctggccaacataatgaaaccccatctctactaataatacaaaaatt

SEQ ID NO: 99488 - DNA, 509 bp, Homo sapiens
gccccctttagactatgaatgaaccccaagttctgctccgtttccttacacctggccccatttcccacactctgtctgtccctgtgaacacctcagcttgcaaccctagcctaagcttccaaaggggaaggcgtcactccttccaaatcaaaacagaactcgaagagactgaagcctgggttttgtagcgcaaccacaaacccccgtttgttcaggacagttgggttcgcatgtgttgacctggtgtcattattaatagcgttccctttcactctcactgtcctgtcaggctgccttgagtctctgccggctctagacccacctgtcataccaaggattctgtacccagagccctcagaaggtcatttgctctctgcatagtttctcagcctggagatttcaaacttcctcctagcagagtttattctgcagcatgctgctaaggtaggcagaagtaaagagagaacggtggaataaagagaagttagaaaaaagaagagagctaaagg

SEQ ID NO: 99489 - DNA, 699 bp, Homo sapiens
tataggtgcaggctgccatgcccggctaatttttttatttttgtagaaatggggattcaccatgttgcccaggctggtctcgaactcctgggctcaagcaatatgcccgcctcggccttccaaaatgttgggattacaggcgtgcaggccagggcttgcactgtgagctccctgaaagcaaaaatcatgtccagctgacctctgtgtccccagcatccagcctttgctgctcagagaatgttacatggaggttcctgcaccaggtgagggactgagcaagagtcttagttttggggttggttttagccatggtgctgtatctttaaatgaaatcttccaaagagacaatacataacgcaggtgaaagaggagctggtctcatccaagtcaggacaggagctgatctacagcttccaatcccactcagaaaccccatctgcccccaagggggtctgtggaaccaccagtgggtgctctgaggaaccgagtacgtaaactgtagatgcggtggagagcacaagctggagcctgggagaggcagaggtgagccccaggccagtccctgatttctgggtggacttggcccaggccccagtgctgggtcctccctcactggctcacaaggtaggtcaggtcagaggaggtcagggggtgacagatgggtctatcctatgggtgggccaggcgtggtggctcaca

SEQ ID NO: 99490 - DNA, 632 bp, Homo sapiens
attttctggtagtccaagtggcctggtaatgcaaccactggccaagcagcagggagcacttgggccctggaggcgtgcaggccagggcttgcactgtgagctccctgaaagcaaaaatcatgtccagctgacctctgtgtccccagcatccagcctttgctgctcagagaatgttacatggaggttcctgcaccaggtgagggactgagcaagagtcttagttttggggttggttttagccatggtgctgtatctttaaatgaaatcttccaaagagacaatacataacgcaggtgaaagaggagctggtctcatccaagtcaggacaggagctgatctacagcttccaatcccactcagaaaccccatctgcccccaagggggtctgtggaaccaccagtgggtgctctgaggaaccgagtacgtaaactgtagatgcggtggagagcacaagctggagcctgggagaggcagaggtgagccccaggccagtccctgatttctgggtggacttggcccaggccccagtgctgggtcctccctcactggctcacaaggtaggtcaggtcagaggaggtcagggggtgacagatgggtctatcctatgggtgggccaggcgtggtggctcaca

SEQ ID NO: 99491 - DNA, 2600 bp, Homo sapiens
cttgtccggtgacctaggagcaggcctcctggtcaacagccccacagaccaatggctgcacctcagaagaggactgaatagcgggtgttgcccccgagtgctcagagtccctagggaagctcacacctgcgcaaccttgtccagagtcccctgtgtatcctgccggcacctcctccagggagcctctgagtcttgcctagttgagcagcagcccccatccctgtcctccacagccttcagtgcagtcctacagggcagcctcttcgggcagctgggcaccatgccctccacctacagcaccctcttcctcagcggccagggcctggctgggatctttgctgcccttgccatgctcctgtccatggccagtggcgtggacgccgagacctctgccctggggtactttatcacgccctgtgtgggcatcctcatgtccatcgtgtgttacctgagcctgcctcacctgaagtttgcccgctactacctggccaataaatcatcccaggcccaagctcaggagctggagaccaaagctgagctcctccagtctgatgagaacgggattcccagtagtccccagaaagtagctctgaccctggatcttgacctggagaaggagccggaatcagagccagatgagccccagaagccaggaaaaccttcagtcttcactgtcttccagaagatctggctgacagcgctgtgccttgtgttggtcttcacagtcaccctgtccgtcttccccgccatcacagccatggtgaccagctccaccagtcctgggaagtggagtcagttcttcaaccccatctgctgcttcctcctcttcaacatcatggactggctgggacggagcctgacctcttacttcctgtggccagacgaggacagccggctgctgcccctgctggtctgcctgcggttcctgttcgtgcccctcttcatgctgtgccacgtgccccagaggtcccggctgcccatcctcttcccacaggatgcctacttcatcaccttcatgctgctctttgccgtttctaatggctacctggtgtccctcaccatgtgcctggcgcccaggcaggtgctgccacacgagagggaggtggccggcgccctcatgaccttcttcctggccctgggactttcctgtggagcctccctctccttcctcttcaaggcgctgctctgaagtggcccctccaggctctttggcagcctcttctcgacgtctccttccggagctgagatccagcccagggcgaatggcgagcttggctcaggcctctgcggggtggaggcccctgggcctgaggctgccagcagcgggcaggagctgctcttcatccacttggagtgctgcggggaagaaatcaccaccggtcattctaaccctcacccaggaatgggggtgactcgcacaagacctcatggaaagggtgatgactagggaaaagagggtgcagggcacggctgctccccaccaccaggtctgcatttgttcatcatcatcaggagcagaggtgaccagagggttcagagtgggaggcagggccagcccaggccaggagcgcctcatcttcccaggcctcagccacccagggtaaaaggtgccagggaagttgtgggcacctgagaggaggaacagatgtggaggacctgagggtgctcaaagggccaggctcagcctcaagcagtgttttcattgccaacacttactgtacccactccgcagagccccgctgggcctgggccccagggccacagctagcctgcatgtgtgtactgcactttacagtttgcaaagctcttccatacccactctctcaccgaagcctaattgaggctcttggaaggagtcaggcaaggattgtgcttcccccattatacaggtgacaaaactgagtcctggggaaagtgactggtccgtggtagagccgggacccaatcccctctctctcctccctgttggtgctgttcttcctgcccaacacctgtttctcttttcctcaaggggtttggggcaggagcctgggcacttactccccgtttttgctgtttctccttctgaccctgctcttgggtctaataaccccatttatttgtatgatgcgttcaccaagtctttatttccgaagtgctgttggctctattggcctcagtgaactgggtggggtcggaaagattgtacccccttgacaggtgggatgactgaggccctgagaggggtagggattggtgggcatctctgtgctgggtcctctggaccacatgatagctggggggtactgacctgcaaggaatcctgagctcctgggcagagcacctagttggatggacaactattgctctcccactccatgagcccctgggctctcaccagcatcctctgcctccccaggatagctcctccttggaaatctggccttagagaggcagtcagtgtgggcagggctttggcgaccccaccaattctacacacggatggaggaaaggcctgcttcaccacacacctatactaccctgcccgtcccagagaaaagcaagggttttctgcccacctgcctttgtgaacattcactgagcacctattagatattagg

SEQ ID NO: 99492 - DNA, 2601 bp, Homo sapiens
  misc_feature (1784)..(1784): n is a, c, g, or t
  misc_feature (1787)..(1787): n is a, c, g, or t
  misc_feature (1798)..(1798): n is a, c, g, or t
  misc_feature (1815)..(1815): n is a, c, g, or t
  misc_feature (1831)..(1831): n is a, c, g, or t
  misc_feature (1842)..(1842): n is a, c, g, or t
  misc_feature (1856)..(1856): n is a, c, g, or t
  misc_feature (1861)..(1861): n is a, c, g, or t
cttgtccggtgacctaggagcaggcctcctggtcaacagccccacagaccaatggctgcacctcagaagaggactgaatagcgggtgttgcccccgagtgctcagagtccctagggaagctcacacctgcgcaaccttgtccagagtcccctgtgtatcctgccggcacctcctccagggagcctctgagtcttgcctagttgagcagcagcccccatccctgtcctccacagccttcagtgcagtcctacagggcagcctcttcgggcagctgggcaccatgccctccacctacagcaccctcttcctcagcggccagggcctggctgggatctttgctgcccttgccatgctcctgtccatggccagtggcgtggacgccgagacctctgccctggggtactttatcacgccctgtgtgggcatcctcatgtccatcgtgtgttacctgagcctgcctcacctgaagtttgcccgctactacctggccaataaatcatcccaggcccaagctcaggagctggagaccaaagctgagctcctccagtctgatgagaacgggattcccagtagtccccagaaagtagctctgaccctggatcttgacctggagaaggagccggaatcagagccagatgagccccagaagccaggaaaaccttcagtcttcactgtcttccagaagatctggctgacagcgctgtgccttgtgttggtcttcacagtcaccctgtccgtcttccccgccatcacagccatggtgaccagctccaccagtcctgggaagtggagtcagttcttcaaccccatctgctgcttcctcctcttcaacatcatggactggctgggacggagcctgacctcttacttcctgtggccagacgaggacagccggctgctgcccctgctggtctgcctgcggttcctgttcgtgcccctcttcatgctgtgccacgtgccccagaggtcccggctgcccatcctcttcccacaggatgcctacttcatcaccttcatgctgctctttgccgtttctaatggctacctggtgtccctcaccatgtgcctggcgcccaggcaggtgctgccacacgagagggaggtggccggcgccctcatgaccttcttcctggccctgggactttcctgtggagcctccctctccttcctcttcaaggcgctgctctgaagtggcccctccaggctctttggcagcctcttctcgacgtctccttccggagctgagatccagcccagggcgaatggcgagcttggctcaggcctctgcggggtggaggcccctgggcctgaggctgccagcagcgggcaggagctgctcttcatccacttggagtgctgcggggaagaaatcaccaccggtcattctaaccctcacccaggaatgggggtgactcgcacaagacctcatggaaagggtgatgactagggaaaagagggtgcagggcacggctgctccccaccaccaggtctgcatttgttcatcatcatcaggagcagaggtgaccagagggttcagagtgggaggcagggccagcccaggccaggagcgcctcatcttcccaggcctcagccacccagggtaaaaggtgccagggaagttgtgggcacctgagaggaggaacagatgtggaggacctgagggtgctcaaagggccaggctcagcctcaagcagtgttttcattgccaacacttactgtacccactccgcagagccccgctgggcctgggccccagggccacagctagcctgcatgatgaacanaanaaaaaagttanaaaaaaaaaacaaaacnaaaaaaaaaaccgaanccaaataaaangaaaaaggaagganaacangcaaggattgtgcttcccccattatacaggtgacaaaactgagtcctggggaaagtgactggtccgtggtagagccgggacccaatcccctctctctcctccctgttggtgctgttcttcctgcccaacacctgtttctcttttcctcaaggggtttggggcaggagcctgggcacttactccccgtttttgctgtttctccttctgaccctgctcttgggtctaataaccccatttatttgtatgatgcgttcaccaagtctttatttccgaagtgctgttggctctattggcctcagtgaactgggtggggtcggaaagattgtacccccttgacaggtgggatgactgaggccctgagaggggtagggattggtgggcatctctgtgctgggtcctctggaccacatgatagctggggggtactgacctgcaaggaatcctgagctcctgggcagagcacctagttggatggacaactattgctctcccactccatgagcccctgggctctcaccagcatcctctgcctccccaggatagctcctccttggaaatctggccttagagaggcagtcagtgtgggcagggctttggcgaccccaccaattctacacacggatggaggaaaggcctgcttcaccacacacctatactaccctgcccgtcccagagaaaagcaagggttttctgcccacctgcctttgtgaacattcactgagcacctattagatattagg

SEQ ID NO: 99493 - DNA, 300 bp, Homo sapiens
ctgtggaatctggaatcccatcatgttagactcagaggccctgagagacatccttatccagcagcctcatttacagaccaggaaactgaggcccggaaagaaggggccagttatggtgacagaggggttgggtcagagcccagactggatgggcagagggcagtggagctgggtccagatttagacccagcattttctaagagctcctgttcccgggtgttctaggcaggtgctgccacacgagagggaggtggccggcgccctcatgaccttcttcctggccctgggactttcctgtgg

SEQ ID NO: 99494 - DNA, 614 bp, Homo sapiens
gagaggggagttggagaccagtatgagctgcagccgtttccctcccaggtcagttcttcaaccccatctgctgcttcctcctcttcaacatcatggactggctgggacggagcctgacctcttacttcctgtgggtaagcacaccagggctgggtgatccgatgttttaggaagcagtttgggatccgagggcttgaaagagcatggaggtgattttctggtagtccaagtggcctggtaatgcaaccactggccaagcagcagggagcacttgggccctggaggcgtgcaggccagggcttgcactgtgagctccctgaaagcaaaaatcatgtccagctgacctctgtgtccccagcatccagcctttgctgctcagagaatgttacatggaggttcctgcaccaggtgagggactgagcaagagtcttagttttggggttggttttagccatggtgctgtatctttaaatgaaatcttccaaagagacaatacataacgcaggtgaaagaggagctggtctcatccaagtcaggacaggagctgatctacagcttccaatcccactcagaaaccccatctgcccccaagggggtctgtggaaccaccagtg

SEQ ID NO: 99495 - DNA, 968 bp, Homo sapiens
cttgtccggtgacctaggagcaggcctcctggtcaacagccccacagaccaatggctgcacctcagaagaggactgaatagcgggtgttgcccccgagtgctcagagtccctagggaagctcacacctgcgcaaccttgtccagagtcccctgtgtatcctgccggcacctcctccagggagcctctgagtcttgcctagttgagcagcagcccccatccctgtcctccacagccttcagtgcagtcctacagggcagcctcttcgggcagctgggcaccatgccctccacctacagcaccctcttcctcagcggccagggcctggctgggatctttgctgcccttgccatgctcctgtccatggccagtggcgtggacgccgagacctctgccctggggtactttatcacgccctgtgtgggcatcctcatgtccatcgtgtgttacctgagcctgcctcacctgaagtttgcccgctactacctggccaataaatcatcccaggcccaagctcaggagctggagaccaaagctgagctcctccagtctggtaagccctgagaccctcctggggaggtgggagatgcagaggaagctagagccacctcccctgggaagctgttccatctgttcccagccagagcccacccctagtagccttgtgcaaacaggaagatcatgaagggaagttggtaggattaaagtcatccctgctgttgtttgggcctcagtttccacctctataaaatggggaggcgacagaggttccatgcatgcaaactttggatccgaagacctctgaattggaatactagtttcacaacatcccagctgtgtggcctgagacaaaccacttagccactgcacccctctgaacctcaatgtgtcatttgtaaagcaatggtaatgagataatccatctaaggtgcttcgctcatcacccgacccatgcacgcgcttcctggta

SEQ ID NO: 99496 - DNA, 1898 bp, Homo sapiens
ggctacctgtgcgactccagccgccctgcaccggaatctggggagacccgccccccgccccaccggtctgcggccctccgccccagcgcaggtgcaggtgcggcttctctgcccctttcaccccaggcgcatccgcggcggcggccatggcgcgaggagacgccccgcgggacagccagacgaggacagccggctgctgcccctgctggtctgcctgcggttcctgttcgtgcccctcttcatgctgtgccacgtgccccagaggtcccggctgcccatcctcttcccacaggatgcctacttcatcaccttcatgctgctctttgccgtttctaatggctacctggtgtccctcaccatgtgcctggcgcccaggcaggtgctgccacacgagagggaggtggccggcgccctcatgaccttcttcctggccctgggactttcctgtggagcctccctctccttcctcttcaaggcgctgctctgaagtggcccctccaggctctttggcagcctcttctcgacgtctccttccggagctgagatccagcccagggcgaatggcgagcttggctcaggcctctgcggggtggaggcccctgggcctgaggctgccagcagcgggcaggagctgctcttcatccacttggagtgctgcggggaagaaatcaccaccggtcattctaaccctcacccaggaatgggggtgactcgcacaagacctcatggaaagggtgatgactagggaaaagagggtgcagggcacggctgctccccaccaccaggtctgcatttgttcatcatcatcaggagcagaggtgaccagagggttcagagtgggaggcagggccagcccaggccaggagcgcctcatcttcccaggcctcagccacccagggtaaaaggtgccagggaagttgtgggcacctgagaggaggaacagatgtggaggacctgagggtgctcaaagggccaggctcagcctcaagcagtgttttcattgccaacacttactgtacccactccgcagagccccgctgggcctgggccccagggccacagctagcctgcatgtgtgtactgcactttacagtttgcaaagctcttccatacccactctctcaccgaagcctaattgaggctcttggaaggagtcaggcaaggattgtgcttcccccattatacaggtgacaaaactgagtcctggggaaagtgactggtccgtggtagagccgggacccaatcccctctctctcctccctgttggtgctgttcttcctgcccaacacctgtttctcttttcctcaaggggtttggggcaggagcctgggcacttactccccgtttttgctgtttctccttctgaccctgctcttgggtctaataaccccatttatttgtatgatgcgttcaccaagtctttatttccgaagtgctgttggctctattggcctcagtgaactgggtggggtcggaaagattgtacccccttgacaggtgggatgactgaggccctgagaggggtagggattggtgggcatctctgtgctgggtcctctggaccacatgatagctggggggtactgacctgcaaggaatcctgagctcctgggcagagcacctagttggatggacaactattgctctcccactccatgagcccctgggctctcaccagcatcctctgcctccccaggatagctcctccttggaaatctggccttagagaggcagtcagtgtgggcagggctttggcgaccccaccaattctacacacggatggaggaaaggcctgcttcaccacacacctatactaccctgcccgtcccagagaaaagcaagggttttctgcccacctgcctttgtgaacattcactgagcacctattagatattagg

SEQ ID NO: 99497 - DNA, 467 bp, Homo sapiens
gcccccttcctctacctttaaagtcagcatttgcgggttgcatctctctctgacccgtcctccaacgttgcccgctctctgcagctagaaaggttctgtgttcttaagggctgaagtgattagattgggcccaccccagataatccaggataatctccccatctcaaggtctgtattcttagttacatctgcaaaatcgctttggccacgtaaagtaatatattcacaggttccagggattagggcatgaacatttttcggtgggtccactctttttgagatggagtctcgctctgtcacccaggctggagtgcagtggcatgatctcggctcactgcaacttctgcttcctgggttcaaatgattcttgtgcctcagcctcttgagtagctgggattacaggcatgagccactgtgcccagtgggtctactcttttgcctactgcggatgccttcttgggcagccc

SEQ ID NO: 99498 - DNA, 1056 bp, Homo sapiens
tgtttccttgcttcccaagggggtggtgtggaggggaagggggaatgatttttcttgcgtctcccggaagctgtgctgttagacacaattacctcagctaggtcactgagaccaaatcatacgggacgcttaatgaaggaccgcattcaaaagggattacgccttgaagtgtcctggcgggcgacatttttacagattttaaggggcaaatttagaacagctaaaaaaaaggtttcaaagccgtgactactaaaagagcatctaggcctcccattttatcaggaggaattcaacttagaaaatgcaggtagtgtcatacaaactgaaatggagatacaatcctgatagaagattacacaagataccaggcattattgtgtcaaattagcactgatgatttacccatagcagtatgaacttcttggaggaaggaaagaaaagtacaacagcttcttcagagaaaagaacaaattggcataggaaagaagaaagacacttcgtttaaagaatgtattttgcagtaaatgcccacaaacagcccatagagagttcacttatttatgcatcaccatatgattattctgactgcctttagtctcaaacagggaaagcctccgcaaaaagcattctccaggtgttagtttaggtttgtcattatttcctatttatagactctgtctagtaaaagaagacaaattactgtaagtgggggtaaatgtgattaaacgagtcctctgaagataagaagttacatggacaagggtcattaacacaaatgacctctttttgccagaacatatttttttaatttagtggatttgaaaaaaactgcaaagcaagaataatctctactgcacatactcacagagaaacatatcccttttattctaataaatattttcatgactcttcagtattttaataacatactgataatgccaaaatactctcagaatacaccaagaacaatattggagggatcatttatcttaaggagtctaatcggaaacacttaagcaacatagttataatcagacaagacatataacaccaaga

SEQ ID NO: 99499 - DNA, 1281 bp, Homo sapiens
tgtttccttgcttcccaagggggtggtgtggaggggaagggggaatgatttttcttgcgtctcccggaagctgtgctgttagacacaattacctcagctaggtcactgagaccaaatcatacgggacgcttaatgaaggaccgcattcaaaagggattacgccttgaagtgtcctggcgggcgacatttttacagattttaaggggcaaatttagaacagctaaaaaaaaggtttcaaagccgtgactactaaaagagcatctaggcctcccattttatcaggaggaattcaacttagaaaatgcagagacagagaaaacctgttgtatgatccagtattcctggttgtattttttttaaagatgggcacagaacacagaagttagcatactagccatgtcaacaaatacaatgacctgtgccacggtgatatgatatgaagcagttaatgcaacagataaaaattgcatttgacccaaatgtaacagttcaagattcatgatcagaagaaatatgtaactaattcacaaaggtagtgtcatacaaactgaaatggagatacaatcctgatagaagattacacaagataccaggcattattgtgtcaaattagcactgatgatttacccatagcagtatgaacttcttggaggaaggaaagaaaagtacaacagcttcttcagagaaaagaacaaattggcataggaaagaagaaagacacttcgtttaaagaatgtattttgcagtaaatgcccacaaacagcccatagagagttcacttatttatgcatcaccatatgattattctgactgcctttagtctcaaacagggaaagcctccgcaaaaagcattctccaggtgttagtttaggtttgtcattatttcctatttatagactctgtctagtaaaagaagacaaattactgtaagtgggggtaaatgtgattaaacgagtcctctgaagataagaagttacatggacaagggtcattaacacaaatgacctctttttgccagaacatatttttttaatttagtggatttgaaaaaaactgcaaagcaagaataatctctactgcacatactcacagagaaacatatcccttttattctaataaatattttcatgactcttcagtattttaataacatactgataatgccaaaatactctcagaatacaccaagaacaatattggagggatcatttatcttaaggagtctaatcggaaacacttaagcaacatagttataatcagacaagacatataacaccaaga

SEQ ID NO: 99500 - DNA, 171 bp, Homo sapiens
gtgtactaccatctttcaatgatgattcaattcctcatattagatctgttgtcttcaaaagctgttttttattaattttatttatttatttatttatttagagacagaatcttgctctgtcacccaggctggagtgcagtggcatgatctcggctcactgcaacctccacc

SEQ ID NO: 99501 - DNA, 1344 bp, Homo sapiens
atgacagagaactccgacaaagttcccattgccctggtgggacctgatgacgtggaattctgcagccccccggcgtacgctacgctgacggtgaagccctccagccccgcgcggctgctcaaggtgggagccgtggtcctcatttcgggagctgtgctgctgctctttggggccatcggggccttctacttctggaaggggagcgacagtcacatttacaatgtccattacaccatgagtatcaatgggaaattacaagatgggtcaatggaaatagacgctgggaacaacttggagacctttaaaatgggaagtggagctgaagaagcaattgcagttaatgatttccagaatggcatcacaggaattcgttttgctggaggagagaagtgctacattaaagcgcaagtgaaggctcgtattcctgaggtgggcgccgtgaccaaacagagcatctcctccaaactggaaggcaagatcatgccagtcaaatatgaagaaaattctcttatctgggtggctgtagatcagcctgtgaaggacaacagcttcttgagttctaaggtgttagaactctgcggtgaccttcctattttctggcttaaaccaacctatccaaaagaaatccagagggaaagaagagaagtggtaagaaaaattgttccaactaccacaaaaagaccacacagtggaccacggagcaacccaggcgctggaagactgaataatgaaaccagacccagtgttcaagaggactcacaagccttcaatcctgataatccttatcatcagcaggaaggggaaagcatgacattcgaccctagactggatcacgaaggaatctgttgtatagaatgtaggcggagctacacccactgccagaagatctgtgaacccctggggggctattacccatggccttataattatcaaggctgccgttcggcctgcagagtcatcatgccatgtagctggtgggtggcccgtatcttgggcatggtgtgaaatcacttcatatatcatgtgctgtaaaataagaactagctgaagagacaaccaaagaagcattaaggcaggttgatgctgatgggaccataaaatatttttacactcaacctgagcggttattcttgacactcttaacagaattttttcaattgttttccagaactttagtatatgcaaatgtactgaaagggtagttcaagtctaaaatgccataacccctttattatttgttattttttatttgcattgctttgccataagtcttcccttgcttgtatcttccaaagctattttgaaataaacatgaaaatttacagtttgccaaaaatctcaatt

SEQ ID NO: 99502 - DNA, 257 bp, Homo sapiens
gcacgaggaagtgatttcacaccatatatcatgtgctgtaaaagaataaccgctcaggttgagtgtaaaaatattttccagaactttagtatatgcaaatgtactgaaagggtagttcaagtctaaaatgccataacccctttattatttgttattttttatttgcattgctttgccataagtcttcccttgcttgtatcttccaaagctattttgaaataaacatgaaaatttacagtttgccaaaaatctcaatt

SEQ ID NO: 99503 - DNA, 979 bp, Homo sapiens
gccctggaagctattactgcaagaagccacaagcattccactgacttagaattagcagtggcagaaatgctactttttatcataatgcttccttcttgctttcctacttaaaacaagctgagttactaagtggtaaccatagttcattaaaggcatggagaaacttcaggatatcgttttaaaagacaaaacaactttctagtcagtgacaggtgaggtaggtgtagattccttggtgtcaaaaggaattatgaatgacagcagtaaacatgaattatgaatgacagggtaaacaagatcaaaccctttacagattacaccttcctgtagcagtgaaaaattcagaatcttatttaaaaataacatgcatgctatgaccttcccactatgcagttatcacaaataattatcttttatttcacagcagcaggaaggggaaagcatgacattcgaccctagactggatcacgaaggaatctgttgtatagaatgtaggcggagctacacccactgccagaagatctgtgaacccctggggggctattacccatggccttataattatcaaggctgccgttcggcctgcagagtcatcatgccatgtagctggtgggtggcccgtatcttgggcatggtgtgaaatcacttcatatatcatgtgctgtaaaataagaactagctgaagagacaaccaaagaagcattaaggcaggttgatgctgatgggaccataaaatatttttacactcaacctgagcggttattcttgacactcttaacagaattttttcaattgttttccagaactttagtatatgcaaatgtactgaaagggtagttcaagtctaaaatgccataacccctttattatttgttattttttatttgcattgctttgccataagtcttcccttgcttgtatcttccaaagctattttgaaataaacatgaaaatttacagtttgccaaaaatctcaatt

SEQ ID NO: 99504 - DNA, 1351 bp, Homo sapiens
ccgactgcaaaggaccctcgggagggagcgcggcgaaaggggcacccgtaggagcccgggcgagctgtttcccgcccgactccccactccctgggggctaccgcgtggggcccgggtgcgctgggggccgcaggtgctggcggcacaaacgcgacggtccctctcccgccccggcccgcaggcgtacgctacgctgacggtgaagccctccagccccgcgcggctgctcaaggtgggagccgtggtcctcatttcgggagctgtgctgctgctctttggggccatcggggccttctacttctggaaggggagcgacagtcacatttacaatgtccattacaccatgagtatcaatgggaaattacaagatgggtcaatggaaatagacgctgggaacaacttggagacctttaaaatgggaagtggagctgaagaagcaattgcagttaatgatttccagaatggcatcacaggaattcgttttgctggaggagagaagtgctacattaaagcgcaagtgaaggctcgtattcctgaggtgggcgccgtgaccaaacagagcatctcctccaaactggaaggcaagatcatgccagtcaaatatgaagaaaattctcttatctgggtggctgtagatcagcctgtgaaggacaacagcttcttgagttctaaggtgttagaactctgcggtgaccttcctattttctggcttaaaccaacctatccaaaagaaatccagagggaaagaagagaagtggtaagaaaaattgttccaactaccacaaaaagaccacacagtggaccacggagcaacccaggcgctggaagactgaataatgaaaccagacccagtgttcaagaggactcacaagccttcaatcctgataatccttatcatcagcaggaaggggaaagcatgacattcgaccctagactggatcacgaaggaatctgttgtatagaatgtaggcggagctacacccactgccagaagatctgtgaacccctggggggctattacccatggccttataattatcaaggctgccgttcggcctgcagagtcatcatgccatgtagctggtgggtggcccgtatcttgggcatggtgtgaaatcacttcatatatcatgtgctgtaaaataagaactagctgaagagacaaccaaagaagcattaaggcaggttgatgctgatgggaccataaaatatttttacactcaacctgagcggttattcttgacactcttaacagaattttttcaattggttgtcgtgaccttagagtacgtcaatgcactccaaccagagttccagtctgatttgccatcacccctttaaaatcacgtta

SEQ ID NO: 99505 - DNA, 384 bp, Homo sapiens
cctgaattgctcaaaaaagaaagcatcactaactcttatgctcactttcagatttacaatgtccattacaccatgagtatcaatgggaaattacaagatgggtcaatggaaatagacgctgggaacaacttggagacctttaaaatgggaagtggagctgaagaagcaattgcagttaatgatttccagaatgtaagtatatttcatgcatttagagaatttaaccaggcaagcctgcgggacttttctaattcaaggaggagcagcgtttctcacacacatccaaatggtaactgttctttatagcagttgtagtgccactaatccactacatgtagcatattctctctgagaaaggaccagactttgtccttcatatttgca

SEQ ID NO: 99506 - DNA, 1453 bp, Homo sapiens
ccgactgcaaaggaccctcgggagggagcgcggcgaaaggggcacccgtaggagcccgggcgagctgtttcccgcccgactccccactccctgggggctaccgcgtggggcccgggtgcgctgggggccgcaggtgctggcggcacaaacgcgacggtccctctcccgccccggcccgcaggcgtacgctacgctgacggtgaagccctccagccccgcgcggctgctcaaggtgggagccgtggtcctcatttcgggagctgtgctgctgctctttggggccatcggggccttctacttctggaaggggagcgacagtcacatttacaatgtccattacaccatgagtatcaatgggaaattacaagatgggtcaatggaaatagacgctgggaacaacttggagacctttaaaatgggaagtggagctgaagaagcaattgcagttaatgatttccagaatggcatcacaggaattcgttttgctggaggagagaagtgctacattaaagcgcaagtgaaggctcgtattcctgaggtgggcgccgtgaccaaacagagcatctcctccaaactggaaggcaagatcatgccagtcaaatatgaagaaaattctcttatctgggtggctgtagatcagcctgtgaaggacaacagcttcttgagttctaaggtgttagaactctgcggtgaccttcctattttctggcttaaaccaacctatccaaaagaaatccagagggaaagaagagaagtggtaagaaaaattgttccaactaccacaaaaagaccacacagtggaccacggagcaacccaggcgctggaagactgaataatgaaaccagacccagtgttcaagaggactcacaagccttcaatcctgataatccttatcatcagcaggaaggggaaagcatgacattcgaccctagactggatcacgaaggaatctgttgtatagaatgtaggcggagctacacccactgccagaagatctgtgaacccctggggggctattacccatggccttataattatcaaggctgccgttcggcctgcagagtcatcatgccatgtagctggtgggtggcccgtatcttgggcatggtgtgaaatcacttcatatatcatgtgctgtaaaataagaactagctgaagagacaaccaaagaagcattaaggcaggttgatgctgatgggaccataaaatatttttacactcaacctgagcggttattcttgacactcttaacagaattttttcaattgttttccagaactttagtatatgcaaatgtactgaaagggtagttcaagtctaaaatgccataacccctttattatttgttattttttatttgcattgctttgccataagtcttcccttgcttgtatcttccaaagctattttgaaataaacatgaaaatttacagtttgccaaaaatctcaatt

SEQ ID NO: 99507 - DNA, 380 bp, Homo sapiens
taccatttcctagcagcgcaactacttctcagattagcatggaaaggcctcccagactagcccgtaccctccaacagccaggtgagtcaggccaagacgtgggttccctgaggaagattcccgctggaaatttcagggaagaacctcacctccttccctttcttccttatttggtagttgtcctaattgtaacaagcatccaagttacaattcaagaccaagtagggacctgaggtgatctcctgtcctgtctgaaatccaccttcctttcctagctgttcccgccagatttcagcgccctcttcccttctcctcccaagacagtcttagctcagacaggatttccttagtcttagtcatcagctcttattgtccggcct

SEQ ID NO: 99508 - DNA, 2073 bp, Homo sapiens
gaatccacccgcggaaactccgagcccctccgactgagcatgcgccatcgccaggcggcttttggtcacaggctcccgagttctcctagctggggctgcggagctggggggagggaagagaggaaaggggagggggtgcctggagaggcggaggctcgcgcgcctgcgcatccagctccagggaccctaggttttctatgggattcccaatctgcagcagagatttacccgagcgtgttgcggcagcggctgggcttgcaaggcgcgatccaagagggatttaagcagcccagagctccagagaaaaagagagcgagagagaaccacacacagagacggcttaagcgtttacccgaattaaatatatatttttaaaaagaactgttgagttttatcattttcgttaagtgaccgtgcgcagcgctgtaactgcaggatggggaagcagaatagcaaactggcccctgaagtgatggaggacctggtgaagagcacagagtttaatgagcatgaactcaagcagtggtacaaaggatttctcaaggactgtccaagtgggaggctaaatctcgaggaatttcagcagctctatgtgaagttctttccttatggagacgcctccaagtttgcccagcatgccttccgaaccttcgacaagaatggggacggcaccattgacttccgagagttcatctgcgctctgtccatcacctccaggggcagctttgagcagaagctgaactgggccttcaatatgtatgacctggatggtgatggcaagatcacccgagtggagatgctggagatcatcgaggctatctacaaaatggtaggcactgtgatcatgatgaaaatgaatgaggatggcctgacgcctgagcagcgagtagacaagattttcagcaagatggataagaacaaagatgaccagattacactggatgaattcaaagaagctgcaaagagcgacccttccattgtattacttctgcagtgcgacatccagaaatgagctgatgtcaatgctatggactgcacaaaagtctcaatgttccattcagtctgcagctattcacacacacacacacacacacacacacacacacacacacacacacacacaaatattgcttggactacctataaatggacttgcttcttgtgtttgaaacactcgtgtgcatgagaatgtcatttgctaatgaattttaaaagcatatataaaacaaaacaaacaacctgccacaatgtgatatgtgtaatatcatttcataaaaatccctcttcctccaaagcctgggcagaaatgtgctgcaaagagttatatgacttcttgttcatgttttgctaatgctcgtatctccttgattacataatgttagtagcactgagacccccatggtaatgtaacttaattataagctatgtcactaccctcctgtaaaatactattggacagacacagagggacccttggctcctgtgtctggtccacacaccacagaagcttgtattatcagtgaatataaatgtactacatttgcatgccttttgggtttgccttaattcttacctcatttgcatcctatcgatctggaaagagctgttttggatgaatgcagtataaaatgtaaaaaccctgctaaatgacttattgattaagtatatctatctatatatacatatacacaaagatattatttatcgaaagtaaaaaagatggaagtgtattggtttctgtttgaattttcaaaggcttccaatgtggtggcaataaatgtcccaaataaatttataacaattgattttccccctaattcttattttataattttaaaattgcagcagttgctagcaacaacttactaaatctactcttaaatatacaactttggaatttgaagaattaatgacaacaaaagggaaaaaagcaactttccaacttttcatccaggctcccaaaagagggacaacgaacatggcatgtgaaaagtaaaacagatttgttcattccgaaaaaaaaatgttcattctatgacaataaattttatctcagtgtgacaaaaaaaaaaa

SEQ ID NO: 99509 - DNA, 2002 bp, Homo sapiens
gaatccacccgcggaaactccgagcccctccgactgagcatgcgccatcgccaggcggcttttggtcacaggctcccgagttctcctagctggggctgcggagctggggggagggaagagaggaaaggggagggggtgcctggagaggcggaggctcgcgcgcctgcgcatccagctccagggaccctaggttttctatgggattcccaatctgcagcagagatttacccgagcgtgttgcggcagcggctgggcttgcaaggcgcgatccaagagggatttaagcagcccagagctccagagaaaaagagagcgagagagaaccacacacagagacggcttaagcgtttacccgaattaaatatatatttttaaaaagaactgttgagttttatcattttcgttaagtgaccgtgcgcagcgctgtaactgcaggatggggaagcagaatagcaaactggcccctgaagtgatggaggacctggtgaagagcacagagtttaatgagcatgaactcaagcagtggtacaaaggatttctcaaggactgtccaatttgcccagcatgccttccgaaccttcgacaagaatggggacggcaccattgacttccgagagttcatctgcgctctgtccatcacctccaggggcagctttgagcagaagctgaactgggccttcaatatgtatgacctggatggtgatggcaagatcacccgagtggagatgctggagatcatcgaggctatctacaaaatggtaggcactgtgatcatgatgaaaatgaatgaggatggcctgacgcctgagcagcgagtagacaagattttcagcaagatggataagaacaaagatgaccagattacactggatgaattcaaagaagctgcaaagagcgacccttccattgtattacttctgcagtgcgacatccagaaatgagctgatgtcaatgctatggactgcacaaaagtctcaatgttccattcagtctgcagctattcacacacacacacacacacacacacacacacacacacacacacacacacaaatattgcttggactacctataaatggacttgcttcttgtgtttgaaacactcgtgtgcatgagaatgtcatttgctaatgaattttaaaagcatatataaaacaaaacaaacaacctgccacaatgtgatatgtgtaatatcatttcataaaaatccctcttcctccaaagcctgggcagaaatgtgctgcaaagagttatatgacttcttgttcatgttttgctaatgctcgtatctccttgattacataatgttagtagcactgagacccccatggtaatgtaacttaattataagctatgtcactaccctcctgtaaaatactattggacagacacagagggacccttggctcctgtgtctggtccacacaccacagaagcttgtattatcagtgaatataaatgtactacatttgcatgccttttgggtttgccttaattcttacctcatttgcatcctatcgatctggaaagagctgttttggatgaatgcagtataaaatgtaaaaaccctgctaaatgacttattgattaagtatatctatctatatatacatatacacaaagatattatttatcgaaagtaaaaaagatggaagtgtattggtttctgtttgaattttcaaaggcttccaatgtggtggcaataaatgtcccaaataaatttataacaattgattttccccctaattcttattttataattttaaaattgcagcagttgctagcaacaacttactaaatctactcttaaatatacaactttggaatttgaagaattaatgacaacaaaagggaaaaaagcaactttccaacttttcatccaggctcccaaaagagggacaacgaacatggcatgtgaaaagtaaaacagatttgttcattccgaaaaaaaaatgttcattctatgacaataaattttatctcagtgtgacaaaaaaaaaaa

SEQ ID NO: 99510 - DNA, 1215 bp, Homo sapiens
cgtctaacattaattcagagggtatgatttttactaagatcacagaagcaggaagatgagaactccttaagaatacataaaaaggtatctctaagattagagagatggagaacagaatagtgctgccctggggttagggagcaggagagactgtggcaataaatgtacagcagattctatatcctgattgtggtggtggtcacattaatccacacaagtgatgaaactgcagagaactacacacacacacacacacacacacacaaatattgcttggactacctataaatggacttgcttcttgtgtttgaaacactcgtgtgcatgagaatgtcatttgctaatgaattttaaaagcatatataaaacaaaacaaacaacctgccacaatgtgatatgtgtaatatcatttcataaaaatccctcttcctccaaagcctgggcagaaatgtgctgcaaagagttatatgacttcttgttcatgttttgctaatgctcgtatctccttgattacataatgttagtagcactgagacccccatggtaatgtaacttaattataagctatgtcactaccctcctgtaaaatactattggacagacacagagggacccttggctcctgtgtctggtccacacaccacagaagcttgtattatcagtgaatataaatgtactacatttgcatgccttttgggtttgccttaattcttacctcatttgcatcctatcgatctggaaagagctgttttggatgaatgcagtataaaatgtaaaaaccctgctaaatgacttattgattaagtatatctatctatatatacatatacacaaagatattatttatcgaaagtaaaaaagatggaagtgtattggtttctgtttgaattttcaaaggcttccaatgtggtggcaataaatgtcccaaataaatttataacaattgattttccccctaattcttattttataattttaaaattgcagcagttgctagcaacaacttactaaatctactcttaaatatacaactttggaatttgaagaattaatgacaacaaaagggaaaaaagcaactttccaacttttcatccaggctcccaaaagagggacaacgaacatggcatgtgaaaagtaaaacagatttgttcattccgaaaaaaaaatgttcattctatgacaataaattttatctcagtgtgacaaaaaaaaaaa

SEQ ID NO: 99511 - DNA, 448 bp, Homo sapiens
gcgtggtcgcggacgaggtacgcggaggagatcatcgaggctatctacaaaatggtaggcactgtgatcatgatgaaaatgaatgaggatggcctgacgcctgagcagcgagtagacaagattttcagcaagatggataagaacaaagatgaccagattacactggatgaattcaaagaagctgcaaagagcgacccttccattgtattacttctgcagtgcgacatccagaaatgagctgatgtcaatgctatggactgcacaaaagtctcaatgttccattcagtctgcagctattcacacacacacacacacacacacacacacacacacacacacacacacacacccaagattttgatttatttggtttgaagtgtgatctgaacagcgagttcttaaaagctacccaggtcattccaatccatggctacctttgagaaccacc

SEQ ID NO: 99512 - DNA, 377 bp, Homo sapiens
gaatccacccgcggaaactccgagcccctccgactgagcatgcgccatcgccaggcggcttttggtcacaggctcccgagttctcctagctggggctgcggagctggggggagggaagagaggaaaggggagggggtgcctggagaggcggaggctcgcgcgcctgcgcatccagctccagggaccctaggttttctatgggattcccaatctgcagcagagatttacccgagcgtgttgcggcagcggctgggcttgcaaggcgcgatccaagagggatttaagcagcccagagctccagagaaaaagagagcgagagagaaccacacacagagacggcttaagcgtttacccgaattaaatatatatttttaaaa

SEQ ID NO: 99513 - DNA, 1916 bp, Homo sapiens
tacggaaatgtcagctgccggatgcacgccgtgaaagtttcttggcagggcagggaaggaatgtatacccggaagacgtgttgcggcagcggctgggcttgcaaggcgcgatccaagagggatttaagcagcccagagctccagagaaaaagagagcgagagagaaccacacacagagacggcttaagcgtttacccgaattaaatatatatttttaaaaagaactgttgagttttatcattttcgttaagtgaccgtgcgcagcgctgtaactgcaggatggggaagcagaatagcaaactggcccctgaagtgatggaggacctggtgaagagcacagagtttaatgagcatgaactcaagcagtggtacaaaggatttctcaaggactgtccaagtgggaggctaaatctcgaggaatttcagcagctctatgtgaagttctttccttatggagacgcctccaagtttgcccagcatgccttccgaaccttcgacaagaatggggacggcaccattgacttccgagagttcatctgcgctctgtccatcacctccaggggcagctttgagcagaagctgaactgggccttcaatatgtatgacctggatggtgatggcaagatcacccgagtggagatgctggagatcatcgaggctatctacaaaatggtaggcactgtgatcatgatgaaaatgaatgaggatggcctgacgcctgagcagcgagtagacaagattttcagcaagatggataagaacaaagatgaccagattacactggatgaattcaaagaagctgcaaagagcgacccttccattgtattacttctgcagtgcgacatccagaaatgagctgatgtcaatgctatggactgcacaaaagtctcaatgttccattcagtctgcagctattcacacacacacacacacacacacacacacacacacacacacacacacacaaatattgcttggactacctataaatggacttgcttcttgtgtttgaaacactcgtgtgcatgagaatgtcatttgctaatgaattttaaaagcatatataaaacaaaacaaacaacctgccacaatgtgatatgtgtaatatcatttcataaaaatccctcttcctccaaagcctgggcagaaatgtgctgcaaagagttatatgacttcttgttcatgttttgctaatgctcgtatctccttgattacataatgttagtagcactgagacccccatggtaatgtaacttaattataagctatgtcactaccctcctgtaaaatactattggacagacacagagggacccttggctcctgtgtctggtccacacaccacagaagcttgtattatcagtgaatataaatgtactacatttgcatgccttttgggtttgccttaattcttacctcatttgcatcctatcgatctggaaagagctgttttggatgaatgcagtataaaatgtaaaaaccctgctaaatgacttattgattaagtatatctatctatatatacatatacacaaagatattatttatcgaaagtaaaaaagatggaagtgtattggtttctgtttgaattttcaaaggcttccaatgtggtggcaataaatgtcccaaataaatttataacaattgattttccccctaattcttattttataattttaaaattgcagcagttgctagcaacaacttactaaatctactcttaaatatacaactttggaatttgaagaattaatgacaacaaaagggaaaaaagcaactttccaacttttcatccaggctcccaaaagagggacaacgaacatggcatgtgaaaagtaaaacagatttgttcattccgaaaaaaaaatgttcattctatgacaataaattttatctcagtgtgacaaaaaaaaaaa

SEQ ID NO: 99514 - DNA, 1862 bp, Homo sapiens
cagcggacggatgatacctagcgagtggtggaaaaaatcggcgcttgcaaggcgcgatccaagagggatttaagcagcccagagctccagagaaaaagagagcgagagagaaccacacacagagacggcttaagcgtttacccgaattaaatatatatttttaaaaagaactgttgagttttatcattttcgttaagtgaccgtgcgcagcgctgtaactgcaggatggggaagcagaatagcaaactggcccctgaagtgatggaggacctggtgaagagcacagagtttaatgagcatgaactcaagcagtggtacaaaggatttctcaaggactgtccaagtgggaggctaaatctcgaggaatttcagcagctctatgtgaagttctttccttatggagacgcctccaagtttgcccagcatgccttccgaaccttcgacaagaatggggacggcaccattgacttccgagagttcatctgcgctctgtccatcacctccaggggcagctttgagcagaagctgaactgggccttcaatatgtatgacctggatggtgatggcaagatcacccgagtggagatgctggagatcatcgaggctatctacaaaatggtaggcactgtgatcatgatgaaaatgaatgaggatggcctgacgcctgagcagcgagtagacaagattttcagcaagatggataagaacaaagatgaccagattacactggatgaattcaaagaagctgcaaagagcgacccttccattgtattacttctgcagtgcgacatccagaaatgagctgatgtcaatgctatggactgcacaaaagtctcaatgttccattcagtctgcagctattcacacacacacacacacacacacacacacacacacacacacacacacacaaatattgcttggactacctataaatggacttgcttcttgtgtttgaaacactcgtgtgcatgagaatgtcatttgctaatgaattttaaaagcatatataaaacaaaacaaacaacctgccacaatgtgatatgtgtaatatcatttcataaaaatccctcttcctccaaagcctgggcagaaatgtgctgcaaagagttatatgacttcttgttcatgttttgctaatgctcgtatctccttgattacataatgttagtagcactgagacccccatggtaatgtaacttaattataagctatgtcactaccctcctgtaaaatactattggacagacacagagggacccttggctcctgtgtctggtccacacaccacagaagcttgtattatcagtgaatataaatgtactacatttgcatgccttttgggtttgccttaattcttacctcatttgcatcctatcgatctggaaagagctgttttggatgaatgcagtataaaatgtaaaaaccctgctaaatgacttattgattaagtatatctatctatatatacatatacacaaagatattatttatcgaaagtaaaaaagatggaagtgtattggtttctgtttgaattttcaaaggcttccaatgtggtggcaataaatgtcccaaataaatttataacaattgattttccccctaattcttattttataattttaaaattgcagcagttgctagcaacaacttactaaatctactcttaaatatacaactttggaatttgaagaattaatgacaacaaaagggaaaaaagcaactttccaacttttcatccaggctcccaaaagagggacaacgaacatggcatgtgaaaagtaaaacagatttgttcattccgaaaaaaaaatgttcattctatgacaataaattttatctcagtgtgacaaaaaaaaaaa

SEQ ID NO: 99515 - DNA, 1815 bp, Homo sapiens
ctttctaaggttgtgactgggataacctggcccagagctccagagaaaaagagagcgagagagaaccacacacagagacggcttaagcgtttacccgaattaaatatatatttttaaaaagaactgttgagttttatcattttcgttaagtgaccgtgcgcagcgctgtaactgcaggatggggaagcagaatagcaaactggcccctgaagtgatggaggacctggtgaagagcacagagtttaatgagcatgaactcaagcagtggtacaaaggatttctcaaggactgtccaagtgggaggctaaatctcgaggaatttcagcagctctatgtgaagttctttccttatggagacgcctccaagtttgcccagcatgccttccgaaccttcgacaagaatggggacggcaccattgacttccgagagttcatctgcgctctgtccatcacctccaggggcagctttgagcagaagctgaactgggccttcaatatgtatgacctggatggtgatggcaagatcacccgagtggagatgctggagatcatcgaggctatctacaaaatggtaggcactgtgatcatgatgaaaatgaatgaggatggcctgacgcctgagcagcgagtagacaagattttcagcaagatggataagaacaaagatgaccagattacactggatgaattcaaagaagctgcaaagagcgacccttccattgtattacttctgcagtgcgacatccagaaatgagctgatgtcaatgctatggactgcacaaaagtctcaatgttccattcagtctgcagctattcacacacacacacacacacacacacacacacacacacacacacacacacaaatattgcttggactacctataaatggacttgcttcttgtgtttgaaacactcgtgtgcatgagaatgtcatttgctaatgaattttaaaagcatatataaaacaaaacaaacaacctgccacaatgtgatatgtgtaatatcatttcataaaaatccctcttcctccaaagcctgggcagaaatgtgctgcaaagagttatatgacttcttgttcatgttttgctaatgctcgtatctccttgattacataatgttagtagcactgagacccccatggtaatgtaacttaattataagctatgtcactaccctcctgtaaaatactattggacagacacagagggacccttggctcctgtgtctggtccacacaccacagaagcttgtattatcagtgaatataaatgtactacatttgcatgccttttgggtttgccttaattcttacctcatttgcatcctatcgatctggaaagagctgttttggatgaatgcagtataaaatgtaaaaaccctgctaaatgacttattgattaagtatatctatctatatatacatatacacaaagatattatttatcgaaagtaaaaaagatggaagtgtattggtttctgtttgaattttcaaaggcttccaatgtggtggcaataaatgtcccaaataaatttataacaattgattttccccctaattcttattttataattttaaaattgcagcagttgctagcaacaacttactaaatctactcttaaatatacaactttggaatttgaagaattaatgacaacaaaagggaaaaaagcaactttccaacttttcatccaggctcccaaaagagggacaacgaacatggcatgtgaaaagtaaaacagatttgttcattccgaaaaaaaaatgttcattctatgacaataaattttatctcagtgtgacaaaaaaaaaaa

SEQ ID NO: 99516 - DNA, 1862 bp, Homo sapiens
tacggaaatgtcagctgccggatgcacgccgtgaaagtttcttggcagggcagggaaggaatgtatacccggaagacgtgttgcggcagcggctgggcttgcaaggcgcgatccaagagggatttaagcagcccagagctccagagaaaaagagagcgagagagaaccacacacagagacggcttaagcgtttacccgaattaaatatatatttttaaaagcaggatggggaagcagaatagcaaactggcccctgaagtgatggaggacctggtgaagagcacagagtttaatgagcatgaactcaagcagtggtacaaaggatttctcaaggactgtccaagtgggaggctaaatctcgaggaatttcagcagctctatgtgaagttctttccttatggagacgcctccaagtttgcccagcatgccttccgaaccttcgacaagaatggggacggcaccattgacttccgagagttcatctgcgctctgtccatcacctccaggggcagctttgagcagaagctgaactgggccttcaatatgtatgacctggatggtgatggcaagatcacccgagtggagatgctggagatcatcgaggctatctacaaaatggtaggcactgtgatcatgatgaaaatgaatgaggatggcctgacgcctgagcagcgagtagacaagattttcagcaagatggataagaacaaagatgaccagattacactggatgaattcaaagaagctgcaaagagcgacccttccattgtattacttctgcagtgcgacatccagaaatgagctgatgtcaatgctatggactgcacaaaagtctcaatgttccattcagtctgcagctattcacacacacacacacacacacacacacacacacacacacacacacacacaaatattgcttggactacctataaatggacttgcttcttgtgtttgaaacactcgtgtgcatgagaatgtcatttgctaatgaattttaaaagcatatataaaacaaaacaaacaacctgccacaatgtgatatgtgtaatatcatttcataaaaatccctcttcctccaaagcctgggcagaaatgtgctgcaaagagttatatgacttcttgttcatgttttgctaatgctcgtatctccttgattacataatgttagtagcactgagacccccatggtaatgtaacttaattataagctatgtcactaccctcctgtaaaatactattggacagacacagagggacccttggctcctgtgtctggtccacacaccacagaagcttgtattatcagtgaatataaatgtactacatttgcatgccttttgggtttgccttaattcttacctcatttgcatcctatcgatctggaaagagctgttttggatgaatgcagtataaaatgtaaaaaccctgctaaatgacttattgattaagtatatctatctatatatacatatacacaaagatattatttatcgaaagtaaaaaagatggaagtgtattggtttctgtttgaattttcaaaggcttccaatgtggtggcaataaatgtcccaaataaatttataacaattgattttccccctaattcttattttataattttaaaattgcagcagttgctagcaacaacttactaaatctactcttaaatatacaactttggaatttgaagaattaatgacaacaaaagggaaaaaagcaactttccaacttttcatccaggctcccaaaagagggacaacgaacatggcatgtgaaaagtaaaacagatttgttcattccgaaaaaaaaatgttcattctatgacaataaattttatctcagtgtgacaaaaaaaaaaa

SEQ ID NO: 99517 - DNA, 1694 bp, Homo sapiens
agcggaagagaccgtgcgcagcgctgtaactgacttactggattatttccaggcaggatggggaagcagaatagcaaactggcccctgaagtgatggaggacctggtgaagagcacagagtttaatgagcatgaactcaagcagtggtacaaaggatttctcaaggactgtccaagtgggaggctaaatctcgaggaatttcagcagctctatgtgaagttctttccttatggagacgcctccaagtttgcccagcatgccttccgaaccttcgacaagaatggggacggcaccattgacttccgagagttcatctgcgctctgtccatcacctccaggggcagctttgagcagaagctgaactgggccttcaatatgtatgacctggatggtgatggcaagatcacccgagtggagatgctggagatcatcgaggctatctacaaaatggtaggcactgtgatcatgatgaaaatgaatgaggatggcctgacgcctgagcagcgagtagacaagattttcagcaagatggataagaacaaagatgaccagattacactggatgaattcaaagaagctgcaaagagcgacccttccattgtattacttctgcagtgcgacatccagaaatgagctgatgtcaatgctatggactgcacaaaagtctcaatgttccattcagtctgcagctattcacacacacacacacacacacacacacacacacacacacacacacacacaaatattgcttggactacctataaatggacttgcttcttgtgtttgaaacactcgtgtgcatgagaatgtcatttgctaatgaattttaaaagcatatataaaacaaaacaaacaacctgccacaatgtgatatgtgtaatatcatttcataaaaatccctcttcctccaaagcctgggcagaaatgtgctgcaaagagttatatgacttcttgttcatgttttgctaatgctcgtatctccttgattacataatgttagtagcactgagacccccatggtaatgtaacttaattataagctatgtcactaccctcctgtaaaatactattggacagacacagagggacccttggctcctgtgtctggtccacacaccacagaagcttgtattatcagtgaatataaatgtactacatttgcatgccttttgggtttgccttaattcttacctcatttgcatcctatcgatctggaaagagctgttttggatgaatgcagtataaaatgtaaaaaccctgctaaatgacttattgattaagtatatctatctatatatacatatacacaaagatattatttatcgaaagtaaaaaagatggaagtgtattggtttctgtttgaattttcaaaggcttccaatgtggtggcaataaatgtcccaaataaatttataacaattgattttccccctaattcttattttataattttaaaattgcagcagttgctagcaacaacttactaaatctactcttaaatatacaactttggaatttgaagaattaatgacaacaaaagggaaaaaagcaactttccaacttttcatccaggctcccaaaagagggacaacgaacatggcatgtgaaaagtaaaacagatttgttcattccgaaaaaaaaatgttcattctatgacaataaattttatctcagtgtgacaaaaaaaaaaa

SEQ ID NO: 99518 - DNA, 107 bp, Homo sapiens
actgagctatgaaaccgtgacaagtgcatggagcagctatttgagcaccaggaaaggaaacgatacgcagcagtttgggatgaccccagcagatgaaatacaacaga

SEQ ID NO: 99519 - DNA, 485 bp, Homo sapiens
actagggttttgaagaatgagcagaagctctgcgtcagatgaagaagagacaggaggccctccaagcaaaggaaccactcatgtcaagacatggggcaaaaagagaggatgtatttggagaacagagagtaaccgaaggctatcattcaatcagtgatagtcttcatggaggttaatatcaaaggcaacctgaatttcctcagacttcatgagctggcggtgaagggtgagatcacacaagcagtaataacccagctctccctggctcactgccttacttactggccttctggtactcagcaaagctgtccccatgagtttgggagtctccattcctgtccttccactcccctcaaacgtctttcattcaaggtcacgtggtaacttgactcctctcaccactacttctgtgggaatgcagaggccaggccagagcctgtgggtgctgccctccccagagacttcactatgcccagctccaggga

SEQ ID NO: 99520 - DNA, 666 bp, Homo sapiens
ggcaaaaacttgtaagaacagagagggttgactgttttaagctctgcgtaaaagtcttcatgtcgttccctgttaacatctggtggagaaaaagggagggaagaactgcatatttattgctgtgtttacaatgatacaacaaagacattcagttatagtgctctaagataaaaaaaaaaagcttgaactgcaatttataataatccttccttaatctatttatggttttaaaatagccagaagtctatgagagcagcctggccaacctggtgaaaccccatttttgctaaaaatacaaaaattagcaggctgtggtggtgcacacctgtaatcctagcaacttgggaggctgaggcaggagaatcgcttgaactcgggagtcagaggttgcagtgagccgagatctgtgccactgcgctccagcctgggtgacagagattctgtctccaaaaaaaaaaggtagtagtaacaaggattctggaaccatcaggttccttttaaaacatgtgactgttacccataagaaagttaaaactagcttaacaggtcgattgccaagataaatataaccataaataaacagagagcaatgtgtaattttgttcccaagtacttggtgttactcagaaaagagcctgtgagaggagcaagagagagttcaattgc

SEQ ID NO: 99521 - DNA, 319 bp, Homo sapiens
cttgctccctctgtactttgcctctgccaggagtccgcccagccctggcaggctggaagctcctaaagagcagggcctgggtttactcttcttttgttccttgatggccatatgctaaatgcctgctagctgatttcagctgacctgcctcttccacccaggatcttagcgagctgctcttggtcctggctggctgatgcaaagacacagcctcttccagcttcacttggcatacagcaaatgctatgcaagtgttagctatttattggtttagtgaacttgtgggctctaacacacagctgtgatatcactcctccgc

SEQ ID NO: 99522 - DNA, 505 bp, Homo sapiens
caatgcaaagctaacgtagaggttttctaacggtggataatgctctgaatagcatgtgacacaggcaaagaagtgaggatccttagctcattttcattttggacaagtcccaaaatgaaaatgttcacgactttcctggaagtcgtgggctttcaagaggccagccctactcctccttatccccacagtatagcacagactctcctcagaggtggcagcaggttctatggccagagagcagctaggagcaactgtcagtggggagggaaaggctctggataaagcagagttcaaagtgcactatcagagccagggtcctcaggcctctgcagtcttccctcctgcaaatgacagctgagaccaaagcatccgagcctggggtctgggctgaatttagcagtcataattacactgttaacgtctggggcacagccacagtctccgtagaaggcggcagcttttgttcatgcactaaaaacacatcatcttcaaacatgctaatcct

SEQ ID NO: 99523 - DNA, 726 bp, Homo sapiens
agattcctccgtaacaaccttagccacccctgcctgtgttagtccgtgactgtggagaacgcttggaaaagttgaaagaaaaagtgagaaactcaaataatggaggagtcattttatcggatgttgcctctctaccacaatcttactatgattatttaagtatcagagcctactttttcttttttctcttttcctcttttctttttttaatatattgcccagagtttaaatcagcagactgaatgggctgtaggggacctatatcaccataacagcactggaactcttcaaagttattcaaaagtaccaagactgtattcacaacttaatttagatgccttccacatcatttcttcaaatgcaactatgatgaaatttatgtgcacagttgggggatgtggataaaaatagtgttaattttctgattatctctagaactttctattatttaattgtaactttttgactatccttatgtttcatgatgactcggaaacaagagatctttttatccagttgtttcttccttttaacctggtttctctaccatcttggagtctcagtaattttctctatgttgtaattccgagttcttcataagcaatttctttgatattattttgtgtcatctctgagtggaagtctattttcttcctagaatatgagcaacttggatcctccttcttgaattcagttcagaaaataaatctactgtgttacatccta

SEQ ID NO: 99524 - DNA, 142 bp, Homo sapiens
cagaaatgaactcaaaatggatcaaagacctaaaggtgagagctaaaactataataaaactcttaggagaaaacataagggaagaacttcatgaaattggatttggcaatgatttcttggatacaacaccaagcataggcaa

SEQ ID NO: 99525 - DNA, 159 bp, Homo sapiens
cctgggagatggagactgcagtgagctgagatcacgccactgtactctagcctgggtaacagagcgagactccatgtaaaaataaaaaataaaataaaaagtcactttgagagcttttcataattgcgcctttttattttctttgaatgaacgcatatc

SEQ ID NO: 99526 - DNA, 326 bp, Homo sapiens
  misc_feature (13)..(13): n is a, c, g, or t
  misc_feature (18)..(18): n is a, c, g, or t
  misc_feature (21)..(21): n is a, c, g, or t
  misc_feature (43)..(43): n is a, c, g, or t
  misc_feature (71)..(71): n is a, c, g, or t
  misc_feature (73)..(73): n is a, c, g, or t
atggtttcttgancaatnttnacaggaacttggcatgttttanatatgggaaataacaaagtggccaaggnangcctcagtaaacacgcagggagagcacaccacacacctacacacgcatacactcatatacacataacaggcacatatgcacatgacatacacatgcacacatatacatatatcatgcacagagatagatacatacacacatgcatcctcatgcacacacactgcacacacatacatgtatagagacacacatcacacacccacacatgcatacactcatatacacatacaggcacatttacacatggcacaca

SEQ ID NO: 99527 - DNA, 245 bp, Homo sapiens
tgtgttttttttttttttgagacagattctcactgctgcccagggtggagtgcagtggtgtgatctcagctcactgcaacctttacctcccacctggaaggtagatgttagcgtagggtggtgaaaggcttgtgcactcatcttaatcttaaatatataccttggccaggcaaggaggctcacggctgtaatcccagcacttttggaggctgaggctggcagatcgcctaaggccaggagtttga

SEQ ID NO: 99528 - DNA, 672 bp, Homo sapiens
ggcggggacctcggagggagcccggcggcttcggccacctgtccccgcagatgctgcaggtgacatgagctctccagatgggcccagcttcccgtccgggccgctctcagggggcgcctctcccagcggcgacgagggcttcttcccctttgtgctggagcggcgggactcattcctgggagggggtccagggcctgaggagcccgaggacctagccttgcagctggagcagaaggagaaagacctgctgttggccgcggagctcggcaagatgcttctggagcgaaatgaagagctgcggcggcagctggagacgctgagcgcccagcacttggagcgtgaggaacggctccagcaggagaaccatgagctccggcgaggcctggcagcccgaggagccgagtgggaggcccgggccgtggagctggagggggacgtggaggccctgcgggcccagcttggggagcagcgctcagagcagcaggacagtgggcgagaacgggcacgggccctcagcgagctcagcgagcagaacctccggctcagccagcagctggctcaggcctcccagactgagcaggaacttcagagggaactggacgcccttcggggacagtgccaggctcaggcactggctggagcagagctgaggacgcggctggagagtctgca

SEQ ID NO: 99529 - DNA, 483 bp, Homo sapiens
  misc_feature (477)..(479): n is a, c, g, or t
  misc_feature (481)..(483): n is a, c, g, or t
gagaagagagggaagtctcatacctaacttttattcacaagtaatgatactgatattaaaattttaaaccaattttttatttcttaaggagtgtttagcattcattcttcttggggttatatagttatcagtaattggtttgtttgatttttgcatactttatataaatcctctaagattaggtttatatattgtaaattttggttgatcaacgtcatgtttgataattaaactgatttaaatatattttagtaaactagctttgctgttgatcttaaatatatagttaatatctcttccttctccttgaagaattccaccaaactttatatatttacatatttatataatgtgtaatacatggaagaaaaaaacaactttaagagcacatattttacttaccatctgttatctggaagtataattgattgtcaatgaatgtcatttcagacccataaatgtgttcatttctcaaannnannn

SEQ ID NO: 99530 - DNA, 378 bp, Homo sapiens
attctcccactggggtaacatctgagctacaccttgaaggatggtaaggcttgtctatgcagaaacagaacaagagaattccaggaaaacataaaggaagcacacatctacaagattattaatggggtgggcacaagaaacagcccagctgagccactgaaggggaagtagtgataaatcaggttggcaaagcagacctaaaccagcttgtgaaggagtctgcatgtctggccaaagcatttaagcctgtgattctcaagctggggtaagacacactttccccttagtggctttatcagcaccacctagtcttaaaaacgaattcatggatacatgtatatgtatgtctcacacattcacacacacatgcacaagtac

SEQ ID NO: 99531 - DNA, 698 bp, Homo sapiens
cttttaaaagtggtaggaaatatgcaaaaatgttgcttctgactatgggcattaatactgaccttttttctgtttctttattgtccaaatttgctatgaaaacacataattcaaaataactcaaagataaaaaagcatatataacataagatacagtaagagaatataatctgatatagccctctgaatctgttaattaagaggatacatatttacattcattctgtgcattgaaaaaaaaatacaagctttaaaatattttcaggaggaagctaaaaaacatcctgagtttaagacaccttacacaagagttgatactgtgatttcatcagtatattgttgtagaacaggcaaaactgatctgtacttaaaaagcattagagccttggttattcccggaaatgggacagggattgattaggaagaagcatgcatgtcctttttggggtgagtggtaatgttctttatcttgctcgttctaacagtttgagttacagaggtgtatatattgtcaaaactcagtgaatatactttaaaatttctgcatgtgtatgtaagttttacatcaaaagaaaatatactgttaaccaaaaaagaaatgtttggggaacatcttgtttcgtgaaaatgtacaaagtctctcgctggttttgtctccacatcccatggtcttagataagtgttccagactgagatag

SEQ ID NO: 99532 - DNA, 789 bp, Homo sapiens
atggtggcgcatcacatgcctgtaatcccagctacttgggaagctgaggtatgagaatcacttgaacccaggaggcggaggttgcagtgagccaagatcgtgccactgcactccagcctgggcgacacagcgagactctctttccaaataaaaataaaataaaaataaaataaggtggcagtaccagccaccttatgctgggcgaatcacttaaattcttggagtctttgtttccacatctaggaattggtgccagtagtccttgaccacctcacaggcttgctttcaaggtctcatcaaatgagataatttatgtgaaagcactttggtgtcatagaaatgtgaggtattatcttgaatgttaatgaatcgcttacagcttacaaacacaaatgaatcattccttttgacttaacaggcacctaagtaacttcaaaaatccagagcttcagccagacagctttggtgaagagtgatactgaggggacttggagatactgagaggacttagagaccagctgctagatccacccagagctggtcaggcccttggtgaagaacaactatcttcaagtgaaaccaggcttggaaaaaataacttaaaataaataaaaaaaaataggccgggtgcggtgactcatgcctgtaatcctagcacttttggaggccaaggtgggaggatcccttgagcccaggagtttgagatcagcctggacaatgtagggagaccctgcctctaaaaaaccataataaataaataaacaaataaataatgtggtaatatattga

SEQ ID NO: 99533 - DNA, 590 bp, Homo sapiens
agtggcaattggctggggtccacttccccactgtgagaggttttttcttttgctctctgcgatgaatcttactgctgcttactgtatgggtctgcacccgcctttatgagctgtgagactcaccactaaggtctgcagcttcactcctgaagccaaggagaccactaacccaccgggaggaacgaacaactctggacgggccgcctttatgagctgtaacactcaccgcgaaggtttgcagcttcactcttgaagtcagcgagaccaggaacccaccagaaggaagaaactctgcacacgtccgaacatcaaaaggaacaaactctggacacaccatctttaagaactgcaacactcaccacgagggtccgcggcttcattcttaaagtcagtgagactaagaacccaccaattcttggacataaaaccagtaattcttatcagcacaggcacaagctattttatttatctttgtattaatcatttattcaacaaataataactgaatgcttacaaagtattagcctggaattgtcaaaagaggatgataacatcccctttccccagaggagtgtttgaaaatgtatggg

SEQ ID NO: 99534 - DNA, 2145 bp, Homo sapiens
  misc_feature (2)..(2): n is a, c, g, or t
  misc_feature (4)..(4): n is a, c, g, or t
  misc_feature (6)..(6): n is a, c, g, or t
  misc_feature (8)..(8): n is a, c, g, or t
gncncnangaatgtttttcaaaaagggacattaaggcgattggagttatacttggaaaagaaagttctggccacagtacagagcatggcccgttgagctgttgggggggttattgctgcaaccaaggcttgagtgagggaagaggcggatgtagtgataaagagactccaggaactgaatcagcgtacctggcaccccatccattgtagagggtgagaataaaggagaaattaaagcatcttgcaggctgggcgcggtagctcatgtctgtaatcccagcactttgggaggccgaggtgggtgtatcagttgaggtcaggagttggagaccagtcagccagttagtagaaaccctgactctactaagaaaatacaaaaattagctgggcatggtggcatgcgcctgtagtctcagctacctgggaggctgaggaaggaggatcgcttgagcccaggaggtggaggctgcagtgagccaagattgtaccactgcactccagcctgggtgacagagcaagactcttatctcaaaaaaaataaaataaaataaaataaaataaaacatcttgcccctagctgagagagaggtctctgaagagcaggctcagggaaaagatgagttttcagagctgatgtgatagtcagcttctctggagtcaacagggtgaatccttcccaagtccagccatgcccagatgcccggagggaaaactgacccccagccagtagacattggctaagaacacagaatcttctgaccaaacacgctttcagcagctgcctgctctggactttgaaagaggtcaggtcttgccctaagctcaaaacaagtgagaggtgtcctgacctagctcatagggcaaatggtcctaataggatgggcaatccagatgcctgagccccttcactccgacagcaccagcgcctaatgcagccttttcattcttgccattaggaaatctgtggacttctagcctgtgttttaaaccagccatgtttccttgtatatttccctacccgctgccccacatacccagcatgccgctgtggccaccatgtcctcaaagccttctgtctgtatcaggaatgtagtctgagactgccaggaagcaacaaggagagagaaacactaactagtcttcctttataacccattcatactctctggctgtccccaaccttcatagtctcctgcatccaaatgtcctctttggctcaaaaagtaggccaggcatggtggttcatgcctgtaatagcactttgggagactgaggtgggaggatcacttggggccaggagtttgagaccagcttgggcaacacagcgcaatctcgtctctactaaaaaaaaaaaaaaaaaaattagctgggcatgatggcatgctcctggtggtcccagctacttgggaggctgaggcaggaggatcacttggtcccaggagtttgaggcgacagtgagctaggatcgcaccactgcactccagcctgagtgacagagcaagaccctgtctctaaaaaaaattaaaatgaaagaccaggtgctgggattaaggaaacacaggtctgagggtctgagggaaggggcctgcctcccagggagtcaacatagatgttccccatgaacagggatttgactttggaggccaacctggcctggcctctgccctttatctcacactccctatccttggcccactgccagtccctgccttgtggcaaaggggccccaaaagaaaagctgcccttccccaaatgtaaggacccaggtacactttcacccgtggaaagcagtgtctgtcgagagtctgtttcctattaatacttatcaaagccatgtgcgagggaggtggtcagctgtcaatatgccttagtatgtttatatgagtttgttttgttctaaaatacccaaacagttctggtcaagcggggctatgcccgtctggcccaaaacacagtccgttattaacgagatggccctggcaggcgggaacaaatctgcctccatgcactgcttcctgtagtcttttagaaagtaactccaggacatcgaagtgcccagatttgactcctaagttctaggagactgtagcgcagggtctgtcaaccttagcactattggcatttggggctgggtaattctttcttg

SEQ ID NO: 99535 - DNA, 1202 bp, Homo sapiens
  misc_feature (2)..(2): n is a, c, g, or t
  misc_feature (4)..(4): n is a, c, g, or t
  misc_feature (6)..(6): n is a, c, g, or t
  misc_feature (8)..(8): n is a, c, g, or t
gncncnangaatgtttttcaaaaagggacattaaggcgattggagttatacttggaaaagaaagttctggccacagtacagagcatggcccgttgagctgttgggggggttattgctgcaaccaaggcttgagtgagggaagaggcggatgtagtgataaagagactccaggaactgaatcagcgtacctggcaccccatccattgtagagggtgagaataaaggagaaattaaagcatcttgcaggctgggcgcggtagctcatgtctgtaatcccagcactttgggaggccgaggtgggtgtatcagttgaggtcaggagttggagaccagtcagccagttagtagaaaccctgactctactaagaaaatacaaaaattagctgggcatggtggcatgcgcctgtagtctcagctacctgggaggctgaggaaggaggatcgcttgagcccaggaggtggaggctgcagtgagccaagattgtaccactgcactccagcctgggtgacagagcaagactcttatctcaaaaaaaataaaataaaataaaataaaataaaacatcttgcccctagctgagagagaggtctctgaagagcaggctcagggaaaagatgagttttcagagctgatgtgatagtcagcttctctggagtcaacagggtgaatccttcccaagtccagccatgcccagatgcccggagggaaaactgacccccagccagtagacattggctaagaacacagaatcttctgaccaaacacgctttcagcagctgcctgctctggactttgaaagaggtcaggtcttgccctaagctcaaaacaagtgagaggtgtcctgacctagctcatagggcaaatggtcctaataggatgggcaatccagatgcctgagccccttcactccgacagcaccagcgcctaatgcagccttttcattcttgccattaggaaatctgtggacttctagcctgtgttttaaaccagccatgtttccttgtatatttccctacccgctgccccacatacccagcatgccgctgtggccaccatgtcctcaaagccttctgtctgtatcaggaatgtagtctgagactgccaggaagcaacaaggagagagaaacactaactagtcttcctttataacccattcatacaatggatggggtgccaggtacgctgattcagttcctggagg

SEQ ID NO: 99536 - DNA, 908 bp, Homo sapiens
agagagagagagagagagagagagagagagagagagagagagagatcacttggggccaggagtttgagaccagcttgggcaacacagcgcaatctcgtctctactaaaaaaaaaaaaaaaaaaattagctgggcatgatggcatgctcctggtggtcccagctacttgggaggctgaggcaggaggatcacttggtcccaggagtttgaggcgacagtgagctaggatcgcaccactgcactccagcctgagtgacagagcaagaccctgtctctaaaaaaaattaaaatgaaagaccaggtgctgggattaaggaaacacaggtctgagggtctgagggaaggggcctgcctcccagggagtcaacatagatgttccccatgaacagggatttgactttggaggccaacctggcctggcctctgccctttatctcacactccctatccttggcccactgccagtccctgccttgtggcaaaggggccccaaaagaaaagctgcccttccccaaatgtaaggacccaggtacactttcacccgtggaaagcagtgtctgtcgagagtctgtttcctattaatacttatcaaagccatgtgcgagggaggtggtcagctgtcaatatgccttagtatgtttatatgagtttgttttgttctaaaatacccaaacagttctggtcaagcggggctatgcccgtctggcccaaaacacagtccgttattaacgagatggccctggcaggcgggaacaaatctgcctccatgcactgcttcctgtagtcttttagaaagtaactccaggacatcgaagtgcccagatttgactcctaagttctaggagactgtagcgcagggtctgtcaaccttagcactattggcatttggggctgggtaattctttcttg

SEQ ID NO: 99537 - DNA, 446 bp, Homo sapiens
gcagtggctgggcgtctcacctgaccctggctgagctcctgctgatcttggagaaggaagggtggggccagactctggatggcttggagcccccgaccagggtccacactgggaagaaagcaaagggaagttaaccactcaaggttctcacgctgttttctcaagtaagaaagtaaactccctaaaccacaagaccagcacaaactaggaaggaccccacggcccaccaccatgcggcaccatacctaagtgttcctgaagttcacagaagggatgtggtagagaggggaaggacgttaccaggttttaaaacatattttaaagtttaaaatttttttgcgttagtaatagtgataataattgtacatgctgtgggttcacctattttaagtgtataagtcaatggtttgtaaaaaaaaatacataattatgcaactgctactaca

SEQ ID NO: 99538 - DNA, 153 bp, Homo sapiens
taagaggggtgagagcctcatcatgatggggagtcttattctgacatcttgggaaaaactgtccacgtgtgaagtcatcaacttgttttccttgtttacagtttgagcagctgttgttatggtgttgaacattttggtgagttctgagtggct

SEQ ID NO: 99539 - DNA, 347 bp, Homo sapiens
tgctgagattacaggcatgagccagagcacctggcctgagctactcttcatatgttcattggacatacgagtcctgccttctgcgaactgcttttgcatatccactgtccattttttattgtgttgttagtgatttggggctatttttttgtattctggatattaatcttctaatagttacatgcattgtcattatctttcagtagattgtctttaaattttgtgtatgatgtcttttgttgaacaaaagcatactgttttaatctagtcaaaatttgtctctcttttcctgtttaggcttgtggttttagggcctgtttaacaaagtcttctatgccccaagatca

SEQ ID NO: 99540 - DNA, 228 bp, Homo sapiens
actgtcaggtcatatgctgaaggcttgagaaattgcgtggtaagagatattgtaaatcgtatgattgggagatcaaagtctttcagttggggcaggaagcaggcctggttttatttttaaaggcacatcagtggtatccctccccagaggaggagaggatcttgtcttagaggctgcagccaagtgctgaaacagcttcctcctttgcctggaactgcagagctgtca

SEQ ID NO: 99541 - DNA, 231 bp, Homo sapiens
gtcttgaactcttgacctcaagtgatccacctgcctctgcctcccaacatgctgggattacaggcatgagccaccacatctggccagttattcataaaaaaatgaaatatacctcaaattaatgaacatataaatgagtataaatgtttatacatttattaatttgaggtatatttgaaaagcaaggatcaatggagagaaggtctcatttttgttgtcatctcttctgct

SEQ ID NO: 99542 - DNA, 111 bp, Homo sapiens
ttaagcgctctgggcctcaaaatctctctgcatcataatgattaaatgaaatcacagatataaagcacagtacctggcacccatcacatacatattcagtaaacagttatt

SEQ ID NO: 99543 - DNA, 268 bp, Homo sapiens
caaacacaatcatcttggtgcatactacctattaaatgaaggggagcaaaggcatcaggtcttcttcttgctaacctttgtgcttcctctatatgttcttacatttgaaaagtcttcctgacttctctggcatacactttctatgtgatgtcatgtggtataagacatgatctttcctacttgccatggcatgacatcatgtgatatgatgcgactttgtagccctcttcccctctccacgtcttgctattgtctagttggactaagc

SEQ ID NO: 99544 - DNA, 679 bp, Homo sapiens
ctccaaccgcaagcaggcagcggtgcgggtgacggccgtactgcaaactcggtgcggcgaaggtttagttcaatcacccggttctagaagccgcgtcgctgagccgcagcgcgtcgcgcccgggcagcgggtgaacgcaaaccccgccctccaggaggctccgcccctgcgccggcggttgctaggcggcaagaaagcgccggctctgtgtggacggtacgcggaggcgcgaggagggaggcgcctggcgttgccgcggcgctgggaaactgtctttgcagcggcgactgggcgcccagcggcgtgtactgggatttctgtgagcagaggctgccgagagggggcgcttggagggccaccggcggcttcgaaagcttcgcagccggaagccgccggttggcggcctggatttaccttacgaaaggttttaaccaaggacttgaggtttctcaggttttaaatttaaactaatatgctgtgtcctttaatcggaaaaggctctgaccttattttttcccgttaagaaacaagcgattacttcattggagggaaaatgaatcgttcctcaaatgtaccacgtaaaggtattctgaaatcaggtacaagatccttacaaaaagttcgcagagtacatttcgcaaatgcacgaaatgcaagatcattactatcgtaagtacct

SEQ ID NO: 99545 - DNA, 569 bp, Homo sapiens
gttaatactggaggtgctcagtgaatggtgtctataactggcgtcatgcctgttgggcctaaggagaaaattgtactgaatgatcgctggtgcccgagcctgccgaagcagaaacggcagtgagcctaccagggttgcacctttgctcttggcctaggcctttgccttaaggagtctgagctacagggaccgtgtgtgcagcagccctcttctcctggtgctctgctcacagggagacagtgctgcttctgcccacaacccactcactccccttagcatagagaagtggcagtgacaagtggggtactactcaacctccgcacttgcaaccccactagcctggcttccacaacctcttcccccacccctcatcactgcggcgatgccccaggaacctctctgactcccttctccctcacaccctgtgtgcagccatctgcctactcctaactcttttgtctttaatatgctcatccccactgcaccccagccgcgactgtccctgcccctggcctgggctgtggcacctgcttcctcactgatctctcctccaccaagccaactcctcc

SEQ ID NO: 99546 - DNA, 834 bp, Homo sapiens
agagaatgtgtggagatcaggtgatgcagaactctggtaaaggatgttagtcttcagagtaagactgttaaattcagcaaagtctactatcagaagacacgtttttctggttggtgtattactttattcagtgataatatgaaaattactatcttcactgaaggatctactgaataatcattttaactcaactatattgcattcttgaaagcaatcctttcaattgatctactgacttcacaatgtctgaaatcagattcaccaatctcacttgggatcaagttataacactggatcaagtgttagatgaagtaattccaattcatggaaaggggaatttccccacaatggaggtaaaaccaaaagacatcattcatgttgtgaacagatcaactcatagggcaaggaattattgttaaagatgccagattgaatggttccgtagcaagttacatacttgcaagccacaatggaatcagctataaggatctggacgttatttttcggtgttgagcttccaggtaacgaagaatttcaggttgttaaagatgcagttctagactgtctacttgactttttaccaaaagatgtaaagaaggaaaagctctccccagatatcatgaaagacgcttacgtacagaaattggtcaaggtttgcaatgggcatgattgtcggagtcttatctccctttcaaataacactgggaagaatttagaactaaaatttgtgagttcactcagacggcagtttgaatttagtgtagattcctttcaaattgttttggatcccatgttagacttctacagtgacaaaaatgccaagctaaccaaaga

SEQ ID NO: 99547 - DNA, 437 bp, Homo sapiens
ggtggttcctctctgtctaggtattgaggctctccaatacccccgagcctataccactgccccaggtctatttctggatcaactgcttgccttgctctggtaccaggtcaatgccaggttaggagtttacccaaattcgttagcctcctaatttgtttccgtactgaaaacaaagggaataagacagccatggtggtaaacacaaggcaaaatagaaaagcagatcagacaaagggtcccttttgtgaaatgacttctcaatatgggctttcccaaacctgtgtaggctcacacaatagaaggtaatttctaaaagggctctgttgcacacttaaggacaaggtcactaaaggactttgatttataaattattgccaaatataaagtcaatatataatcttctgcaggagaaccttgagaatccttgaaactgtcag

SEQ ID NO: 99548 - DNA, 607 bp, Homo sapiens
ttgggttaggcactgtggatatgaagatgaaaaaaatcaggtcccaaccacaggggctaaacaaacacataaatgggtctgaagggtttgtggcttagaggtgtgggtgtcagtccaggtactgctgcttttagttatatgaccttaggaatgttacctaccttctaatttactttctgaaagccactgtttccttcctttaaaatagggttatcttgttgtttagtaattaacttaaacttttgtgtgtatttgacaaagtctcaccctgtcacctgggctggagtgcagtggtgcaaccatagctcactgaagccttgacctcccaggctcaactcaagccatcctcccaagtagctggactacacatgcacacccacatccagctaattttttttttcttttttttttttctttttttttccggtagagacagggtctcgctatgttgccagggctagtctcagactcccgggcttaaacaattctgcctcagcctccccaagtgctggaattacagacatgagccactgcacctggcaagaaatcttaatagttgttttttgtttgttttggtttaatttaaaagactctctaattcttctat

SEQ ID NO: 99549 - DNA, 424 bp, Homo sapiens
tacaaggagttaatgtattttggagacagtgtatacacatagcaaataacacccttcttcaaattattagagaaaacagcacaatgggggatgatttctaacatccttttgcaaccagcagtactctcttggtttaagtggagagaaactgataatgaattccagaggccatgattttaataaaacaaaaacaaaacagaatttttttaaaaagcagattaatgccagaaagagattacaggctttggctatataacatgcttggtagaatatgtaaaatacttaaaatctttgcaaggtgttaagtccatgttccttttttttcaagattggcaagctttttatttattaagttggtatctgtcagtgtatcattcatatcccttcttcttcttgcctctgcaatgacgttggcacaaacctg

SEQ ID NO: 99550 - DNA, 669 bp, Homo sapiens
ctccgggtctttctccccgcgcggcccctctcccgagttcttctccttccggactccgggtctttcttcccgtgcggcccctctcccgagctcttctcgctccggactctgggtctttctccccacgcggcccctctcccgagttctccctccagactccgggtctttccccgcacggcccctcccccgagttcttctccatcccgactccagttctttctccccgcgcggcccctctcccgagttcttctccttccggactccaggtctttctccccgcgcggcccctctcccgagttcttctccttccggactccgggtctttctcccctcgcggcccctctcccgagctcttcttgctccggactccgggtctttctccccgcgcggcccctctcccgagctcttcttgctccggactccgggtctttctccccgcgcggcccctctcccgagttcttctccttccggactccgggtctttctccccgcgcggcccctctcccgagttgttctccttccggactccgggtctttctccccgcgcggcccctctcccgagttgttctcgctccggactccgggtctttctccccgcgcggcccctctcccgagttcttctccttccggactccgggtctttctccccacggcctctctcccgagttc

SEQ ID NO: 99551 - DNA, 633 bp, Homo sapiens
gaataatttttgacacagagtgagttatcttatttgttgactgaattaagtgactagcatcatttaacttaaagaaataaaccctgtatagtgactgggacatgagcatcaaaaaatacaatgtgtaatacggtagcttctttaagaagatggcacagtgtattagtccactaaggctgtcctaacaaaataccataggctgagtagctgaaacaacaaaaattaattttcttatagttcgggaggcaggaagtccaaaatcaaggtgctggaaaatcatagtgcttggtgtctggagaggcctttctttttggctggcagatgcaaccttctccctctgtcctcacatggcctttcttctgtggggtcaaagcggtgggatgcggaagctctggttagagctcctcttcttcttataaggacactaatcctgtcagattaggatcccactcttatgacctcatttaaccttaattatctctgtacaagccctatctccaaacacagtcacatttggggttagggcttcaacgtatacattttaagagggcacgagtataacatacagatttgtttgttttcttcctaggaaatgtgtaaaccagtgtgagtcaaatctatatatagcacttt

SEQ ID NO: 99552 - DNA, 515 bp, Homo sapiens
atgagttgcaactggacagaggaacacagggagccactggcctgtcctcaatgttgtactttttgatccatgtggagattatgtgaaggtttgtcttataattattaaaccatatatgcaatgctttcaaaattccgaaagtatattatttttgacctagagttccatacccatcaaaattacaattcaaatgttagtgtaaaataaagacagtttcaaacatgcaaagcctcagaaaatgtatcacgtatattttctcagaaaactatttgaggagaccctccataaaaactaatatgtaatcatagaaacaggaagaaacagaacctaacacagatatgaagtaaaggaaatcacaagcacaattagtaaatatctcaattcggaagccccagggtcacgactacgtcccaggtagagggcatgttgaaggccatcatcactggatgttctgttctactgtacaaccttttcaaccccagaaaagtactggaaaatgtgctccaaaaaaaaaa

SEQ ID NO: 99553 - DNA, 200 bp, Homo sapiens
cttttttaatgtcagtaatttgagactaatattttcctaaaagttcttacgtttgtcatttttttgcctggttattctgattttacagaaactaagcgtgtactccatttttaaaaagattttgaatactgtttagtggatataggaatttatttcataaagcctctagtttcttaaatgtattataattttatttattt

SEQ ID NO: 99554 - DNA, 368 bp, Homo sapiens
aataggagtggtgagggtgggcattcctgtcttgttctcattctaagggggaatgttttctgctttttcccattccgtatgatgggaagtatgaggttggctgtgggtttcttatagatggctcttattattttgagatatgttcctttgatgcctacttttttgagggtttttaacataaacagatgttaaattttattgagagccttttctgcatctattgagatgatcatcctgtctttgtttttagttctctttatgtgatgaatcacatttattgatttgtgtatgttgaagtaaacttgcaacccagggataaaacctacttgatcataatagattagctttgcaatgtggtgctggattca

SEQ ID NO: 99555 - DNA, 407 bp, Homo sapiens
aaacctgtgttgaatgaatcataaagtagagcttacagaaagttctgagcttccagacaaccaagtcaaaagaggaacaagctggatttgtacatctttcattagttagtaaaggggtgtgtataagttcctctgtaaatgcagacttatttttggaacttaattccaagaagaatttattgcatggacacttaaataagagaaaggagacatttggcaacagttttataaaagtacctacatgtcatttacagcctaagctataaaggtaatcaccaccagtgtagcctgtataaattaatacacaacagggagaggggaaaaaggaaatgggttaaggtatgaacatatgcactaccacccaaagagggaaatatgaatattggctacggtccttgttttcgcaa

SEQ ID NO: 99556 - DNA, 380 bp, Homo sapiens
aacccgggaggcagagcttgcagtgagccgagatcgcatcacttcactccagcctgggggacagagagaggctctgtctcaaaaataataataataataataatactattcatctcatgtttttctaccattatctacccattcctaatccagattaggcaattaatacaaataagcattgaagttagctctaatttgggaaaactgaattaattagcttctcctctttgtcacataccttcataaaaagtgacctttatacaagtctacatacaagaaaaaaggaaaaatagaaattttatactttagtgaaatgtacctaaagaaattttacctagtctttagttcagttctcaaaattctacatgaaattaagttat

SEQ ID NO: 99557 - DNA, 397 bp, Homo sapiens
tgtcagattggctcagtctgagtggaggatcaatgaataggtgatgaatgaatggatatctacatgtcagtgcattgacagtgaatacatcttgcttatcatagtgaaagaaacagccggacacagtggctcatgcctgtaatcccagcactttgggaggccgaggcgggcggatcacctgaggtcaggagttcgagaccagcctgataaacatgaagaaaccccctctctactaaaaatacaacattagccgggcatggtggcgcatgcgtgtaatcctagctgctcgggaggctgaggcaggagaatcgctagaacctaggaggtggagattgcagtgagccaaagtcgtgccattgcactccagcctgtgcaacaagagcaaaactccatctca

SEQ ID NO: 99558 - DNA, 404 bp, Homo sapiens
tgtcagattggctcagtctgagtggaggatcaatgaataggtgatgaatgaatggatatctacatgtcagtgcattgacagtgaatacatcttgcttatcatagtgaaagaaacagccggacacagtggctcatgcctgtaatcccagcactttgggaggccgaggcgggcggatcacctgaggtcaggagttcgagaccagcctgataaacatgaagaaaccccctctctactaaaaatacaacattagccgggcatggtggcgcatgcgtgtaatcctagctgctcgggaggctgaggcaggagaatcgctagaacctaggaggtggagatggagttttgctcttgttgcacaggctggagtgcaaccgcacgactttggctcactgcaatctccgtcgagc

SEQ ID NO: 99559 - DNA, 222 bp, Homo sapiens
agatggaagcagaggtggatggagaggctgctggaggcatcaagctgtggcctatttctgcgtactcgtctctggggacccagctgcacaccccctgattttccatcgcctgcaatcacagtggtacaaggggccacttcaggagactgaaggaaccacgtgaacccaggcaaagacagcaggtgcctctgaggctcacctgcttgcatgcagcaaggtctg

SEQ ID NO: 99560 - DNA, 331 bp, Homo sapiens
  misc_feature (309)..(310): n is a, c, g, or t
  misc_feature (314)..(316): n is a, c, g, or t
  misc_feature (319)..(321): n is a, c, g, or t
gaaagcaaaggcataagagaatatttgttgtgtcagcaatctaactctttatcaatacgttaagttgatcacattaaaacttctacctctcagccaggcacggtagctcatacctgtaatcccagcactttgggaggccaaggcgggtgaatcacttgagatcaggagttcaagaccagcctggccaaaatggtgaaaccccatctccactaaaaatacaaaaattagctgggcatggtggtgggtgcctgtaatcccagctaattgggaggctgaggcaggagaacggcgtgaacctggggtcgagcnnccgnnnatnnngtagtagtag

SEQ ID NO: 99561 - DNA, 340 bp, Homo sapiens
gaaagcaaaggcataagagaatatttgttgtgtcagcaatctaactctttatcaatacgttaagttgatcacattaaaacttctacctctcagccaggcacggtagctcatacctgtaatcccagcactttgggaggccaaggcgggtgaatcacttgagatcaggagttcaagaccagcctggccaaaatggtgaaaccccatctccactaaaaatacaaaaattagctgggcatggtggtgggtgcctgtaatcccagctaattgggaggctgagggacggaggtgacctgagtcctgaaggcggaggttgcagtgagccaagatggcaccactgcac

SEQ ID NO: 99562 - DNA, 413 bp, Homo sapiens
gcaaaaagatacacacagaccttagccagaatgcagagattattaccttcactgtaaacttgaacaagtcacataactctctacggctcaactgccagacaacagctgtcttgttcacttggcaggaacttttatgagattgaagtaaattctatgacttcttattgaatatgcactagaaaggcaaacaacagattctgggcattttccagaaattcttggggaagactatacttttaatttcagtattttaggctttaacattgtgaaagttgattttttgcactcaagtgcaactgaaggaagaagttccatcatgttaaatctttaaatgttcctttattttaaatcactatagggggaaatgtaatatacatgaagaatttagctttagaatgtttctttaaaacagt

SEQ ID NO: 99563 - DNA, 402 bp, Homo sapiens
agttcaaagaactagcatttgacgaaaatgtctttttcatgttagcttcctttttgtcttcctctctctgagtctcccttctactctgctagcactattcccacaagggacaagatggcctggggctccagcagccagttaggaccatgagggaatcttgagagtggaaatcacgtgccaaggatggcaaagcataaagagagaagaagccttggcctctggtaactgtggagcagtcacaccagcccacagccctggagactacttacagattgtgtgtgtgtgtgtgtgtgtgtgtgtgtgtgtgtgtcacagagagagagagagaaggatatggaggagaaacaggaggaagaggaggagaagggaaaaataaaccttccatcttgttaaaatcactgt

SEQ ID NO: 99564 - DNA, 471 bp, Homo sapiens
  misc_feature (2)..(3): n is a, c, g, or t
annacgggtgactgcgttggaacggggtgatgcggttgggtaagtgaatagatatgtagatgggtgagtgaacatgtcacaatggtggatggattagttggggaagggcaggaacatgtcacaatggtggatggattagttggggaagggcaggaacatatcacaaggtggatggattagttggggaagggcaggaacatatcacaaggtggatggattagttggggaagggcaggaacatatcacaaggtggactgttgcaaggtcggttaatcattaaggcaggaactagctgttccgtcttctttagtggttctcctgttgctccaggctttgtgactccaggaggcctgtaacgtgtgggtcacaggggtcacaatggctcgaccatggggtagcccattcaggggaccttccactggccaggttggtcttgaactcgtgacctcatgatccacccgcctcggcctc

SEQ ID NO: 99565 - DNA, 532 bp, Homo sapiens
ttgtgtgtttatttctgtttccttgttgtgctttaacagaatagcatggacgtggtaaagtgaggaaacgccaggggtctctttgagctggtgatgggatacagcacgtgaagcttgttttgggtataaggaacctctgatgtgtgcttgcaacttgttatttcttgcatttaattgtaaaattctgaggctacgtgctgagagccagcctggcaggatgctgccctgcaaagagcagggatgctgccctcccctactaaccctgcccctccatctgcatggtaaatgccttatgctaagaattcctggagtctgttcatgccgcgtggctggtatgatgtcatatttccaaagccgacagctccctctactggcctggtctggagaactgcagtttgagtgccttgagtcagtcaatcttagacaacccaattctgtaacattttccaatttttagagcagtttgtgtttattgcctgttttttttagatggagttttgctcttgttgcccaggctggagtgcaatgatgt

SEQ ID NO: 99566 - DNA, 662 bp, Homo sapiens
ttgtgtgtttatttctgtttccttgttgtgctttaacagaatagcatggacgtggtaaagtgaggaaacgccaggggtctctttgagctggtgatgggatacagcacgtgaagcttgttttgggtataaggaacctctgatgtgtgcttgcaacttgttatttcttgcatttaattgtaaaattctgaggctacgtgctgagagccagcctggcaggatgctgcccggggacggggacagaacgggagggattctcaggggcagctgtgggtttgggctgcgggggagccctggttcctgagctgaatcggggagagtcccagttcagaggagaatttatgacttggtcagaacccaggaacaatgcctcttcatgttatttatcttattttattagcagtgcacacgatcacgatcttagtgtgatctcattgtgatgttcatgttgttttgaagtgcttccttttttctcagtttataccgtttcaaataagagagtagaacttggtgagtctcggtttcccagcgttgccttatcttttcctgtgagcttttctgagctcttctgattggccatggcagcgccacacccctgcccgctggccagccaggagggctcctcagccagcttggggcttgcctggctcctccttcagacccct

SEQ ID NO: 99567 - DNA, 697 bp, Homo sapiens
aaataaactgggtactctctacctcacccctagtggtaggctatgaaacaaatcgattcagtttaaaatagtttatgtgccgactagtgttaaaacgttcatgtatgcattaagatcacaccaaatcacctgactgattccttcatcaaaagctcctcttggcagttagcagtacacacctaacattagccaaacaggttatctaccatcaacacggagaaataagaaactttgtattgccatttaaagaagttgctttctaaaactagacatgaataagggagagaagaggaagtattaaacccctaaactaattaacgaaataagggaggggggatgcaggaaaacaatgataattagtatgtacccttggttaaccaaatccacacatacattcattctgtatatgcacaaacatcagcagcatcataaaccgtctcaagttctagccattattcagttcgacatctgcacatgtttatgcgtctctccaaacaacctcttgaacaccctgctggagctgtcatttttttcttctccctatctggcagatggcaagtcaacaatcggcatcaacagcagccgaatatctccccctccatcctacccccctaaacagacacaataataacttctttgtgcttccctacaatgcagctgcttaaaccatttcgctacaaggctgctttgccttaat

SEQ ID NO: 99568 - DNA, 5044 bp, Homo sapiens
aacgtcccatttgcccgagactgaaggatttctcaggctgtggacatttaatgccaaaaccaggaatatccggggcaaagcaggctgtgttgttcgcctttgtggagccaggcagtgtgtggcccagggaaagctgcgtttcatggaggcttccaggaggctgccctgtaaagccaggcaggtggcttcaagtgccattcctgcaagtgcccctgcttcagctctcaggcccatccaatgcctcgagcccacgggggtgtcccggcaggtctgcgtcatcacgacccagtaacgctgctggctgtgtcctcatgccctcttcctctggctggccagtcatctttgtcacttctacacctttgagtgtgtacaggctgaatgttgagtgatgcccccccaccctctcaataaacacacacacacacacacacacacacacacacacacacacacaatgttattaggcacagcagctccatcctgctccctgagaatggcagtgcaggcacagagaagagcagttgggaagacaggcagctggtctaccctgtccccgcacacttcacaggcactccactgcttggcaggaattctgcatggcatctgccacgcatgctcacagggtgaaaaatcaagctgtcactctgcaaaatctaaaaaccctggaaaggtctataagatgacattagacccagttaagaagcaagtgtcacctgagttggccatgcaatgaatgaatattataagcagtattggagaactaggcggttgcttactaagaagtgtcttggaaacattcgagttcatacagtgcatgacaaagtaatagaaggctgcaagcgctgaaaatgcacccgaatctggtacctaggatgagtacatgaatagtgatgaatagccctttgtgctgtgtgctatatacaaccatttgcattcagaaagcagcatttgaagctgagttccattactggtgattgaagtattttcaggagcagatacatgtggtgcatgttatatgcacttagtttgaaagtatccctcacccaaaaagtgcagaacctctgaaaggtgagccgtggtgcaggtgcccccctcgctgttcgggtcagttcttggccatgcttggcctgtcacacgccgggtctcaacaacatcgtgcgaggagacagtgactggtttcagcccaagagtcaactgttgagcatgacatcaggaagcctgtactgtcctgatcccaccaggcttgggttaatttcctattgcttcagagaaagagaggcgctcttgtgcttttgagagagctctcatgttaaaaagaggttgtctttgcactgcgcttggtatgatttgttttcttataaaacaggaagagaacctagaatgtgcctttcgtgaaggtctgacaaatggggtctcagagtcctaggacccgcaccaaggtcagagtccacctgtagaggctgagcatttctacatgcacccagggtgctgggctgaggctaagggtggacgcgtagaccccatcacaggcttccttcctgagcccaagtcccccatttggtcactatcccttctcagagcaagtggattctcttttcctcacttggaatattcaatgttgaagtagtggcctggagtggcctttccctcagctgcctgtctgggctccctggcttcccggatcttcatctcatacgtgaggcaataggaggagtttctattcattgagacaaacagtgagcgggcaccaacaggccagcagcttggcccttttcacagaggtggccttggagtctggagtctgggcagctgtctgcctctctacggctctgcttcccagcgggcacacgggtccggagcctcagaatgaagtggtgcagaggcgcagggcacacctaggagaagctcaatgaccaccaaagcccttgaggagagacggggtttgctgtgttagagaaatggcaacccccaggaccatgcacggctctggcagtgcacagtggctgattttcaccagttcctcctacccctgcctctgtcggagactagaaaacattctaccccttcaggtcttcttttaaaagaaaagagctatggcaaagcgtgccatacaaagttaaaaaaaggaagagtggctttgcgttcttgaccatggccacaattctggtcacttctagcatctgaccttgagaacggtgtagaggctctgagccaccgctggcctttgagagagtctcactctccagctagctctttgtgtagtgtccagggccccggcagtcaggatagagcgagcaaaagaagatggacagtggacagggcgcagtggctcacgcctgtaatcccagcgctttgggagagcgaggcgggcagatcacaaggtcaagagatcaagaccattctggccaacatggtgaaaccctgtttctactaaaaatacaaaaattagctgggcatggtggtgcgtgcctgtaatcccagctactcgggaggctgaggcaggagaatcgcttgaacccgggaggcagaggttgcagtgagccgagatcgtgccactgcactccagcctgggtgacagagcaagactccgtctcaaaaaagatggccatgctggccaaggctgggctcataggaaatatctgtagtaggatgaaaggaatctggcctagggagccccggactcggtttacctaccccgtactcatcccactcatctgtctaccctagtgtccatcatgccctggatgaatcataggtgggagggacagaagccgagaacaccaggcacacggggtggggggaatggggggagcccaggtgatcccctttggaaagtggattgatcctctcccctgtggaatgacagcttaacctgattaacccactggggcttgctattttatgagcatttttaaacagaaaggaaagatgatatcccagtgcaggtagactttatttttgaaagcatcgtggcccctcgcctctccctctcccccagaaccttggccagaattgagtcttcgcgttggggaggccacgctggaaccattgctctagggctgaaggtggaagtagggccactgccgcagcttcagccagagccctcgctgcttcgcagaatttaacaagcacacgactgggattcctttggatatgagaaaggaaggcaagtgcgggcaaagggaagctcctcccgtttttcataaacagaagtaagatgtcctctttcccaggtttgcacaatcacttctggcaaattaattgaaggtccttgaattcagccagtgcacgaaacctttgcatgttcttctgaaactgtacttcttccctattctgtctacccacactctgcgaactttgccttttccttaaacacattccagaccaaacactgttcagtttgttaaaaaaaaaaaaaaaaaaaagatgtatatacctgtatgtgatccaccacccttttgaggggcacctggtcctcggttggggctgcaggtgtgcctgacatttgcaaaagatattccagtctttcgatgttcagaattgaaaatgtggagatagaaaagctcaaacagactcctaaaaggagggtttctttcctgaagactccaagaaaatgagtgtgcagatgagttagcttgacaacctcaactctggggagcaggcaggcggtctgaggaagataagggcccacgccccactcacctggcacctgttcggtggtcccggggcatcacggtctgcagctctgggcccccagccccactgtgaagtcagtcctgcatgctggccgaggcccggccacctcccgatgcctccagagtcagtgggaaggagtcagcccttcccagacttccccgccacctccagcaggagcagctcagtttgtggctctggggagctccgcttttgcaaacccaaaaaggctgtgcatttggaagccaaacgctcagcatgcggctgccgagtctggttttgtggacaaagcaaactgtggaatggcttctcggtgtctgtataaagggacaaacggttgcattcaccctttgtactataacaccgcttctgcattcgccatatccgttttttaacctttttgtctccggggaacttctcattcgattattatgtcttctgatgatttgccatgttattttaaaggtgattttattttcttatggacaggaaaaaagaaaatgaggaggagttggttttactcttagagataagacttcagcaggggctcagaaaccccaaactctagttaaattgcttctcggaggaaaatcttaatctagacagattcagattcccaggctctcctggaagccctgcacttcagggcacaggggccctgggacgtggttggcagccaggctgcgagagagctaaaaaggaacaagaacatcagctcggatgtttgtctctcagccctgacacctgccactctccttcccggggcacttggccctatcagagggacatgaaatgctgtccaaatggtggcagaaatgcagcgacattgcatgcagcagagtctttgcttcgaaagatggggcgccatgtttcagagaacatttatcttagtcccacgttcaggtgagaagacctcaaaggtaccctctgtccagaataaacattggaacaatctctcaattggcttttgtcactacacataatgtaatctcccttctttcagctcccccaacagtgagcatgcttcccaaaaaattacaacatcaaaaccaggaatgtccccgcatctactattaccaggcttgcaattggttcaattttcccataaaaacatgtttgtccaaaagaagggaaactgtgaatttattccatgcatgtaataaactctgcaagaagtttaacccacataggtttgcggcactgcaaaattgttcatgggtctatgtagcaaatgattctctgccttgacaatcatgtatacatatcaagatttctatcataatgataatgagattgatgacttcttgttttcctccaataaagacaattaatcaccttcaaaaaaaaattt

SEQ ID NO: 99569 - DNA, 5034 bp, Homo sapiens
  misc_feature (4959)..(4959): n is a, c, g, or t
  misc_feature (4969)..(4969): n is a, c, g, or t
  misc_feature (4980)..(4981): n is a, c, g, or t
  misc_feature (4985)..(4985): n is a, c, g, or t
aacgtcccatttgcccgagactgaaggatttctcaggctgtggacatttaatgccaaaaccaggaatatccggggcaaagcaggctgtgttgttcgcctttgtggagccaggcagtgtgtggcccagggaaagctgcgtttcatggaggcttccaggaggctgccctgtaaagccaggcaggtggcttcaagtgccattcctgcaagtgcccctgcttcagctctcaggcccatccaatgcctcgagcccacgggggtgtcccggcaggtctgcgtcatcacgacccagtaacgctgctggctgtgtcctcatgccctcttcctctggctggccagtcatctttgtcacttctacacctttgagtgtgtacaggctgaatgttgagtgatgcccccccaccctctcaataaacacacacacacacacacacacacacacacacacacacacacaatgttattaggcacagcagctccatcctgctccctgagaatggcagtgcaggcacagagaagagcagttgggaagacaggcagctggtctaccctgtccccgcacacttcacaggcactccactgcttggcaggaattctgcatggcatctgccacgcatgctcacagggtgaaaaatcaagctgtcactctgcaaaatctaaaaaccctggaaaggtctataagatgacattagacccagttaagaagcaagtgtcacctgagttggccatgcaatgaatgaatattataagcagtattggagaactaggcggttgcttactaagaagtgtcttggaaacattcgagttcatacagtgcatgacaaagtaatagaaggctgcaagcgctgaaaatgcacccgaatctggtacctaggatgagtacatgaatagtgatgaatagccctttgtgctgtgtgctatatacaaccatttgcattcagaaagcagcatttgaagctgagttccattactggtgattgaagtattttcaggagcagatacatgtggtgcatgttatatgcacttagtttgaaagtatccctcacccaaaaagtgcagaacctctgaaaggtgagccgtggtgcaggtgcccccctcgctgttcgggtcagttcttggccatgcttggcctgtcacacgccgggtctcaacaacatcgtgcgaggagacagtgactggtttcagcccaagagtcaactgttgagcatgacatcaggaagcctgtactgtcctgatcccaccaggcttgggttaatttcctattgcttcagagaaagagaggcgctcttgtgcttttgagagagctctcatgttaaaaagaggttgtctttgcactgcgcttggtatgatttgttttcttataaaacaggaagagaacctagaatgtgcctttcgtgaaggtctgacaaatggggtctcagagtcctaggacccgcaccaaggtcagagtccacctgtagaggctgagcatttctacatgcacccagggtgctgggctgaggctaagggtggacgcgtagaccccatcacaggcttccttcctgagcccaagtcccccatttggtcactatcccttctcagagcaagtggattctcttttcctcacttggaatattcaatgttgaagtagtggcctggagtggcctttccctcagctgcctgtctgggctccctggcttcccggatcttcatctcatacgtgaggcaataggaggagtttctattcattgagacaaacagtgagcgggcaccaacaggccagcagcttggcccttttcacagaggtggccttggagtctggagtctgggcagctgtctgcctctctacggctctgcttcccagcgggcacacgggtccggagcctcagaatgaagtggtgcagaggcgcagggcacacctaggagaagctcaatgaccaccaaagcccttgaggagagacggggtttgctgtgttagagaaatggcaacccccaggaccatgcacggctctggcagtgcacagtggctgattttcaccagttcctcctacccctgcctctgtcggagactagaaaacattctaccccttcaggtcttcttttaaaagaaaagagctatggcaaagcgtgccatacaaagttaaaaaaaggaagagtggctttgcgttcttgaccatggccacaattctggtcacttctagcatctgaccttgagaacggtgtagaggctctgagccaccgctggcctttgagagagtctcactctccagctagctctttgtgtagtgtccagggccccggcagtcaggatagagcgagcaaaagaagatggacagtggacagggcgcagtggctcacgcctgtaatcccagcgctttgggagagcgaggcgggcagatcacaaggtcaagagatcaagaccattctggccaacatggtgaaaccctgtttctactaaaaatacaaaaattagctgggcatggtggtgcgtgcctgtaatcccagctactcgggaggctgaggcaggagaatcgcttgaacccgggaggcagaggttgcagtgagccgagatcgtgccactgcactccagcctgggtgacagagcaagactccgtctcaaaaaagatggccatgctggccaaggctgggctcataggaaatatctgtagtaggatgaaaggaatctggcctagggagccccggactcggtttacctaccccgtactcatcccactcatctgtctaccctagtgtccatcatgccctggatgaatcataggtgggagggacagaagccgagaacaccaggcacacggggtggggggaatggggggagcccaggtgatcccctttggaaagtggattgatcctctcccctgtggaatgacagcttaacctgattaacccactggggcttgctattttatgagcatttttaaacagaaaggaaagatgatatcccagtgcaggtagactttatttttgaaagcatcgtggcccctcgcctctccctctcccccagaaccttggccagaattgagtcttcgcgttggggaggccacgctggaaccattgctctagggctgaaggtggaagtagggccactgccgcagcttcagccagagccctcgctgcttcgcagaatttaacaagcacacgactgggattcctttggatatgagaaaggaaggcaagtgcgggcaaagggaagctcctcccgtttttcataaacagaagtaagatgtcctctttcccaggtttgcacaatcacttctggcaaattaattgaaggtccttgaattcagccagtgcacgaaacctttgcatgttcttctgaaactgtacttcttccctattctgtctacccacactctgcgaactttgccttttccttaaacacattccagaccaaacactgttcagtttgttaaaaaaaaaaaaaaaaaaaagatgtatatacctgtatgtgatccaccacccttttgaggggcacctggtcctcggttggggctgcaggtgtgcctgacatttgcaaaagatattccagtctttcgatgttcagaattgaaaatgtggagatagaaaagctcaaacagactcctaaaaggagggtttctttcctgaagactccaagaaaatgagtgtgcagatgagttagcttgacaacctcaactctggggagcaggcaggcggtctgaggaagataagggcccacgccccactcacctggcacctgttcggtggtcccggggcatcacggtctgcagctctgggcccccagccccactgtgaagtcagtcctgcatgctggccgaggcccggccacctcccgatgcctccagagtcagtgggaaggagtcagcccttcccagacttccccgccacctccagcaggagcagctcagtttgtggctctggggagctccgcttttgcaaacccaaaaaggctgtgcatttggaagccaaacgctcagcatgcggctgccgagtctggttttgtggacaaagcaaactgtggaatggcttctcggtgtctgtataaagggacaaacggttgcattcaccctttgtactataacaccgcttctgcattcgccatatccgttttttaacctttttgtctccggggaacttctcattcgattattatgtcttctgatgatttgccatgttattttaaaggtgattttattttcttatggacaggaaaaaagaaaatgaggaggagttggttttactcttagagataagacttcagcaggggctcagaaaccccaaactctagttaaattgcttctcggaggaaaatcttaatctagacagattcagattcccaggctctcctggaagccctgcacttcagggcacaggggccctgggacgtggttggcagccaggctgcgagagagctaaaaaggaacaagaacatcagctcggatgtttgtctctcagccctgacacctgccactctccttcccggggcacttggccctatcagagggacatgaaatgctgtccaaatggtggcagaaatgcagcgacattgcatgcagcagagtctttgcttcgaaagatggggcgccatgtttcagagaacatttatcttagtcccacgttcaggtgagaagacctcaaaggtaccctctgtccagaataaacattggaacaatctctcaattggcttttgtcactacacataatgtaatctcccttctttcagctcccccaacagtgagcatgcttcccaaaaaattacaacatcaaaaccaggaatgtccccgcatctactattaccaggcttgcaattggttcaattttcccataaaaacatgtttgtccaaaagaagggaaactgtgaatttattccatgcatgtaataaactctgcaagaagtttaacccacataggtttgcggcactgcaaaattgttcatgggtctatgtagcaaatgattctctgccttgacaatcatgtataccagtnaagtatttgncagcatccgtnngtcnctaacttgtttctatttttacagccacacaattcttggcatgtattaag

SEQ ID NO: 99570 - DNA, 1795 bp, Homo sapiens
ccgcctactactactactgctcgaattcaagcttctaacgatgtacggggacatgttcttctgaaactgtacttcttccctattctgtctacccacactctgcgaactttgccttttccttaaacacattccagaccaaacactgttcagtttgttaaaaaaaaaaaaaaaaaaaagatgtatatacctgtatgtgatccaccacccttttgaggggcacctggtcctcggttggggctgcaggtgtgcctgacatttgcaaaagatattccagtctttcgatgttcagaattgaaaatgtggagatagaaaagctcaaacagactcctaaaaggagggtttctttcctgaagactccaagaaaatgagtgtgcagatgagttagcttgacaacctcaactctggggagcaggcaggcggtctgaggaagataagggcccacgccccactcacctggcacctgttcggtggtcccggggcatcacggtctgcagctctgggcccccagccccactgtgaagtcagtcctgcatgctggccgaggcccggccacctcccgatgcctccagagtcagtgggaaggagtcagcccttcccagacttccccgccacctccagcaggagcagctcagtttgtggctctggggagctccgcttttgcaaacccaaaaaggctgtgcatttggaagccaaacgctcagcatgcggctgccgagtctggttttgtggacaaagcaaactgtggaatggcttctcggtgtctgtataaagggacaaacggttgcattcaccctttgtactataacaccgcttctgcattcgccatatccgttttttaacctttttgtctccggggaacttctcattcgattattatgtcttctgatgatttgccatgttattttaaaggtgattttattttcttatggacaggaaaaaagaaaatgaggaggagttggttttactcttagagataagacttcagcaggggctcagaaaccccaaactctagttaaattgcttctcggaggaaaatcttaatctagacagattcagattcccaggctctcctggaagccctgcacttcagggcacaggggccctgggacgtggttggcagccaggctgcgagagagctaaaaaggaacaagaacatcagctcggatgtttgtctctcagccctgacacctgccactctccttcccggggcacttggccctatcagagggacatgaaatgctgtccaaatggtggcagaaatgcagcgacattgcatgcagcagagtctttgcttcgaaagatggggcgccatgtttcagagaacatttatcttagtcccacgttcaggtgagaagacctcaaaggtaccctctgtccagaataaacattggaacaatctctcaattggcttttgtcactacacataatgtaatctcccttctttcagctcccccaacagtgagcatgcttcccaaaaaattacaacatcaaaaccaggaatgtccccgcatctactattaccaggcttgcaattggttcaattttcccataaaaacatgtttgtccaaaagaagggaaactgtgaatttattccatgcatgtaataaactctgcaagaagtttaacccacataggtttgcggcactgcaaaattgttcatgggtctatgtagcaaatgattctctgccttgacaatcatgtatacatatcaagatttctatcataatgataatgagattgatgacttcttgttttcctccaataaagacaattaatcaccttcaaaaaaaaattt

SEQ ID NO: 99571 - DNA, 414 bp, Homo sapiens
ccaagaggaaagtctgaggtataagagggagttgtaagccaaaaaaaaaaaaaaaaagagaaaaaagtaagtatgaaggaaatctaaacaaacattgattatgcaaaataatgtctaattcggagagtaaacaaatagagtagatctaaaatattgaatgaaaataccatttaagatgggaagctggttatcagtattccagtgttttaagggtacagctattgattaccttgaggctttacatatacatggtgaaagagtaagggacagccacttaattggtacaaatagagtgcatacttcaaacactgtagaggagataatggcatttcaaagttattggtcaatgccaggtcgggtgcagtggctcatgcctgtaatcccagcactttgggaggccaaggtgggcggatc

SEQ ID NO: 99572 - DNA, 2370 bp, Homo sapiens
gaggggtgtccagagccaggcagcaaggaccagaggaaggtggacagagaccgaaaggacaaaggagagacacagagaaaaaaagagaccaaccccaaagggacaaagaccccaacgtttgtccacattgccgcagaggcagctggagccagtgctgcctgtccgtccccatgggccaccataggccatggctgcacgcttctgtcctctgggctggggtggccagcctgctcctccccccggccatgacccagcagctcagaggggatgggctaggcttcagaaaccggaacaacagcactggagtcgccgggctctccgaggaggcatcagcagagcttcgccaccacctccacagccctagagaccatccagatgagaacaaggatgtttccacagagaatgggcatcatttctggagccacccagaccgtgaaaaggaggatgaagatgtctccaaggaatatgggcacctactcccaggccacaggtcccaagaccacaaagtcggagatgagggtgtctcaggtgaggaggtctttgcagagcatggtgggcaggcccgtgggcacagaggccacgggagtgaagacacggaagactcagctgagcacaggcaccacctccccagccacaggagccacagccatcaagacgaggatgaggatgaagttgtgtccagtgagcatcaccatcatatcctcaggcatggacaccgaggccatgatggggaagatgatgaaggagaagaggaggaggaggaggaggaggaggaagaggaggcctccactgagtatggacaccaggcccacaggcaccgaggccatgggagtgaagaggatgaggatgtctcagatggacaccatcatcatggccccagccacaggcaccaaggccatgaagaagatgacgatgatgatgatgatgatgatgatgatgatgatgatgatgatgtctccattgaatatagacaccaggctcacaggcaccaaggccacgggattgaagaggatgaagatgtctcagatggacaccatcatcgcgaccccagccacaggcaccgaagccatgaagaagatgacaatgatgatgatgatgtctccactgagtatggacaccaggcccacaggcaccaagaccacagaaaggaagaggttgaggctgtctcaggtgaacaccaccatcatgtccctgaccacaggcaccaaggccacagagacgaggaagaagatgaggatgtgtccactgaacgttggcaccagggtccccaacatgtccaccatggccttgtagatgaggaagaggaagaagaggagatcacagtccagtttggccactatgttgcaagccaccaacctcgaggccacaagagtgatgaagaggacttccaagatgagtataaaacagaagtccctcaccatcaccaccacagagtccccagggaggaagatgaggaggtctctgctgagcttggccaccaggcccccagccacaggcaaagccaccaagatgaagaaactggccatggtcaaagagggtccatcaaagagatgagccatcaccccccaggacacacagtggtcaaggatagaagccatttgaggaaggatgattctgaggaggaaaaggagaaggaagaggaccccggctcccatgaggaagacgatgaaagttcagagcagggagagaaaggcacccatcatggcagccgggaccaggaagatgaggaggatgaggaggaaggtcatggcctcagcctgaaccaggaggaggaagaagaggaagacaaggaggaggaggaggaggaagaagacgaggagaggagggaagagagggctgaggttggggccccactgagcccagaccacagcgaggaggaagaggaggaggaggaggggctggaggaagatgagccccgcttcaccatcatccccaacccactggacaggagagaggaggctggaggtgcctccagcgaggaggaaagcggtgaggacacaggtccacaggatgctcaggagtatgggaactaccagccagggtccctgtgtggctactgctccttctgcaatcgatgcactgaatgtgagagctgtcactgtgatgaggagaacatgggtgagcactgcgaccagtgccagcactgtcagttctgctatctctgcccgctggtctgcgaaacggtctgcgctccaggaagctacgttgactatttctcctcgtccctttatcaggccctggcagacatgctggaaacgccggaaccctgacccagtcgctcgactgcgacgcaggtgtacctccccctgccttccaacccctttccacgagctatatttatttctccgaataaacgtgctccccgaaacc

SEQ ID NO: 99573 - DNA, 483 bp, Homo sapiens
ctggaaaaacctgaggaaggtgccgggcccagcgtggtgaatcctggtgggggcggagcctggcccggaaggctggtggggcggggctaagaggggaggcgtggccaaggctctgagcacgtgggccggggcctggctcgaggaacaccaggtggagttgctggagccaagggacagaaatgagtggagatttgagatgcgggcttagagcctaatgggcgaggccaactcaagtaggaatcgaaggggcggggctactggagaacggaatcacccagaacgaaaaaggggtccggtagaagggattcagaagctacgttgactatttctcctcgtccctttatcaggccctggcagacatgctggaaacgccggaaccctgacccagtcgctcgactgcgacgcaggtgtacctccccctgccttccaacccctttccacgagctatatttatttctccgaataaacgtgctccccgaaacc

SEQ ID NO: 99574 - DNA, 2278 bp, Homo sapiens
gaggggtgtccagagccaggcagcaaggaccagaggaaggtggacagagaccgaaaggacaaaggagagacacagagaaaaaaagagaccaaccccaaagggacaaagaccccaacgtttgtccacattgccgcagaggcagctggagccagtgctgcctgtccgtccccatgggccaccataggccatggctgcacgcttctgtcctctgggctggggtggccagcctgctcctccccccggccatgacccagcagctcagaggggatgggctaggcttcagaaaccggaacaacagcactggagtcgccgggctctccgaggaggcatcagcagagcttcgccaccacctccacagccctagagaccatccagatgagaacaaggatgtttccacagagaatgggcatcatttctggagccacccagaccgtgaaaaggaggatgaagatgtctccaaggaatatgggcacctactcccaggccacaggtcccaagaccacaaagtcggagatgagggtgtctcaggtgaggaggtctttgcagagcatggtgggcaggcccgtgggcacagaggccacgggagtgaagacacggaagactcagctgagcacaggcaccacctccccagccacaggagccacagccatcaagacgaggatgaggatgaagttgtgtccagtgagcatcaccatcatatcctcaggcatggacaccgaggccatgatggggaagatgatgaaggagaagaggaggaggaggaggaggaggaggaagaggaggcctccactgagtatggacaccaggcccacaggcaccgaggccatgggagtgaagaggatgaggatgtctcagatggacaccatcatcatggccccagccacaggcaccaaggccatgaagaagatgacgatgatgatgatgatgatgatgatgatgatgatgatgatgatgtctccattgaatatagacaccaggctcacaggcaccaaggccacgggattgaagaggatgaagatgtctcagatggacaccatcatcgcgaccccagccacaggcaccgaagccatgaagaagatgacaatgatgatgatgatgtctccactgagtatggacaccaggcccacaggcaccaagaccacagaaaggaagaggttgaggctgtctcaggtgaacaccaccatcatgtccctgaccacaggcaccaaggccacagagacgaggaagaagatgaggatgtgtccactgaacgttggcaccagggtccccaacatgtccaccatggccttgtagatgaggaagaggaagaagaggagatcacagtccagtttggccactatgttgcaagccaccaacctcgaggccacaagagtgatgaagaggacttccaagatgagtataaaacagaagtccctcaccatcaccaccacagagtccccagggaggaagatgaggaggtctctgctgagcttggccaccaggcccccagccacaggcaaagccaccaagatgaagaaactggccatggtcaaagagggtccatcaaagagatgagccatcaccccccaggacacacagtggtcaaggatagaagccatttgaggaaggatgattctgaggaggaaaaggagaaggaagaggaccccggctcccatgaggaagacgatgaaagttcagagcagggagagaaaggcacccatcatggcagccgggaccaggaagatgaggaggatgaggaggaaggtcatggcctcagcctgaaccaggaggaggaagaagaggaagacaaggaggaggaggaggaggaagaagacgaggagaggagggaagagagggctgaggttggggccccactgagcccagaccacagcgaggaggaagaggaggaggaggaggggctggaggaagatgagccccgcttcaccatcatccccaacccactggacaggagagaggaggctggaggtgcctccagcgaggaggaaagcggtgaggacacaggtccacaggatgctcaggagtatgggaactaccagccagggtccctgtgtggctactgctccttctgcaatcgatgcactgaatgtgagagctgtcactgtgatgaggagaacatgggtgagcactgcgaccagtgccagggccctggcagacatgctggaaacgccggaaccctgacccagtcgctcgactgcgacgcaggtgtacctccccctgccttccaacccctttccacgagctatatttatttctccgaataaacgtgctccccgaaacc

SEQ ID NO: 99575 - DNA, 873 bp, Homo sapiens
aggaaacccaaatgatgacattcgatatgatcttttccttagctgtgacaaggaccctcagaccaccgtcattgagaatggccgaagccagcggggccggttttcttttgaagtgttccgatttgtgaaacacaagaatcagaaaatgtccactgtcttcttgcactgcgttaccaagctctgcagagcagatgactgccccttccttatgccgatttgcagccacagagaaaggagagatgctgggaggaggacgacttggagcccccagagctcttctggcagcgcggtgctctctgctggtcccatcattactcggagtgatgagactccaaccaacaattcgcaacttggttctccaagtatgcctcccttccagctgaacgccatcaccagcgcactgatatcaggaatggtcattctgggagttacgagcttttctcttcttctgtgctcactggcccttctgcacaggaagggacccacaagtttagtgttgaatggcataagaaacccagtctttgactgactataacagattcctgctctctggagaaggcttcactgactaaactatgtgtgactgcagtcagtgttccgtctgaatttcatgtcagtccacattcaatatttgtaggtttgataaatttcacagtatagcttgtcagcataatgatagtgaaagaagtttattatattgctattgtcacttatgtacgtggcgagccgtatttttatgccaccagtgaatatattgacaataagtgaaaaatattcaggacttagggcttacaggatcagtaatatttcattttatttcagttttcttttgattgttggttaaaagataaaaggtgggagtagacaaaaaat

SEQ ID NO: 99576 - DNA, 316 bp, Homo sapiens
agtgttggaagtggggcctaatgggaagtgtttgggtcatgaaagcaggtctctcatgaatagattaatgccctccttttggggtgagtgagttctcactgtatttgttcctgcaagagctggttgttaaagagagcctggcacctctctcttgtatcttgctttctctcttaccatgtgatatctccacactctagctctcttttaccttccactatgagtagaagcaccatgaggccctcacaagatgcaaatgttcaaccttgaatgttgcagccgtcagaattgtgagccaaataaacctttttttccttac

SEQ ID NO: 99577 - DNA, 632 bp, Homo sapiens
tgtatttaaaatgagggtctataaatttattatgattagtatgctatagaaagttcttatgagggatccgtcatagtagtggagctagtgggtatgcaatgttggcactggtggtcgtgggaaaggtcgtagtatgggagacagcatttggcctcatagggttgaggaccactcctctgggggaagtgtgttccaggctaaaggtacagcaatcacatgaatgccttgaactgtccaatgcagggaaggtattgaggctggagcagagtgacaagggaaaagtgagaggtcacagaaattgccaaggttcacatcatatagggcctggaaggtcatggtaaggaccttgcatcatgctttccactctagctagaataaaatgcaatgtggctttgagcaagagagtgacagggtctcatttaggctcctgtgggattgcagactgcagaggggtgcaacggaagcagggataccaattggaagtccactgcagaagtccaggcactgaggacgggtgtggtggcttactcctgcaatcccagaacttttggaggctgaggcaggtggatcacctgaggtggggagtttgagaccagcctgaccaatatggtgaaaccccgtctctactaaaa

SEQ ID NO: 99578 - DNA, 438 bp, Homo sapiens
ccctgtcaaaatagaaagtggcatgactattcctcctatgaaagcatcctgtatggaggatcagaccaaatgctaaaacactttagtaggtttacctaaatacagcttgtctttcatatatcatgccttgacacttcttctgcaagaccagttttttctgtaagactaattgatattgagatttcaatatatatagaaatgggactaaattttatccaaagctatttttgcctctattttgggggcattcaagttaatttcccccacttacactaaactgtcaaatactagaatgtggaagcttgaatattagagataagtaagtgcccagttccattccaccagttcacagccctgtctatccctccatcccaccctcaccaccaccctcctaaagcaagattattaacactgaactggactgctaaaacttcttcc

SEQ ID NO: 99579 - DNA, 383 bp, Homo sapiens
ccaggatggtcttgatctcctgaccttgtgatcctcctgcctcggcctcccaaagtgctgggattacaggcgtgagccaccgcgcctggcaatttttgtatttttataatagagacagggtttcaccatgttggccaggctggtctcgaactcctgacctcaggtgatctgcctacttcagcctcccaaagattacaggcagagacggcacgcctggcccttggaattctgtcattagcttctgtaattgtcctctttcatagtccaatgtaagctccaggatggctggggtttgttttgtgtacctctgtatccccagccactaagtgcagtgcctggcactgtggatgaagtcaacagtggttgaaagaatcaaaggcagc

SEQ ID NO: 99580 - DNA, 300 bp, Homo sapiens
gcatggtttgtgtggaactggggcccaggcaggtgtgagtgcaggtcttctgtgtgccagccggagcacatagcttgtcgcctctccaacagacatggaggccatgaagacatctgctcctgccagcatccgccgctgccccctggtctaaaagtgggctgacctggggacggcccctcatcagacagatgcgtgctgccggcctcctgccgctccccttgctggtcagacccacagggcccgtgcacatccggggccccagtgggctgtcagaagccatgcaggccccatccgtatggt

SEQ ID NO: 99581 - DNA, 214 bp, Homo sapiens
ggtagtagggacaggagggcacaaaaagaatacatcattaagatgtgatctgtgttctagaggaactcacagtctagtacataaacaatgtctcagctcccaaaataagtatgttgctgtattttatccaagcagaagaatcctgcttgttatggtaagaatcttatgtctaaagcaatatcatcctgattcttgataatcaactcttaataat

SEQ ID NO: 99582 - DNA, 234 bp, Homo sapiens
gaaccagggacaggatggaagaccaaatacatatttcttctcatttcacaatatcgtaggatgttggggcaggatgattctggagggagttcttacctaagactagaacaatgtgtgagtgttagctagtgagagaacactgtacaaaaggcctgggtgggaaagcggatggctcattcaaggaactgaagaagaccctcaatattggcatagcttaaagagcttagagagtta

SEQ ID NO: 99583 - DNA, 304 bp, Homo sapiens
acctggtgaagacacggtcagaagatcatctttgaaccagaaagctggacctcaccagacactgaatctggcggtgccttcatcttgaactttccagcctccaaataggtgaaaaataaatttctgttgtttataagctattctgtttaaattatttgattattgcagcccaaatagatgaagccaaaaagttatattagcccctttcgtttggagaaaaaattatattatcgttgttgtatttgttattctatatttattacatacatgtaatatccagataataaacatgttcaaaatgtat

SEQ ID NO: 99584 - DNA, 411 bp, Homo sapiens
caggttagagagaactgtgctagaattctagctgtattacttaatagttatatacccctggacaaactaagggctctgagcctcagcttcctcacctgtataaagggagaaataatacctgtgaaaagggctaaaatgaggttaaaatgcagggagcctggcgtgttgctagtgcctagtacatgccagtgtctggtggcagctcttgctgccgtgactgctctcatgatgccatgctgcctgggctattcctggagtgaaatactgaaaaggagcacagagagaagagtctggaatagaaaaagaaatgttgtttttttttcctaccatacccttgtccgcctcctggtctcaggtgttctaagaaaggaaacgagttgttttaaagcatctcagtcagtgctgcctccc

SEQ ID NO: 99585 - DNA, 759 bp, Homo sapiens
tgctgcagtcgcctggaggcccgtttgtacagtggaaaagtagaaaatgagactctaaaaatctcatcagccaaatacaaaacattctccttgctgctacgtggcggcctccacagagccctaaaaccttgaagctcggagacctatcttgaagggggagcaaaggcgggatgcgggaagtttgagtccatggaagacactgataccctctccattcctgggaaccctgagcctgaaggacccggcctgaacagcggaaggactgaatccctgtgcaactcatcggtgatggaacataaagccatggtgccctcggtccccaagacgggagggatggggaaggccctgggtgaaggggacaggcggggaaggaaaaggtgaagagaaaggtgctccccagggagggggtagatgtgcccaggacatgggacattggcagaattttaactccgagcacacacacaggcccacggacggcttcccgtctacctgttccttacgggtgtgctgtgccggcctgggcacctgcctctttccccatgccaggtcacttgccgtctaccctgtatactgccactagttctaagcctcccagaacaccctgatcagggccctgtggcctctgttacaggattccaggcctagacgtctgctcgattggaaaactgcccccagagatgccgtggctcagagctcgtcctgctttggggtggcccctggagtctccgcccctcagcaacccacatggtgacaggcacc

SEQ ID NO: 99586 - DNA, 298 bp, Homo sapiens
tgtccaggcagcacatctgatgtccattgtgaggatgtgctgcagcctccctctgtatgtaagttctatgaataaatgctttggactggtcgccctggagtttagtgcttctttctttggaatcctaactggtcccatctaggaaaggtctggggaatttcactgtgggaattgccctgctgccacttttagggtgactccagctgctggctgcaggaggaaacatgttctcataaacatatgtggagttggtgctggctgagttccatacgcatgggtctttcatcctcaaggaagc

SEQ ID NO: 99587 - DNA, 530 bp, Homo sapiens
cagcctgaccaacaggaagaaaccttgtctctactaaaaatacaaaaattagctgggcgtggtggcgcatgcctgtaatcccagctactcaggaggctgaggcaggagaatcacttgaacccgggaggcggaagttgcagtgagccgagatcaagccattgcacttcagcctgggcaataagagctaaactctgtctcaaaaacaataacagaagcaaagactaacatgttgccatgcctgtctgcgttcttccaggctaacgctgcttttaacagatggaattttcttcttaaagaatgaatcccccaggggattgttgccagctccctgctgaaccacagcaaggcctctgtggggccctgggcctggcatcccagatgctgtttggttttctctttatagcacagggatcatcctggcatctcagattttcctagctttcccttcccaactatctgctgctatcccatccctggggaagtagatggtttagctttggaggccctggtggattccaagttatagctgg

SEQ ID NO: 99588 - DNA, 163 bp, Homo sapiens
actcatttgatattcacaacaaatctgaaagttaggcagtaatggctacattttagctaaggaagcgaaggcgcagacagagactagcttgcccaaagcaaacagccaatcagtggaggagctggcagcgcaacccagatgtccaggattatctcattcagtg

SEQ ID NO: 99589 - DNA, 259 bp, Homo sapiens
taatcatggaggtattttacgcttggtaaaatgaagtgtcggaacaatcaagtgtgtattttggacaaaaactttccttctcctgagaaaacagggtgtttgctttgcttggtcccagtactaaaagatgcctgtcttcattaatctaattcatcagataattgctcaactctttgttttccagctgtaaagggagaaggatgaaagaaataacctaaccatgacagttaatattttgtgatagcagaggtcgacgcgg

SEQ ID NO: 99590 - DNA, 1004 bp, Homo sapiens
cattttatggaaattagcttagcaatttttttttctcttttaagaatcaaaatatggatttgatactaggaacagaatctgctctttatttcattccttttttgtctcttctgcttcctctgcccctcccccagccacgcagcacgggtgccagtgtgcatgcgtgtgctgggggccaaatgacagaaccccggttgaaagtccgcttgtaaaagcacaagtgagaggcagcatcaggcccctggagggctgtggtcctcggactcggttctttcctgtcccctggccgtcctgtcatccctgtgtgctgcagcatcaccacggcctacttcccaatatccacaaagcttcgcctttgcttttgcactctcttttacatttttttacttctttcctttttcttaagttcggatccaagtttgtcttcttatccatcaccatgctccctgaaagcctttttgagattaagaaattttcttaccaggaggcaactttccgtctgtcctaaagggaagtgggtgctggatttattagatattgggttcctggattaagatgacttcctcacatagcttggagtctgcagtttctcagttagaagtgttctatatttctttttgttccattttagtgcgctgtgctttgtataagtggtctttctatgggcagtttcaccttccatgaaggcttataactcaaccactactacccattcagaagagcagaaagcatctgctgtgtgagcgttcatatgttacctaatgtgtattttgctgtcgtctcagctgatagatgtcagtgagtctttctgactaggtttattggtgttgataagaaattaaaaaaaggattcataacgtggtgattgtgtctatcatgtatattttaaatttctgaacgtactttcatttagctgtttttctttgctttctaaagatgtataacaatcatgtatatgtattatattgaagaataaacatggaccttatttatcttttgattaa

SEQ ID NO: 99591 - DNA, 918 bp, Homo sapiens
gtagtcctcaggcggagcccaggttggggatgtcatggcacatgcagcttccacttctgtcccactgtttccctgaggctctctggctcacacattccaaagagagttgaagaacctctggatacagtttaaagagcaagatttcaatctgacatcctcaatctacacttaaggggcaaaccataaacccttgagaaaggacgggaacacacccggagaggcataggaggaaaatggcccaaagaaacaccttggctaaaaaatgtcgctgcctctgaagtccttaaagtgattcactgtctcttcacgtgctgaatctgagagtgctgtaggcgatgaaatatcacctgccatcttacacatgcatcagaaatggacagaaggaggaaagaaaagaaggtgttcacataaaacaagacttcagttgctgtggaggcaggtgagcctcacatagcttctaatttcatgcatcagagtacagaaatcaggttcttttgttcaccttttagaatggatgtcatactaatcacacagctggggacatctttccaattgtgtgacgtctgctccagaatgatggtctacttcaactcggacaaggcaggagagtgacccgccacccggggctccaaacagagccctgccctttcagccacaacatgcagcagcaccaggacctctgggtttgggccctggacacactcagcacctttgtctcagctctcagaccttctctggaccctcctgtcctcgtgtctcacgcagagcctagcacagatgaggcacccactcaatcctgacccaagaagtacatggatacccacgttcacaccacataaacaagggaaaaagttattcaataaacactgatcggccgaaaccctcccctctctcccaccggctcctcgcaccataaac

SEQ ID NO: 99592 - DNA, 1031 bp, Homo sapiens
  misc_feature (22)..(22): n is a, c, g, or t
  misc_feature (25)..(25): n is a, c, g, or t
  misc_feature (28)..(28): n is a, c, g, or t
  misc_feature (31)..(31): n is a, c, g, or t
  misc_feature (37)..(37): n is a, c, g, or t
gactagatgtaacgactctctnatntcnacngctcangttcttttgttcaccttttagaatggatgtcatactaatcacacagctggggacatctttccaattgtgtgacgtctgctccagaatgatggtctacttcaactcggacaaggcaggagagtgacccgccacccggggctccaaacagagccctgccctttcaggtcttcgtacctcccttcacagtatccttctccctcaaacagcctcccagatgagtgtcaagatactaattattctttaagatcaagatcagatgccacctctttcataaagacttcctttattcccaaatgtcagctctgctgcctggcctgcctgcctgtgttcctctcacacagggctccttccaatcaacctcagatggagggcggtcatccaggcatctgtctctcccaagagacctaagatccttgagggcaggaaccacatggagtttatttttgtgtcccaatcctagcacaaagttcgccgtgttaaatatgaatgccatgcttttctcatcgcgaaccatgaggtgacttgggaacagagccatgcacaaaacgagacagaggaagtctaggtctctgacagtgtggtgtgcccaccagccatgccacctctggactctgcagatgagaggaataaacttctctttaagccactattattttgagggtctctgtgacatgcagcctaactcacacactttcctgctacctgtgctctctgccccaattccacagccacaacatgcagcagcaccaggacctctgggtttgggccctggacacactcagcacctttgtctcagctctcagaccttctctggaccctcctgtcctcgtgtctcacgcagagcctagcacagatgaggcacccactcaatcctgacccaagaagtacatggatacccacgttcacaccacataaacaagggaaaaagttattcaataaacactgatcggccgaaaccctcccctctctcccaccggctcctcgcaccataaac

SEQ ID NO: 99593 - DNA, 303 bp, Homo sapiens
ctatatgcatgttacctgctgcctgcagtgctttactgcctctgtactgtgaagaaatctaagctttgatactgggaaagattgcaaccttctgcaccccttaccccacccaaaacgggagcagaagaatgaaaatatttcaagagaagggacttactggaaaattgttaagttacctgaagtcatgattcattcaaataagagcctttctgataaagtagaacccaatagccctaaccagtcaaatccattttcttctcaaacatttcccaggttctgttttgtataagacagtgtgaatac

SEQ ID NO: 99594 - DNA, 756 bp, Homo sapiens
aactgtcaaccgcctgagttggaggagcctatttataaggagcgttgtcatgtgtcttcgggggagccaggaccgtccgaggggttggctggcccttcacaatgtgaccccgctcccatgggctccctctttcctcctgcacagccctggggtgcaggagtccctctggaaggcaacagcttccagcgactcaaaggcctgcaaggtcatgtgaacccagcatcacaggtctacccacagaaccagcaattttatcagtagtattatttatcctctgcaaaaagagacactgaaaacaaagttccctttctcaaggaactctgatgagaactttaaaaatatatttgaccttggaggattcattgttttggaagccatggagacctgcctcatgcaacccgaaaaaaggattgcatctgtgatgtgtgggacaggcacgaggggcctctacaaccaatttaccctgtgtcttgacttctctgagagttgcattgggttcaacagtgatcccatttcctcccaaagggccactgggagatcaggcagtatcaaacttatatccaaaaagctctatacagtttcaaggtgtttccaaagcacatcctctgatcctcataccctccagggtggtaggcaccacaaggcatttgcatttgctctgagatgaagatacgaccatagggttgtacccagaaggtctcatgactctggacatccagctctttccaccacactccaacattctcaaagggagaa

SEQ ID NO: 99595 - DNA, 434 bp, Homo sapiens
gaccaactggggacaatgtgtgactcaaaagtgactgtaggaaagtcaaggacatgccaatgtaatgcctacttgcactatacggatatatggagctgtggggacagagcctcagaggctgtccagagccttgggcttggcaactggttctgccacttcctcaatgcatgaggctgcgcgagcacctgcatcttcacctgtagaatggggatgacattggccccacctcacagtgtctgtgtcagggtcactgagtgagcacatgacaagcacttacgatggtgcttggcagagagtacaggctcaaagcagcttagctgctatgactggtattacgtaactcttggagcctctgtttccctcctgtggaacagctgaggtgctggctttaaaacctgtccacaaagtctttgatgctgctcccattcagtggt

SEQ ID NO: 99596 - DNA, 288 bp, Homo sapiens
tccctacatggcacccgacccatctgtgaccccatcatatacagatgcacgtggaatttcctgtaaatgtcgattataatgcaacttgatcaaacaagccactggaaggaaaacactgtgtcttacctccctacatacctaaagccacctcaccagagataaaacatagcattccaatacctcacgcacatgggtaaaactagtcttgtgttcctgtcacctctaatggctggactctgctcacccttcggagcccagatcaaacactccctccttaaagaagtcttc

SEQ ID NO: 99597 - DNA, 411 bp, Homo sapiens
ctccagtcccagccccacaaggcctgtcctgggtggacacgccgagtgtgagaggttccagttagttcctctgcccagtcccagccaggacaggctctgcctctggccagtttgaaagagcaggctcggctgggtgcggtggctcacgcctgtaatcccagcactttgggaggctgaggcgggtggatcacgaggtcaggagttcgagaccatcctggctaacacggtgaaaccccgtctctactaaaaatacaaaaaaaattagccgggcgcggtggtgggcgcctgtagtcccagctactcgggaggctgaggcaggagaatggcgtgaacctgggaggcggagcttgcagtgagccgagatagcgccattgcactctagcctgggtgacagagcgagactacgcctca

SEQ ID NO: 99598 - DNA, 554 bp, Homo sapiens
atgtttctctgccacggctccaggtggtccttccgttcggggtccctgacttcccacaacaaactcccaagaaatcctatgcactcaagataccttttagggtttccaatggtgtatggtttcaaaactgctgttccctctgtacttacttcctgttgaattaaagtgtctttgagaggcaagagagtatgatgtttgttcctagcctaccagcctatcaggctggcatgatagatacactctatgaggctgacatgcccttacttgattcttttgtccagtgaaaatatctataaccagcatccaagagggatactgttggtgaaacctgcttagccgaggactggctgtgtgtgtgcctccagaccaatcatatgtttgttttgagatacattttttggaggaaggtaatacacacatgccatgtattttctttttgtttcatactttttcttctttaatttcctggtatccattggttctctccaggcaattggtggcatgttagccacagtggacactgcacaggagagcaaggggtgggggattagggt

SEQ ID NO: 99599 - DNA, 286 bp, Homo sapiens
ggtaggctaacaaggggactaatacacttacccaggactcagtctttttctgaggtgaaaaaaattgagtatgtgtatgaattcctactaaacatttctctaagagtcaagaatgttcatcctgtctccattcgaatgacttttttttttttaatgatcttggaggcataaagtcaagctccttggagttttggcatatagttttccagtatttattggaaaatatgggcatgtggggaattttgagtatttctcttaataaaatgcccccagaatgaaaatgtca

SEQ ID NO: 99600 - DNA, 305 bp, Homo sapiens
tctagatctcacttcaacaaacagtgaagaaggagtgtggtagaggagagaagaaaacaaaaggatgacagagctaagaaggacagaaatgaaaagagcattcgttcagtctgttctctcattatcgtacctcggaaccttggaagattcttttttgagaattcttttcattatgatgctaggaaaatgatagactggaaaagccagaaattctgaaattctataaaacatgatctcatcaataatgtataccttccctacaacttgcagaaaataacatattaaaatgtccaattttaaagagg

SEQ ID NO: 99601 - DNA, 515 bp, Homo sapiens
caggtgaggaagctgaggctccaagacactaggcaacttacctaagcgtcacagctcagaaacagaagcagatttggaggccagatctgggaggccacaaggctgggtccttggcacagcctctacctcctctccaggtcatctcctgcaacccctccctgacccagccactgtccagtcaccacggtgcccatggtcacctggcacacctggctgtgtcctacattaatgcatatcctcacgcttctgcttctcctgcctggaacgcacctacctatcacctaatgaacttctactcagcccagaaagctctgctctcaagttatctccttcaggagacagaccttcaccccggggcccccttccataagagaaaaacgatcccctttggctgggcatggtggctcacgcctgtaatcctaacactttgggaggccaaggcgggtggatcacttgaggtcaggagtttgagaccagcctggccaacgtggtgaaaccccgtctctactaaaaat

SEQ ID NO: 99602 - DNA, 1192 bp, Homo sapiens
atgtgactaaacataggtcatttttgataaatgaatactaacaatttcacaacataattgacaagctgattacatcagtaatttataagaaaattatacaatcaagttcatagattcaaccaaagaagtagaaataagggaaattaagacaaaactatactacatcagtatcactgccttaagtaattcacagcacaacctaatgtgggcccatgaagagtaattcaaagaagtgtgggccttacttgaaacttcagagatgttgatcatgaatttggcttcttttgatgagaaatggccaagactgttgacccatgcacacatgttggtatttacagttgtttcatggacactggccagtctacaagcagagcactctcatggggagcaccagatgagttccagccgcagttcttttataagctttaagtgcctcatgaagacgcgaggatctcttccaagtgcaacctggtcacatcagggcacattcagcagcagaagtctgtttccagtatagtccttggtatggctaaattccactgtccctttctcagcagtcaataatccatgataaattctgtacaacactgtagtcaataacagcagcaccagacagcatattaattcttttaccataaatttgtgtgtaattataatgttctatgtgtggtgttatcaaaagaatcactgtgtctctaaatatcatatatgtatgtctggataaatacattgctgtacaacatctccaacatgcaggtcatgctctaggacttggggatatagagtaatacatgtttcgtggccaataataaaagtgacaattgtcttcctaacaaaaaataaacatgagaaataggaattaatcagcagtctcaaggctcccaaatgccttagtgatattatttatccctctatttatattacggtctttttcttccctcacatgctcaatacatgagacacgctattgctgttgaattcataggaatgcataaatagactttcttccactcagactgaatatgactccctaaggattttgttggagtgtagtaatgaatgctggttgctaggtagtagaaactgacactgcagcaggcaaccaagtgcaatggtgaaattgctgcttaaaccctgcttatcaaaaagattcacagtgccgattaacttaggtagtctacagagcatcatt

SEQ ID NO: 99603 - DNA, 1015 bp, Homo sapiens
caatgtccagaaaaagagcaggcctaacggcatctttttagcaagtttcctggcagtaaagtgaaaaaggatgaatgacagcaacttagtttacttgcagcttcctgtaaatttagtcatctgaacaagaggggactgaactgtttcaaaacagaaagcaattgtttcatggacactggccagtctacaagcagagcactctcatggggagcaccagatgagttccagccgcagttcttttataagctttaagtgcctcatgaagacgcgaggatctcttccaagtgcaacctggtcacatcagggcacattcagcagcagaagtctgtttccagtatagtccttggtatggctaaattccactgtccctttctcagcagtcaataatccatgataaattctgtacaacactgtagtcaataacagcagcaccagacagcatattaattcttttaccataaatttgtgtgtaattataatgttctatgtgtggtgttatcaaaagaatcactgtgtctctaaatatcatatatgtatgtctggataaatacattgctgtacaacatctccaacatgcaggtcatgctctaggacttggggatatagagtaatacatgtttcgtggccaataataaaagtgacaattgtcttcctaacaaaaaataaacatgagaaataggaattaatcagcagtctcaaggctcccaaatgccttagtgatattatttatccctctatttatattacggtctttttcttccctcacatgctcaatacatgagacacgctattgctgttgaattcataggaatgcataaatagactttcttccactcagactgaatatgactccctaaggattttgttggagtgtagtaatgaatgctggttgctaggtagtagaaactgacactgcagcaggcaaccaagtgcaatggtgaaattgctgcttaaaccctgcttatcaaaaagattcacagtgccgattaacttaggtagtctacagagcatcatt

SEQ ID NO: 99604 - DNA, 1085 bp, Homo sapiens
ttgtgctagatgcttcctgccctcaaacattggagtccaacttcttcagttttggaactcagactggctctccttactcctcagcctgcagatggcctattgtgggaccttgtgattgttgtcttgctctgccatgctggagtacaatggcaatcatggcttaactcagcctcaacttcctggacacaactgatcctcctgcctcaacctcccaagtagctggaactacagttgtttcatggacactggccagtctacaagcagagcactctcatggggagcaccagatgagttccagccgcagttcttttataagctttaagtgcctcatgaagacgcgaggatctcttccaagtgcaacctggtcacatcagggcacattcagcagcagaagtctgtttccagtatagtccttggtatggctaaattccactgtccctttctcagcagtcaataatccatgataaattctgtacaacactgtagtcaataacagcagcaccagacagcatattaattcttttaccataaatttgtgtgtaattataatgttctatgtgtggtgttatcaaaagaatcactgtgtctctaaatatcatatatgtatgtctggataaatacattgctgtacaacatctccaacatgcaggtcatgctctaggacttggggatatagagtaatacatgtttcgtggccaataataaaagtgacaattgtcttcctaacaaaaaataaacatgagaaataggaattaatcagcagtctcaaggctcccaaatgccttagtgatattatttatccctctatttatattacggtctttttcttccctcacatgctcaatacatgagacacgctattgctgttgaattcataggaatgcataaatagactttcttccactcagactgaatatgactccctaaggattttgttggagtgtagtaatgaatgctggttgctaggtagtagaaactgacactgcagcaggcaaccaagtgcaatggtgaaattgctgcttaaaccctgcttatcaaaaagattcacagtgccgattaacttaggtagtctacagagcatcatt

SEQ ID NO: 99605 - DNA, 908 bp, Homo sapiens
gccactgcacccggccatggttttatattaaaaataataaaaatacggtgaatttctggttgaaatggggaaaggcctgtgatctccgttttcccagtgcttagcgctgactcagagaccctgagtgggacacacgactgcatggagtacagttgggaaacaactgggctagtctgggcctcctgagtctcagaggggagcagggggaagagctctgggcaagtcactgggctgaaccctggccagcccagtgtatgaccctgggtatttcaggtcatggggtgtgagtcctacctcgtgcctcttatcctcctaggtgtggatgtggaggcagccaagcgggcagaagaggaattgctccttcatgacacgaggtgctggctgaatgggggcgccatgccagaggcccggcacccccgcacaggcgcctctgccctgcacgtggctgctgccaagggctacattgaggtgatgaggttgctccttcaggctggctacgacccagagctccgggacggggacggctggactcccctgcacgcagcggcacactggggcgtggaggatgcctgccgcctgctggccgagcatggcgggggcatggactcactgacccatgcggggcagcgtccctgtgacctggccgatgaggaagtactgagcctgttggaggaactggcccggaaacaggaggaccttcggaaccaaaaagaagcttcccagagccggggccaggagccccaagcgccctctagcagcaaacacagaaggagctctgtgtgtcgtctgagcagtcgcgagaagatttccctccaggacttgtccaaggagcgccggcctggtggggctggggggcccccatccaggacgaggatgagggggaagaaggtcccaccggtgaggggcct

SEQ ID NO: 99606 - DNA, 896 bp, Homo sapiens
gcccgcgccgtgctggactccaccaacgccgacggtatcagcgccctgcaccaggcctgcattgatgagaacctggaggtggtgcgcttcttggtggagcagggcgccactgtgaaccaggcagacaacgagggctggacgccactgcacgtggccgcctcctgtggctacctagatatcgccaggtacctcctgagccacggggccaacatcgccgccgtcaacagtgacggggacctgcccctggacctggccgagtcggacgccatggaggggctgctgaaggcggagatcgcccgccgaggtgtggatgtggaggcagccaagcgggcagaagaggaattgctccttcatgacacgaggtgctggctgaatgggggcgccatgccagaggcccggcacccccgcacaggcgcctctgccctgcacgtggctgctgccaagggctacattgaggtgatgaggttgctccttcaggctggctacgacccagagctccgggacggggacggctggactcccctgcacgcagcggcacactggggcgtggaggatgcctgccgcctgctggccgagcatggcgggggcatggactcactgacccatgcggggcagcgtccctgtgacctggccgatgaggaagtactgagcctgttggaggaactggcccggaaacaggaggaccttcggaaccaaaaagaagcttcccagagccggggccaggagccccaagcgccctctagcagcaaacacagaaggagctctgtgtgtcgtctgagcagtcgcgagaagatttccctccaggacttgtccaaggagcgccggcctggtggggctggggggcccccatccaggacgaggatgagggggaagaaggtcccaccggtgaggggcct

SEQ ID NO: 99607 - DNA, 380 bp, Homo sapiens
ttggccattggttattagctttaccttcagcccctctttcctccctggatgttgggggctggggctcaaaatttcaattctttaatcacaggctggttcccctggcaaccagcccccatcctggataatatccaggatgcccccatatccaggaacccacagccatgctagtaatctcactaggacacaaaaatacacttataactttagagatttcaagggttttaaaagctatgcaccaagaaatgactgcaaagaccgtaaatatatttattattgtgtcatatcaggttactttaagcttgtccattctgttttttcatcttctcaaaatatgtgccagaacattgtttgtttatatgccattaatattgatactt

SEQ ID NO: 99608 - DNA, 752 bp, Homo sapiens
tgcgactatgcctgcgggagggcgagggcgtcctttggaggcggttccctctcacgccgccgccctctggctcctgggcctgccgggtctcggcgatgggcgagggctgtgcccggtgcctgcggctccctccgcgccgtggacccccgcggcctcccggccttccttaccccggcggcctggcggccccgcgagcttcacctccccagcatccgaatcgcgcagctcctcccgcgagcgcccgccgccttcgctccccaggccccagctgagaccgccaggaaggcgggctcctcgaccccagatcataagaggtgtctgggaactaagggtgggagggggccagggtagaaaatgtcagttcaagtacgttaaaattaagaacttaggctttgtttaaaaaacaataaatgaagtgaaaaaaacaagccacagagtaaaagaagatacttgcagcaagtgataaaggattagtatccaggatatataaagactgttattgagtcaatgtgaaagagaaaaacacctgaagcaaagaatggatgccggcattaaataggcacttcaaagaggaaccatgaacgaccaaaatcaagtgagtaggtgaccagttcccattagtaattaggaaatagcaaattaagaccacaaagagggcagtgagggtggctcacacacctctaatctcagcgcttgggagtccagggccagaggatcccttgaggccaggaggtggagtctagcctgggaaa

SEQ ID NO: 99609 - DNA, 450 bp, Homo sapiens
gtgggggtaagcaaggcaagcatttctccataccattgtctgtgatctataaatagcacaagtgattagggtggggttaatctttagcctacaggcctggccagtggccccgatcagtctgttatttttcagttcttacttcctccttttctttggagacaggagacagtaagagaaatggcctctctcctcacatttagtgggagaatagcatctctaaaccatcaaattaatatctatctcctaaacagctttcaaaaagcacatgactttgccagttgcagtgtctgatgtctgtaatcctggctctttgggaggcctaggcgagaagatcacttgggcgcaggagttggaaaccagcctgggtaacgtcagaggcgttcaaaccagagtgaccccatcttgaataaagcctgggtaaaatgaacctgacacctattggactccatt

SEQ ID NO: 99610 - DNA, 619 bp, Homo sapiens
cgtgacagaagcacgactagagctctacaaagaaagatgcatttagctgagtgtcaaaaaatgaagaggagcctatggggatagaattgtggttgaaggaggtcatagttggtttaggaaacaggtcaagtgaaaagagggctggacagaacgcttgaaaagaataccttttaagggacgatggaaggagagcaagtgaagataactaaatggaagcagaggccaaagaataccaggagtgaatggtgtatcagaaatcttaaaagggaagttttgagatggagaagtgggaagaggcatcaactgctacagaaaagctacatgctttctaagatctctttctgctaaaacaaatttctttgattccttaagaatataaaaatccacaaagaaacaaactaccctttccattaaaggcaaatattttctatctctttacattttttttgaagctaaatcctaaagaaaaagttccagagcactagttcagaaacttgagctcagtttttatattaacttactgtatgcatgacatttattctcagtaagtgggagtttgcaaggattgttaactcctctaagagagggattctatggataatacaactggacagctagg

SEQ ID NO: 99611 - DNA, 121 bp, Homo sapiens
gacctggctgtgctgttggctgttcttgcacactcaaggtggttttgccattggcttcctccctcagcctgcctctgggattatgccactgctattcttttttatctaccatcagcacaat

SEQ ID NO: 99612 - DNA, 96 bp, Homo sapiens
ggctgtacacactaacacctgtacacatgtgcatgtattcatgggttagcctaatagaaaagagtatttactcactatgcttgctagtagatattg

SEQ ID NO: 99613 - DNA, 379 bp, Homo sapiens
taaagaggctatggagcccttagctcagagaacaactatcaacatatctacagaaaaatgcacataaattgaacaatctctctacccttcttacaaacattcttccataacaaacttctgaaatagaacaagggaaatgcagaagagtagtcttttatttataaaatggtgctacaattaaaatacttacttggaagaatttctaacctgctcagtcattgtaaacttctatgagtccactttcaaactctgaggatccgcaatcaccacaatatctaacaggtaactctaaggtttagtccctcccttatttttatttgaagttttcctccttaacctttttctgaagtgaaaaaaggaattcaagtcagatagaacc

SEQ ID NO: 99614 - DNA, 342 bp, Homo sapiens
gtgccatatagctctctctaacctgggattcctgggctcaagcagtcctcttgccttagtctcctaagtggctaggaaggactacgggcctgtcccaccacacctggctaattttttcatttttgtgtgtgggcgtgggggcagtcttgcccaggctggtctggaactcctggcctcaagtgatcctcctccgtcaagatatgttaatataatttaagcctacttcataacaactttttctagaaatatatctactggtgcatgtttcaaagagagattttagtatttggatagttgttcaccacaagtctaaaactcacaggttaaatttattgtttactg

SEQ ID NO: 99615 - DNA, 769 bp, Homo sapiens
tcctatgtctgtctgtgtgtctcttacaaggacacttgttattggatttagggcccacctggatgatcccagatggcctgggtgggtcttaaatatctcctcatcttgaagtccttgagatacctcctcatcttgaagtccttgagttatctcctcatcttgaggtccttgagatatctcctcatctcgaggtcctcaagctatctcttcatcttgaggtccttgagatacctcctcatcttaaggtccttgagttatttcctcatctcgaggtccttgagataactcctcattttgaggtccttgagatacttcctcatcttgaggtccttgagctagctcctcatctcgaggtccttgagctatctcatctcaaggtccttgagctagctccttatcctggggtccttgagctacctcctcgtctcaaggtccttgagatatctcctcattttgaggtccttgagctatgtcctcatctcaaggtccctgagacatcgccccatctcaagatccttaccttacatcttacaaagtcgttttctccaaaaaatgttcacaggtcaccttcacagcttccagggatttgacctggatacatctttagagggggccagacccattccagacagtaaacaaatagacaaaacgctggcacattgtaataaatgtcacagatgaaacaaacccagggatcaaggggaagaagaagaggagggcatgctttctggagggtggtcaaggaaagctgagagctgcaggaggagga

SEQ ID NO: 99616 - DNA, 468 bp, Homo sapiens
cagcttataccgtccggtcggtattacacgcttgatccatctctgtcctattatacaatgccagtcttctaaaatgagaatgtaatttttaatatttggaaaatgatgtctggagcatactcactgatgtctggagcatattactgatggaagtgtaaactaatacaacttttctagaaagcaatttggcacacttaccaaaacctttcaaaaactcacagccttttctctagtaaatcccttttgatgtgcatatttctttctcccactatcatcaccatcaaaagaatccaacaaatttgaaatcatcaaggatttataactggccttaagatagtagcctggacttttccctgcacctcattatatactcaaggtagcattctattctcacatggagctttacaatacatgcttttaaataaagatgctctggccgggcgcagtggctcacacctgtaatcccag

SEQ ID NO: 99617 - DNA, 775 bp, Homo sapiens
aataaatgaaataaatagtaaagaagtaatactgttgctggtgaatagaatgcattgtcgcatattatatgtggatcttctgtttatcatcttgctaaactctctcctttatatattcagtcttctaggagaggattcatacaatcacaaaataattacagttttatttcctccctttcaggcctttgacttgaatttgttttccttgtattggccgaaatatatggaatagacatggtgatcttggtcttcttcctgattttaaaggatactaattattttaatggaatttatatgggcctcatgaaatgagttgggaagtaatctttttttctctactctctaggaaaatctataaaattagaatgacatttttcaaaaaagttgacttgcctgtgaaactaactgggcttggtgttttctttgtaggaaaggagcccatttctgacattcatcatactgtttagcaagccactaattttacaaatgaaaccgatttatgacattcattttgctgctaaaaccccactcctattgatcaacgtatgtacagtgaagcctttgtggtagctgactctgctgtgcagccttaaggtgaaatgttagctgaccactcttgaagagcaagttcctgattaaagacattgacttccctgaagtgtatcttaaatgaacatacacacacacacatatgcaggcatgcctacatacatcacattatccttgccaaagtatcttaaagaaagttacagtattttaaagtaaattgatctcc

SEQ ID NO: 99618 - DNA, 354 bp, Homo sapiens
tgatatacacctataccatgagctatactactatacacgatataccacaatctagtaattgcttatatagtataattgcagtggtagaatcctagcttttctacttgctgattgtattaccatgcccaatttaacctctccatgtctcacttttttcccatatgtacagtgagaataattataatctttatcctgaggagttgttatgaggattgaatgaggtaattcatgtttccttgggaatgccccacagagttaattgatattattatcattgttctgttttttactattttagaggtgctttggaatcatagaaggaatgtatggctttattaggaagggttgtattag

SEQ ID NO: 99619 - DNA, 653 bp, Homo sapiens
ggctgtgtttgccatacacagagtcattcatattaagtatcttcctaaaggatatcctctaccggccctgtgaggctgggttttatagccccgcttatcagaagggaacgctgggctcttctggacaagaacagtaggcccaggatatatttggagatagactggaccagatgtaggtgggtgagggcaactgggaagaatcaaggatgacttttgcgtctcctccagagggagcagcagggagatggaggagctgatgtaggctgactgcctcttggtgatcccaggtgatcttatttgtatatatgtatatataaaccatggagtagatgacgtggtacagactggatgcagtattaggtgtggagattatgtatgcagcgattaggtgtggaggctctggagcctgaccaccagggtcaaatgtagccatgtgattttggaccacttctctaatctccccatgcctccgtttccccacctcaaacttggagatggcaatcctaagtttgccagccttctctaacactcactacgtgctaggagccattctacacacttagtgacaccatctcatacaatcattaaacgatgccatggaagagtggggatgaggatgctttcatggttgtatggcgtctcatcctcccgct

SEQ ID NO: 99620 - DNA, 440 bp, Homo sapiens
ccatacaaagaacacttgaggcatttcattcttgcaaacgcagctgagacagggccggcagtacacacctttcaatgaatagaaactttaaaatgtactctgctagtgaatttgcgtgtttggaataaagtcagttggggcttggtaaaggagaaaaaaattgttgcattgataggatctgtagattttgttataaaagacagatatgtaaatgaaagtacattctgagaatctgatccatgctgaaactgagtaataaaaccagaactgtattgtttccaaagtctagttcagtgattcttctccacttcaagtggctacaaaccagaaaatctaattaacgatgggaggtgggagggatgagactgaagatttacaggagataaagatttatgaaaactcaatattcaggataaagaaagggggatagaatagctctt

SEQ ID NO: 99621 - DNA, 1011 bp, Homo sapiens
tagcttcactcaccctcagctctgccatccaggtggtttacctggtgggtttctggttactatgtccttcttgggccatggctgctgctcctgcctccatttaccatcaaaattgggcaaagtgataccaagagatgtaccagtcaatcaccaggacctccaaacccacaaatcccagggttgcagggataagaagcacaaataacacaagtggatcactgtgagcgatggtccacgctgcttttatgagctgtaacactcactgcgaagatctgcagcttcactcctgagcccagcgagaccatgagcccaccgggaggaaggaacaactccagacatgctgccttaagagctgtaacactcactgcgaaggtctgcagcttcactcctgagccagtgagaccacgaacccgccacaaggaagaaactctgaacacatcatctgaacatcagaaggaacaaactccagacgcgccaccttaacagctgtaacactcaccgcgagggtccgcggcttcattcttgaagtcagtgagaccaagaacccaccaattccggacacaccaggaccttccgctgctcgctcctcctcgtcccttctacccgctggggtcagcctcatcgaccccgtctcaactctgacacagtctctctctctctctctctctatatatatatatatatatatttttttttagatggagtctcgctttgctccccaggctggagtgcagtggtgcaatctctgctcactgcaagctccacctcctggtttcacgccattctcctgcctcagcgtcccaagtagctgggactacaggcgcccgccaccacaccctgctaattttttgtatttttagtagagacggggtttcaccgtgttagccaggatggtctcaacctcctgaccttgtgatccgcccgcctgggcctcccaaagtgctgggattacaggcatgagtcactgtgcccggccagggcagatattcttgtagaattttgtttcttgct

SEQ ID NO: 99622 - DNA, 277 bp, Homo sapiens
aggtgaaagaataataactagattgtgattatactacaagcaatgctacaaggtttagggagaaagattgagcacatctgggacaatgcagggaggctttgtgctagaggtaggcctgagccttgacgtagaggtagaatttcagccaggagaaggcattctaagcaaaagaaaccaggtaagcagagagaggtacggaggcaggaggctacgaggcagttcaggaaatagtggaaggtttggtgtggctggaacagagggtatggataggagaaag

SEQ ID NO: 99623 - DNA, 296 bp, Homo sapiens
gcatgcgccaccacactcagataattttgtatttttagtagagacgggttttctccatgttggtcaggctggtctcaaactcccgacatcaggtgttccgcccacctcggcctcccaaagtgctgggattacaggcacgagccaacgtgcccggccacacttacttctgtataagaatgaaaatcaccctgttaagtccctagcacaatgcctagcacataaaaaatatccaacaagtggtagccattattataatttctaaatgacagcctgatgcagtcagtgtaacatgaggc

SEQ ID NO: 99624 - DNA, 268 bp, Homo sapiens
gtaggggtgttgggttcatagactgagcttgaaaggaccttttgagaccatttgttccaagctattgttttacagatgaggaaactgaggcttagagcacagaagtgaccaacccaaggtttcaaagtgagttgaggacagagctgggctcacatccaggtctctgaattcccagtgtaggtctctgtgtttcgcaccagcctcccctaggtctaggggatatggtttcttgggaaagagacctcccagccccacactgctgtttcca

SEQ ID NO: 99625 - DNA, 176 bp, Homo sapiens
gaggggccgattaggagcatcggctctcgcgactatggaggtggagggcccccagcaggctttctgcgaggtggagacccaggaacgggggtgacagggcttggccccagtcccaaagcctcagaaccagggaagcaatggtgtgatcttcagtctaaggccaaaggcctgagaac

SEQ ID NO: 99626 - DNA, 436 bp, Homo sapiens
  misc_feature (436)..(436): n is a, c, g, or t
ccgcgtgtccgagtgcagcggatgagcatcctgcgagtgcctcactgtgtctgccctggaggtggctgtttaggggagcacgccggaggccactagggtggatgtgctgtgtgcatgcaagtgcccaccctacgttgtgtttcggggcacacaagctacctgtgcctaccgggatgagcatgcaagtgtcaccgctcccgccgggcgtgcttggggtgtgcttgggtctgcgtgaggctgtgtgtgtactgccgaatctctgaccaggagagccctgtttagcttacatagtgcacggggaagggcagactgaggggcctgtccgtgccctggtgagctgagagaggggcacggggaagggcagtcgtcggggcctgtccgtgtgccagcgtgggtggactccgggctggggaagcgacagggaatggtgtgtgcn

SEQ ID NO: 99627 - DNA, 448 bp, Homo sapiens
ggaggtgatgaggtcatgtaggggccttcacagatgggatgagggcccataacagagactggagggagcgcaggtgcctctccagccagacaaggatgtgagaaagtgccaactatgaagagcaggccctcacaagaccccgatcctgttggcacctggatcttggacttcccagcttctaactaagaaatacatttctgcggtttatacgttccccagtctaaggcatctttgtcacagcagcccaaacaaagtaagacactttatgcattagccatagccaggcacgggcactggagacccattagctagacctttcacagacgtgtggcttttgcctcactgcgccctggaaggggctgaggtcagacaggcaatacagaggcagactccatccacatgggcatcacggcgccaggcaactcttccacctctgggctgcagccag

SEQ ID NO: 99628 - DNA, 124 bp, Homo sapiens
tgttcaattcccacctatgagtgagaacatgcggtgtttggttttttgtccttgtgatagtttgccgagaatgatggtttttagatggagtcttgccctgtcgccacccaggctggagtgcaat

SEQ ID NO: 99629 - DNA, 406 bp, Homo sapiens
acacttcttacatctcattggccataacttagtcgcatggccagtgaggctgggaaacacaattttggttagcagctcaactatacaagggattctgctaattggtagacaaagagaagaaagctacttggtgtcaaactagcagtgtctcccataatgaaggctttgcaagcttccttatcttctgaggctgtataatgggaagattagcaacatatgcaacaaatgggaataaaaagaacacaattacagtaaactatagtaatagtattccattgaattgaaggaaaatgatagatttttccacctcaaaagacacagggatactttctaatgatttaatgtcattcacaggaaaagggtaatataccacatggtactacagaaacactttggctgagcccag

SEQ ID NO: 99630 - DNA, 563 bp, Homo sapiens
taacaagaaaaagccagataaactgcaacattataacttttcttaaacccatctgagaattcagtttggagggtgactaagcagcctgaaatccaagcaaagaccggcccctctgagaagagagaagatccacacattagctcccctttgggcagagcatgggtggtagaaacattgggtaccatattagtaggtaagaagtcaactaaaatttgtaatgatttggtaaaagctgagtatgggctacagtgacagtatagaaaccttgggatcccagacaccagggaagttcacacttagtagtagtttcttctccatggacttctgttgattgctcacaagaaagattgagtcacggagggagaacagaaagttctctagttggttaagaactgaaggatggaggaaattggtccctgccacaggagactcctcccctatggaaccaaagccatgagctattgaaggagaagcggccaactgagaggtagcaccacattgagggagcaccacagggagctgggggaaaggtcaaagacaacattctttctatgccagggaaa

SEQ ID NO: 99631 - DNA, 357 bp, Homo sapiens
gtgcctggaggggtgtagggtggggggcaaccaggttcttggagcaacttgaggggaaggagaagaggaggaggagaaggtgccaaaagcaactttaacttgtcgtttctgagagttggcatcttttttaaaagtcaagttatatttcacattttgtccttgagctgtcctttggctagggaaccccatcactttgtcatgtgagtttgttacgttttgtgtttgtaacagccgcttttgtttttcttaggatggtgctttctcagttccagaagtttcagagaggccctcctcagtgtttggaaattgcttctgggtatattgggcctctgcttccctagggggccaaatagcagc

SEQ ID NO: 99632 - DNA, 447 bp, Homo sapiens
agttttgatttgcctaggatagttttagctatatttattgtctagttgtaattactaatagcatctccattcacttccaaaacattctggttgagatgaaaacttacatagtcaccttcacatttgggtgttgttttagtgtttgtgacttctacaaaacactagtgtcattcttaaatctacttttgttactagctatcatgggatttgttaaggagtgatactgcggccttatgaagtttttgatataaaattaaaatactactttaaaaatttctgttactgtattgctgttagaataagaactaaattttgtatgatccttgaagaaaataagttatggaaaaatatgtaaatcagtggatgtttttgtcctccagtagtcttatttgcttataggatttaattcatgttcttcattagtttgctcctaccgcagctgtggta

SEQ ID NO: 99633 - DNA, 268 bp, Homo sapiens
tatcttactatatttgataatttatttcattcataaattatatcgcagagggagtttttatttattactgaaagataggcgagatcaagcaacatgaccaaggccagcaaattgataaggagagaaattattgcatttgaaatccaccttctaactctacaccctagcttcttaccaaaagaaatcaagataaacccctgaaagttaagcttccttgtaagggtcactcataggaaagtttgcaatttgcaggatgagtccactatag

SEQ ID NO: 99634 - DNA, 331 bp, Homo sapiens
gcattagggaagagggacaattcatagacaaagaacgtataaagaaaaacaggctgggcgcggtggctcacacctgcaatcccagcactttgggaagccaaggtgggcagattacgatgtcaggagttcgagaccagcctggccaacatggtgaaaccccgtctctactaaaaataaaaaaattagccaggtgtggcggcgggcgcctgtaatcccagctacttgggaggctgaggcaggagaatcgcttgaaaccagagggcagaggttgcagtgagctgacatcatgccactgcgctccagcctgggcaaacgagtgaaactccgtctc

SEQ ID NO: 99635 - DNA, 498 bp, Homo sapiens
gcagcagctgctgatttagagcacaaggtgaaggctcttcctgcctaatgacacatactcttgcataaatttttcctaggagaaaaggcactaattgtttgttccaatgattaacagaaagcttgtgacatttctcagattcatgagacccagatgagtcgaagctctgcctggtacccgactacagttgaatcactaaatgtttcaagtctcaatttcttcacctagaaaatgaagataaatacctgtctttcttaactcacagggttttttgtctggatcaaatggttaaactgttttatggtgaagcggctttatacattgtaaagtgatctgtaaatgttcaaatattattatccttgtgcgccgaatatttgttaatcagcactgcgcttagacttgtgagggacttgtgagcatgagatttggcccttggtgaccttgatgtactttgaaaattgtggggaaatacacataacagaaaatgtatcattttaa

SEQ ID NO: 99636 - DNA, 372 bp, Homo sapiens
tgcacatttcttataccccgtgcagagccatactgttttccatccttccagtgatgccaaggttcttcccagccttccagccctagagatgtcaggaagtaacacagtaaccctttttcccctctctgtcatgctggtgtgaacaagacctggtccctcctttcacattgctccctgtcttgtggaacacatcaagagtgctctagaaacacaggcaaccactaggctttgggtttccctagggaaatggaaaaggagataaggagagattccatggagctcaaacctgtttttctgtcctgcccagtcccatgtttattgcagtattattcatgatagccaagatgtaacaacctacatgtccatcaacag

SEQ ID NO: 99637 - DNA, 500 bp, Homo sapiens
cacctctggtctctttccctatctttcccagacaaccctgctcttgtcttatctgagtcaggcacctggccctctattcttggctggctttcctcaactcctctttctgtcctcattttttacattttccatccttcagcttttctcattcctctgctgccatcttccctagcctttctgggttatatttgcctcctttgcaaatataatacaggtccaggtctggagttccagccccaccctattccacacatcctcagctcctcgccctcaatctcggtatctttgagtcattttgaaaagcttgggatttcagaagggaacaggggctgggttgtgtattaaaggtcaggaaggtggacagagtggaaggctggggtttggaaaaagacctttggtgtgcgtgcactcccatatttgtctgtcattatcattattcctcatcttattattttcattttattaataaaaaactacgttgatgatcattaaaaaatatt

SEQ ID NO: 99638 - DNA, 433 bp, Homo sapiens
taacaagagcatgtacgtgtattgcctgttaagattaaaacaaaatttaaacaaagcagcagctatattttgttcatgttggttgtccatgtgtgtggcacatttcatggattctgtccttcctgtgttactattaccttcatgttctcaccatctccacaaggctttgccctgactaccttatttaaaattacaacagcccccaccctgacattccctgacctttttatcctaatatacctcttcttttcttttcatatcacttactgccttacaacatatataatttatttacttatccagttgatttttactttgtgtctctccattcccctctagagtggaagcagtgtggggtccgtatctgtttggttcactgatacatctttggcttccagaacagtgcctagtatacagtaggtgctcaacacgt

SEQ ID NO: 99639 - DNA, 491 bp, Homo sapiens
  misc_feature (483)..(483): n is a, c, g, or t
  misc_feature (485)..(491): n is a, c, g, or t
aatttttactgtttttaaagtacttatataatcagaagtgaagtacctgtacaatcacaagcatttcctgatttttctgatgccatttccctagatatccaaacattttctattataagacaaaagtctacctgggtacatcagaataaactatttaactctatggaatacacttggattttaaaatacaaaactggaaacagatccattggaacaattatggctaagcacaacctattcaggtttaatagaaatattaatacctgttactatgaataagataatcacattacaagtgaaaatagttttaattgaaatattgtagttttgatttggcactgtaattagcatctgtattttaaactttgtgactgctgtgaacattatttatggaaggtttatattaatataatttggtgcttgttgcttttatcaaatattggtgtctaatgaaataaagtgcaaagaacttgaagttctcanannnnnnn

SEQ ID NO: 99640 - DNA, 359 bp, Homo sapiens
tctgttcatcctttctcaggaaagcacctgatagcttttatccaaagatctgctgcaaaatccatttagctacagacaggaaatgcaaaagaaagattcctgtagcaacaacaccttgtaattatgaaatactttccatcacagtgcataacatatagcagatttactacaccaaaattctttgccgttagatcttggggtacagcagtgaaattttctctatctttaaaagaacatgtggtttaaacccctttcaggcattttaaatcctagccaaaggtgcaacaccgtttaccgactctgacaagccactctaaaagtgtgcttgtttgatggggccatatcagataatgtgatag

SEQ ID NO: 99641 - DNA, 282 bp, Homo sapiens
tcccagtaaaatgcatatgttattttaaaatcctaaaataggatggtcgtgatcacacctgtaatcccaacactgagaggctgaggcaggaggaacagttgagtcaggagttcaagaccggcctgggcaacatagcatggcctcctgtctacaaaaaatacaaaaattaacttggtgtggtggtgcatacttttattcccagctactttggaggctgaggcaagatgatcccttgaatctaggaatttcaggttatagtgggctatgactgggccactgctc

SEQ ID NO: 99642 - DNA, 373 bp, Homo sapiens
atgacagtttacaagtgccacggcaacacccggaagttaccctatatggtctaaaagaaggaagaaccctcagttctgggaaatccctgccctttcctggaaaactcatgaataacccatacttcgtttagcatagaatgaagaaataactgtaagtatactcagtcaagcagcccatgccactgctctgcctatggaggagtcattctttattcctttcctattctttttttttttttctttttcgagacagagtcccactctgttgcccaggctggagtgcagtggcacgatcttgactcactgcaacctctgcctcccaggttcaagcaattctcctgcctcagccttccgagtagctggaattacaggt

SEQ ID NO: 99643 - DNA, 720 bp, Homo sapiens
aagaccatgtattgtatgattccacttatgtgaaaagttcagaatcagcaaaccaacagagtcagaaggttgattagtgactacctgaggttggagcagtaggttgagggaaaataagtgagcagaaatggtggaggactgctaatgtgtacagaatttattttggggatgtcaaaaatgttctaaaattaaattgtgatggttgcataactgtgtgaatatactaaaaaccactgaattatacactttaaatgggcgaattttatggtatgcaaaatatatttcaaaaaagctattaaaatacataaaaacattttcagatatgcaagatttcaaaaaattaacctcccacttatcttttcacaataagctacttgcagatgtattctgccaaaagaagtgaataaaccaagcagggggggaaacacagaatctagaaaacaggagttttaacacagaaaagaggcaaagggaatttccagattaatggtgcagaaaagttcccaatgatagttgtgtagcaagcttagagacttacaagtaacagaaggacaaaatgcactaggaggaaatccccgagtagaaaaagaaaaaagaaacaaacagactacctaatgtttgcacatattgcaatgatttttattgttctttcagaaattctgagaatgaattcgtgataggtacctggaaaactaagaaacaaacaaacaatgaggcaac

SEQ ID NO: 99644 - DNA, 480 bp, Homo sapiens
aggtctgatgcaattctgtgggtgctgttgccaggcaggaggaggccatctccacagagacagccgcgagacacacgcgtccgcagtcagggagcgcaggagcaatgtggccccgaggggcacgggctccattggtccaggagaacccattcttctcccaccctcgagaccacccagcaaagccccaaggacacacggctcccctaaggaagggtggccacaggcgggagtgacccagaaacgttacaaaaccaaatgccagaacccacccaatgtttagcaagcctggggatgtgccacgtcccccagggatccagcacgcacccaaggagacactgtcccggcgaggagcctggagcctgggaaatacaaggcatcagactggtcccaagactctccccagcgctggggacaactgtctgcttatcttagtcccctgcgcccttttcaatccaaccctgggtcctgggcacctcatag

SEQ ID NO: 99645 - DNA, 259 bp, Homo sapiens
ttttttgtatgatgtgaaaaaagggttgaaattcattcttttctatatggatagctagctgtttcagcagcatttattgaaacaacaatcttttccctattagattcccttggcacttttgtcaaaagtgacaattgaccatatatgccttaatctatttctggaccctcacttcaattccattggtctacatgtgtatcctctcttgatactgtactctcttgattactgtagctttatagtaactctcaaaatcaag

SEQ ID NO: 99646 - DNA, 260 bp, Homo sapiens
atgtcagtgtatctgttcctggggaatccattttcacccacatatttccttgcacctttccaaagctcttaaaaaactgtccagaaatgagaaggccatttcctaaaagcctggccttctagggaatcatctggaaatctaggaccactataaaataacagcttcaataacagaagcagatctctgacttttttttttttcccagaaaaagaagtgctggtttatccaactgaaaagtgcttattaacaaactgagagca

SEQ ID NO: 99647 - DNA, 738 bp, Homo sapiens
agcgggtcgctcccatgtgcccctgccgggaaatggcggcggctgtgccagtgctcccagtacgcctcaggaattccgtgaagcaccgctgtgcgggaggtgggggccggcaataccacaataccactggcggggacaactgagaaggcaatgaccaggatatcaaggataactggggcgacagtgatgatgtgaaaagaaagaaagagaagtaaaactagaagtaaaggtttcagaaaagatagatcgataaataatcgatcgatagatagataatagatagatgataggcaggtagataaatagataatattatatacatgtatatgtatatgactcgagaaagccaaagagaaattacagcaactggaaaaaaaaaacctttaatttaaaaagatgttaggagaacataaagtgctaacaccaaagaacaattagcaaactcgaccgggactaaactaaagaaattccaggaagagtcagacttcaaaccagccaaaaagacgtttggtgtaatacagtttatggagccaaggctctgaacccactttggagagatggcttcctggattttgaaaagttactaaaaaataaaattacccaatatgaaaagtcactgtatatatgcaagtttggggtatccttagatggagatgtgtgcctttttttagaagttgatgacttgaaaaagattactgatgctctgcagtgacaaaaagaagcaagagaagcaaaaac

SEQ ID NO: 99648 - DNA, 209 bp, Homo sapiens
ctaagcttggaatcaggattccatcctgacttttaaaagtttgacactggatacattatttaacctctctgaacctgtcttgtcatctgtaaaagagaaataataaagccttccctttggaattgtgagggtaaaatgagctagtcgcacaaattaagtactcagtaacaaaagtacttagggattcaggagagaaatttttttttgag

SEQ ID NO: 99649 - DNA, 509 bp, Homo sapiens
cggacaggtgaaagtcagaggctgaaggggagggcaataggagcctccgtaagtagcggggggctcctcgtgatggctgccagtgctttgaggtcaccctgacggtcttgctgaacctttcttcgattttgagctgtagcaagctcctacgggaccttctctccttcactggggctcagcttgcaggggttctagaaatatctccacagatcgctcttcctcccggggcctcagtttcctcatctgcagagtgaggcctattaagccaggtgtactgactttattgttatttatttatttggagacagagtttcactcttgtcaccccggctggagtgcagtggcgccatctcggctcagtgcaacctctgcctcccaggttcaagtgactcttctgtctcagcctcctgagtagctgggattacaggtgccgccaccacacccgggtaatttttgtatttttagtagagacagagtttcaccatattggccaggctggtctcaaactc

SEQ ID NO: 99650 - DNA, 840 bp, Homo sapiens
acaaacatgttttccttctatgtaggcaaaatcaaattaaatttacagtgggatgtttgcttaagaaaaaaaaaacctgacccttacatataaatacaatgattgtcattttttttaataagcatttcagagggttctgttgtgtcaggtgctttttaaaaacagctgttgttgagtctaaatgacgtgcctgctactggctgaacagagaccatccgggtgaccatttctcctcaccaaagccatttattctcagagagtgactctgtacccacctgaacctctttgcaaactctcccctactttgcctcagccttagcaggtgcactcttaaccctttctcttcctcccttttcagcctcctgattaacgttctttattttgttttcccttggaacgatggcactttccctgctcctgtgttaatttctgttcttcttttctgtttccaccgtgccctgcccctgactccttgctgcacagagcttttgtctcctggtgtgcagaggttgtcgtacctgcgcaccagcagcctcagccccacccacagcgactcccgccccaacccccctttccgacaccacttcattccccatatcaaaggtaaggaggcaggtttctccaggcagcaccctgcatagtggagatttattagcaccctgggaaggctaataaggtgtatctccaagagttagtgccgagcttttgagctctcagcatgcctgcgtgtgtcatgactatacccaacagttgtcttagaacgggcatagcatctctcattgggagaaatatgtcacttctaagggctctagatgaagaagcaggaagtatgtttaagac

SEQ ID NO: 99651 - DNA, 310 bp, Homo sapiens
gaaatttgcctcctaatgtgctttacaaatttttccttggagtatttgtaatttgtaattattttcatatgttatattacccatttacatatactggctattaaagtgtcacaaatgtttttcctaatttgattaacatgttatattgttgttaaacagaaattcttcaaattataatttaatagacttttgttttatgctttactgcatatttagaaatattttatattttaatttttacatttaaccataattgtgatttattttagtctataacgtgaggtgaggacctaaccccatcctcagcctt

SEQ ID NO: 99652 - DNA, 438 bp, Homo sapiens
aataaggttagaagctcttctgccctctaatgacccaacttcacctcttgtcacatcccccacttacctgaggcttcagccaaacaagatgtcttcaagttcctccttcaagggctatgctatctctctggagggcaggagtggctctgcccagagagcctcccttccttactctcttccattctacccaactaactcctcctttggggtccaatctgagctgagatataattccctcctagagcccttcctcgacctctcctctgcacactttcataacacggagatttactcctttgtagcctttttcatcattgtgttaaaattgcctgggtattcattaactctttcccgtttcaaaattttgcagaccaaaaagtgttgaatgagtgaatttagtgaaagtgataatgacctaatgtttggcatgagtagctg

SEQ ID NO: 99653 - DNA, 427 bp, Homo sapiens
ttttatgctcccatggcactcattacacactgtgactctgtttttgtatctttgtctcctctaccagaccgtgagcacctagccaagtaggccctcagggtttgtagaatgaatgaatgaatgtttccaccaccccagcagacttatctgctttcatcctgaaagaggtatcaaaccaagattttgtagcttcccccagttagctgctgaagtattatatcatcctcacaagtgagacagtcatccttatgtattaatcacccagcaaattcatgtattatataccgtctgtcatgacactatcgctggttttatttgaacctacttactcctgctaagtctctcacaggaaccttactcattatcactaaacacaacgatcatctcaagtactgtgcaccaggcagagcggaaggccctaggaata

SEQ ID NO: 99654 - DNA, 313 bp, Homo sapiens
taggaatatatactggaaagaagtagacatgaaagaatgaagtggactcgtgtgtaccagtaccaaaagatagctattacatattgctgagtaaaagtcaaaaacagcacatctagtatgatcccatttactagcaggcgtgtgtatgtgtgtgctttaaaattttaataagaatagggaaaaaggcctggaaagataacacagcaaactgttaatagtggttaattctgaataatggtatttaaagggtgttatttgctttttactttgctttttattctgtttgttttattttgtgtcatttggttttaaa

SEQ ID NO: 99655 - DNA, 238 bp, Homo sapiens
agtttgagaccagcctgcgaaacataacaagactctgtatctacacacacaaaattttttttaattagaggctgaggcaggagaattgcttgagcctgggtggttaagctgcagtgagctacgactgcaactgcattctggcctaagtaacagagcaaaagcctgtctcaaacaaaaacaaaaaaaccccaaatttgcaattagttaaggaagagaacctttgtttaaaaatttgggg

SEQ ID NO: 99656 - DNA, 2825 bp, Homo sapiens
tctttaaaactatttatggaatgaatgaattctttactgccaacatgtttcagtggggtggtggtgcagggttgggggtagagaaaatatgaatatgcaaagagaaaaaggagcttatgtgcaaaggaaggaggtgggggtcaccagaaggcagaggtcgctgaaggcaaactcctctggggacagctttgcaaatggccagtcccttttaaaggcatattaagtcttcaggtaactaattgacagctgtaatttaagatgtgttgacacacttgatgtgcttgccaaagtcatgcttaatgacttgtatctcacacaatgaaatagggcaaagttaaaaactcaaattgctttgagtttgtattggcttctggatcctgggttacatcattcttattttcatgttaaacattaacagcaataaaaaaacagaaaaagaaaggtggtgcggcagggagtggggggcagtcatgtaggggaggatattttgattgaacacaggcttgacagaatcttcttttcttcttagaaatcctagaaaacagaaagcaacaggaagatgtcttattgggaactacccccatcaacttcaccatgagtcaaacaaggaagaaaacttcctcagaaggagaaactaagccccagacttcaactgtcaacaaatttctcaggggctccaatgctgaaagcagaaaagaggacaatgaccttaaaacaagtgattcccaacccagcgactggatacagaagacagccacctcagagactgctaagcctctcagttcagaaatggaatggagatccagtatggagaaaaatgagcatttcctgcagaagctgggcaaaaaggctgtcaacaagtgtctagatttgaataactgtggattaacaacagcggacatgaaagaaatgggagaagcatttgagatgattcctgaacttgaagagctaaatttgtcttggaacagtaaagtgggaggaaatttgcctctgatccttcagaagttccaaaaagggagcaagatacaaatgattgagcttgtggattgctccctcacgtcagaagatgggacatttctgggtcaactgctacctatgctgcaaagtctcgaagtacttgatctttccattaacagagacattgttggcagtctgaacagtattgctcagggattaaaaagcacctcaaatctgaaagtactgaagttacattcatgtggattatcacaaaagagtgtcaaaatattggatgctgcttttaggtatttgggtgagctgaggaaattagatctttcctgcaataaggatctaggtggaggttttgaagactcgccggctcagttggtcatgctaaagcatctacaagtcctagatcttcaccagtgctcactaacagcagatgacgtgatgtcactgacccaggtcattcctttactttcaaatcttcaagaattggatttatcagccaacaaaaagatgggcagttcttctgaaaacttactcagcaggctccgatttttaccagcattgaagtcattagttatcaacaactgtgctttggagagtgagacttttacagctcttgctgaagcctctgttcacctctctgctctggaagtattcaacctttcttggaacaagtgtgttggtggcaacttgaagctgcttctggaaacactaaagctttccatgtctcttcaagtgctgaggctgagcagctgttccctggtgacagaggatgtggctctcctggcatcggtcatacagacgggtcatctggccaaactgcaaaagctggacctgagctacaatgacagcatctgtgatgcagggtggaccatgttctgccaaaacgtgcggttcctcaaagagctaatcgagctggatattagccttcgaccatcaaattttcgagattgtggacaatggtttagacacttgttatatgctgtgaccaagcttcctcagatcactgagataggaatgaaaagatggattctcccagcttcacaggaggaagaactagaatgctttgaccaagaaaaaaaaaagaagcattcactttgaccatggtgggtttcagtaaactgatttcccatgtcctactaagctacaaaccattctccaaaggaaaagaacatgaacgaattccagagtcatgaactgaatttcaacttctgggccatttaatgggacttatattacaagagctttgtaaatatatatatatattacatatatatatgtaatatacatatatacacatatatataatatacatatataatacacatatatatgtaaatatatatataatatctaatatgagcatgccattattctctgtctatgaaacaaaaatggcatttttcaatggatttgttttggatatataattagttcatttgctgtttagaagccttgccaaaagtgtttagattttggtactgcaactgctttcctcttgcccagaaatgttttgcctcttcttttcctacaagttaaatgttctaaatataaaggggtatgtgtgtgtgtgtgtaattctaatgtgaaaggcactagctgtctaatagtttcatgtatcattactattactatatgtatcttaatgtagtctatgtaggtttttatcagaaagtgtacctttctatggtttattattttatattctggtgccttttatctcagatataaaccatgaacagtaatgatagtcactgacatataaatcttagtaaaaagtgattaaaaatctaaaactcagtatgaaaaacatatcttgttagaataaattaaaaccttttattgtttaaaaaattgtt

SEQ ID NO: 99657 - DNA, 1751 bp, Homo sapiens
tctttaaaactatttatggaatgaatgaattctttactgccaacatgtttcagtggggtggtggtgcagggttgggggtagagaaaatatgaatatgcaaagagaaaaaggagcttatgtgcaaaggaaggaggtgggggtcaccagaaggcagaggtcgctgaaggcaaactcctctggggacagctttgcaaatggccagtcccttttaaaggcatattaagtcttcaggtaactaattgacagctgtaatttaagatgtgttgacacacttgatgtgcttgccaaagtcatgcttaatgacttgtatctcacacaatgaaatagggcaaagttaaaaactcaaattgctttgagtttgtattggcttctggatcctgggttacatcattcttattttcatgttaaacattaacagcaataaaaaaacagaaaaagaaaggtggtgcggcagggagtggggggcagtcatgtaggggaggatattttgattgaacacaggcttgacagaatcttcttttcttcttagaaatcctagaaaacagaaagcaacaggaagatgtcttattgggaactacccccatcaacttcaccatgagtcaaacaaggaagaaaacttcctcagaaggagaaactaagccccagacttcaactgtcaacaaatttctcaggggctccaatgctgaaagcagaaaagaggacaatgaccttaaaacaagtgattcccaacccagcgactggatacagaagacagccacctcagagactgctaagcctctcagttcagaaatggaatggagatccagtatggagaaaaatgagcatttcctgcagaagctgggcaaaaaggctgtcaacaagtgtctagatttgaataactgtggattaacaacagcggacatgaaagaaatgggagaagcatttgagatgattcctgaacttgaagagctaaatttgtcttggaacagtaaagtgggaggaaatttgcctctgatccttcagaagttccaaaaagggagcaagatacaaatgattgagcttgtggattgctccctcacgtcagaagatgggacatttctgggtcaactgctacctatgctgcaaagtctcgaagtacttgatctttccattaacagagacattgttggcagtctgaacagtattgctcagggattaaaaagcacctcaaatctgaaagtactgaagttacattcatgtggattatcacaaaagagtgtcaaaatattggatgctgcttttaggtatttgggtgagctgaggaaattagatctttcctgcaataaggatctaggtggaggttttgaagactcgccggctcagttggtcatgctaaagcatctacaagtcctagatcttcaccagtgctcactaacagcagatgacgtgatgtcactgagtaagtatatattgcagagcaaaggaaagacttttggaatcttggcctatatttggaaacttggaaattttaatatgtacacttaaatttacttcttttgaagttattggaaagatcaattcataacagttctgtgagtgccccaatgtagtacttggcatgtattaaacgcccagtaaatgttagtgaatctcagttccacccatacatgtctgcaaatgatagatttggcacttagggaaaattttgaatttatgttgctgtttagaaataaatctcttagtgtcacaaagttgattacaaacaggttacatacctgtaaccaaacgtcaac

SEQ ID NO: 99658 - DNA, 1499 bp, Homo sapiens
tgacagattaaacagattgtgggaaccaaacacccagaagactccctgtgagatggtgcctaaaacatgtcactgttgatatttttaacagcccaggtcattcctttactttcaaatcttcaagaattggatttatcagccaacaaaaagatgggcagttcttctgaaaacttactcagcaggctccgatttttaccagcattgaagtcattagttatcaacaactgtgctttggagagtgagacttttacagctcttgctgaagcctctgttcacctctctgctctggaagtattcaacctttcttggaacaagtgtgttggtggcaacttgaagctgcttctggaaacactaaagctttccatgtctcttcaagtgctgaggctgagcagctgttccctggtgacagaggatgtggctctcctggcatcggtcatacagacgggtcatctggccaaactgcaaaagctggacctgagctacaatgacagcatctgtgatgcagggtggaccatgttctgccaaaacgtgcggttcctcaaagagctaatcgagctggatattagccttcgaccatcaaattttcgagattgtggacaatggtttagacacttgttatatgctgtgaccaagcttcctcagatcactgagataggaatgaaaagatggattctcccagcttcacaggaggaagaactagaatgctttgaccaagaaaaaaaaaagaagcattcactttgaccatggtgggtttcagtaaactgatttcccatgtcctactaagctacaaaccattctccaaaggaaaagaacatgaacgaattccagagtcatgaactgaatttcaacttctgggccatttaatgggacttatattacaagagctttgtaaatatatatatatattacatatatatatgtaatatacatatatacacatatatataatatacatatataatacacatatatatgtaaatatatatataatatctaatatgagcatgccattattctctgtctatgaaacaaaaatggcatttttcaatggatttgttttggatatataattagttcatttgctgtttagaagccttgccaaaagtgtttagattttggtactgcaactgctttcctcttgcccagaaatgttttgcctcttcttttcctacaagttaaatgttctaaatataaaggggtatgtgtgtgtgtgtgtaattctaatgtgaaaggcactagctgtctaatagtttcatgtatcattactattactatatgtatcttaatgtagtctatgtaggtttttatcagaaagtgtacctttctatggtttattattttatattctggtgccttttatctcagatataaaccatgaacagtaatgatagtcactgacatataaatcttagtaaaaagtgattaaaaatctaaaactcagtatgaaaaacatatcttgttagaataaattaaaaccttttattgtttaaaaaattgtt

SEQ ID NO: 99659 - DNA, 516 bp, Homo sapiens
ggcaacttagtgattgggcttgtgtgtgtgtgtgtgagcgagctggatgtcaggcagtgggtaaagtagtgaactggaggtgagaaaacaatgacacaaactcagggcttctcttcccaagtatttggctgagaagagagatgtagtattaaagggagatatgtggtaaaggaagacttttattccaagattcaacaaaagcgtgagtatacttctatgttaaagggaaagagccaacagagaaaacacatttttgaggttagaagagaaggaagaactaatgcagaagggccccaaaaggcacaggtgcctgcaatctggatcagggacagattagctttggactcctacaaaagcaagaagggagaaaggaccatgtgactctagagatatttctggtaaaggaaaggtttaggaaaagatcttttgatgacctttattttaacagactttttttttctttttgagatggagtcttgctctgtcacccaggctggagtgcagtggcacgatctc

SEQ ID NO: 99660 - DNA, 162 bp, Homo sapiens
cagccacccgagcgtgtagaaattaaacaaaaccttctagaaatttagccccaggctatggataagatacatttattaggttaacttctagtttgattaactctaaattcttcctggaaaatacaaaatactgattctgcctattaggcaggtagcaaatta

SEQ ID NO: 99661 - DNA, 488 bp, Homo sapiens
aaggggctgagggacttttgtgagaccacgcggcaagctggggcctggaaacatgagctcatccatcccggcctttctgctgtggctctatcatccacttgtccagggagggtgccagccctacgtgtgtttagtgagaagtgtggggtgagagcaaccacaggaaagaaagccccgttgtgacaacgttgtgccctgagctgcctggcccactcattccactggcctgtgttctacccaggacgggccgcatgtcccagggtttctgctgagcaaccagtcagcgtgctgctgagcacccgggcccgatgtgaaatggtcagctcctttccttctaccagtgccaactgctgcacctgccagcctctgcctagcctccaccactgatgctgctgtaagaggaagaagattcctgtcttaacagaattctcatgcatgcctttcaaaccgaggagctcacaggctgacggaagaggatgacagggagt

SEQ ID NO: 99662 - DNA, 412 bp, Homo sapiens
gaccttgtgatccacctgcctcggcctcccaaagtgctggggatactgatttttttaaaaagatagccaagctgggttctcctgaccttaattcaaaatccggtttctccagctctattgctatttgtaaaagaagtagtagtagtaataatagcaatagcaaggataataagtgactagggtccataccctaaaaatagagtaatgaataagatacaatattcacaaaatgttaaacccatctgttatacaggtaagcttaagtgatgtatccaaaggcacccatctggtcaatggcagagggaagattagaggccaggtgccagctctccctaaaacaccgcatactttccttccatggctggtcttccaggctttctttggtggtctgagtgctagagagcaagaagga

SEQ ID NO: 99663 - DNA, 793 bp, Homo sapiens
agacagggtctcactctgttgcctgggctggagtgcagtggcatgaccatggctcactgcaacctctgcctcccaggttaaagcaattcttgtgtctcagcctcccaagtagctgggattacaggcatgcgcctccacacccagcttatttttgtatttttagtagagaccgggtttcaccatgttggccaggctggtctggaattcctgacctcaggtgatccgccagccttagcctcccaagtacaggtgtgaaccactgcattccgccctcttcctcaatttaaactgagaagacagttcgagctaatgattcttagattttatgtatatataaatatatcaaatctatatattatttattatatctatatttatattattgtaaatatatgttagatctctcatatgtccaagtaatctgttggtttgcacgatgaatgtctacattacaaaagtcagctgaactgacaaacctcttataattggaacaatggttgaaatgttttcccattagacgttaggtgggttcacagctctgctagagtcaagggacatagtttagcgctatggacattttacttatgactcattcaacataaaactgtagtatgtcattatgtccattttctcaaaagagaaatgttaaatgtaatgaaaaaaataatatagataccattgaattattcaaatgaatgatgctagatacaaagaattccaaatttaaaagggggtagttaagagagtgttcaataattgtgtatagagatcagtcagtcattgttagggagtt

SEQ ID NO: 99664 - DNA, 798 bp, Homo sapiens
ttttgcttttcttttcttcaggcatacagcaaaactagaaggaactggaataaaatgaaaatgcctaatttctgggacaaggctctagtaaagtcctgcctctggcagatgaaatttgccatagagaaggtgctggacaatactcagaagtattactcttccctgcttcatgccagagctgcagaggaatttttattaaatcttcacaaggaaaacttgatgaggcctctggagtcgaaattccacaaaactgttggggttgtctaaaaatacaaccctcaggacagtatttatcttaatcaattgtcctctcaagttccaataacccaacaaaattcccatttaactgttcctacctgttcacagcttatgatttctattcctgggaagcaattttgggctgtgattctctggatttacccattttctgcaatttggagtggttgtttgccctgtgacctctattccctgaagagtcttagtaaaatccttaattttagtttgttctgcttttatttgttgtaaggactttcttataacccttgaaaactgtgatttccatgctatttacatgctggaactaaaacctgaaattcatagcttacagttataagccacctaagctccactaatattattaaatatcttttcaactttcttgttaataaatagatgtatgtattactttgaatgattatataagtgagttactgacagcctttacgattaatttatccaatattctaataacttccaaatttcaatctgtttctctgctatacattttattatatcctc

SEQ ID NO: 99665 - DNA, 600 bp, Homo sapiens
ctctaatgatggggacattccttagctgcacaaacagtcctgaaggctgtacagctaggtctgaacctgtccacgagccccttttgtgagctgggtgggttgccctgttgagctgctttttagaagccttcatccatcaaggcaggccagggggcaagctgcctctggagtgccggcaccttggatcctggtatctgcccatcctgcctgcaaggccctcataacttgccctcagccaccccaggcagccctgtctctagtaacaatttttgtcttgaagtctatcttgtctgagaagatcccactctcctctggtcactgcttgcaaggaatatcttttgttattttttaatttttttgagatggagtttcgcttttgtcacccaggctggagtgtggtggcgcgatcttggctcactgcaaattctgcctcctgggttcaagtgactctcctgcctcagcctccccagtagctgggattaacagggctcccgccaccacgccagggctaattttttttttttgacggagtttcagctcttgttgcccaggctggagtgcaatggcgcaatctcggctcaccacaacctccacctccca

SEQ ID NO: 99666 - DNA, 669 bp, Homo sapiens
cggagctgtcatctcctgtaacaatgccttcttctcacagacctcctgaagggcctgccttatgctgtttcacagttaacttttttttaagtagaagtacactctaaaataatgacaaaacatatagcacagtaatgcataaaccagtaacctagccatttattaagtactatataccttacatcattttatgtgctagatttttatatgactggcagcacaggtttgtttataccagcatcaccataaacaacatgattatcgtgttgtgctaccttatgatggctatgatgtcactaggtgataggaatttttagctccattataatcgtatggcaccaccaacatatatgcagtccattattgactgaaaagctgttatgtggtacatggctatatttcgaaacagggcctttaaagaggtaactaaggttaagtgaggtcataagggtggggccctaaagccaataggattgatgtccttataagaaggggaagacacaccagggatacaagtgcacagaggaaaggccatataaagacagtgagaaggtgccatctgcaagtcaaggagagaagtctttgaagaaaccaaatctgctgataccttgatcttggattttcagcctccaacactgtgagaaaataaatttctgttgtttaacctga

SEQ ID NO: 99667 - DNA, 1235 bp, Homo sapiens
cggagctgtcatctcctgtaacaatgccttcttctcacagacctcctgaagggcctgccttatgctgtttcacagttaacttttttttaagtagaagtacactctaaaataatgacaaaacatatagcacagtaatgcataaaccagtaacctagccatttattaagtactatataccttacatcattttatgtgctagatttttatatgactggcagcacaggtttgtttataccagcatcaccataaacaacatgattatcgtgttgtgctaccttatgatggctatgatgtcactaggtgataggaatttttagctccattataatcgtatggcaccaccaacatatatgcagtccattattgactgaaaagctgttatgtggtacatggctatatttcgaaacagggcctttaaagaggtaactaaggttaagtgaggtcataagggtggggccctaaagccaataggattgatgtccttataagaaggggaagacacaccagggatacaagtgcacagaggaaaggccatataaagacagtgagaaggtgccatctgcaagtcaaggagagaagtctttgaagaaaccaaatctgctgataccttgatcttggattttcagcctccaacactgtgagaaaataaatttctgttgtttaacctgagtaggggttgtgttttctattcccatttgctgcaaggtatgtttaccaaaggctgtttgagtttgtgactgtagtgggtcaaatagtgttccccagtaatttatgtccacctgcaacctcagaatgtattctcacttggaaatcatgtctttgcagatgtaataggtaagtattgagataagctgatattggatatgagtaggttctaaatccaatgacagtatccttataaatgacagaaaaggacacagagacagaaggccatgtgacgactaggcagagattggagagggagcatggccctgctgacgccttgattttggatttctagccaccggaagtgtgagagaataaatttctcattttaagccacttgtggagtggtaatttgttacaactgctctaggaaacaaatacagttaccaaacaaactgattatgccaggtgaactttttatgatgataatatgagccaaggacgcaagcgtgaagagttctagtttctgttaaagccaagttaaatactttggaaagactagataaaagtttgttgactttaaaaattta

SEQ ID NO: 99668 - DNA, 319 bp, Homo sapiens
ttttttttttggttgcagacatttaaataatctatatttgtagggtgatatcttggagattactttactatcaatatatagaagtaataacctggtagatagcattacctatgaaaggtccatcccatctgctattcttgctgaaagcttttcatgcaccagtaaactcagtaaatatcagaagataaagcataagcctaccacgccacggatttactcctaatgtctcctcaaagtgcagcccgatgcaacgattacaaatgattttcttctaatgtcattttacataacccttttttctgcatgagtagttagtgtg

SEQ ID NO: 99669 - DNA, 307 bp, Homo sapiens
ctttaataaatgtttttgagaaaattggatatctatatatagaagaattaaattgaaaccttttctcatatcatgtgaaaaaattaactcaaaatgggtcgaagacttaagcataaaatctgaaactgtaaaactactagaaaaaaacatagggagaaaactacatgaaattggtttgggcaattacattttcaattttactctacaaccacaggcaacaaaagcaaaaagagatgaatgggatttcatgaaatatgaaagcttctgtataacaaaggaaacaacagaaacaacctacaaattagga

SEQ ID NO: 99670 - DNA, 1078 bp, Homo sapiens
  misc_feature (543)..(543): n is a, c, g, or t
aacacaccagcatcactttagctccatcattgctgtaggtaaatgagcctcctttccacctaaaaatgccctgcaacccttttctgaaatttcttagacagttattcatctttaaaggattattttcttctgcaaaagtttttgcctttttgttttaacacttagaaattaacatctagaggccaaaattcagaggaaaatggggacagcctatgagtaagtttctaagaacgcatggtgggcagtgaacatgtgaaacagttatgaggcagatctgctagcaggtgggtactgttgaagcttgaaagtagaaatactttggttgttttccacaactcctacttggtggtggaagcaggaggcagggggtgatttgtccttctgttcttagttcagtccttagaccagatacgatgagattcaaaggttggcccttttaaaagaaatctttttgaaaaaaaaaagttaaggatttcatggggggatgctggttagaaaggaagagttaagccactaaaatcacggcccctgggattgtttttnaccaccaaatgctttctgaaactcacataattgatgcagttccaatgatttatttaaatacaatctgagtgtgagaatggtggtcaaaatcctggtggttaactaattttgtcaattaagacagccttgtaaataagtacaaagaggagctgatgaggctccagagacccctgggctcaaaataaatggaaccgacatcattattatggggaaggagctttttgcaaatctgaattagtgattacaaatatgctaagagactaagagggcctaatgagaaaatgctgcctgatttttaacaggtgcagttcagtgttaattattgattccaacatttcgctagatgaagagcacctatgttctaaaagcaaaatgaggactcccagcagaaagcctttagcctgcccctgtggagtgcagatgaccaaagtgattttgttgtatcacgctgagccgtttctggagggaaaaggaaatggaatttcagtgtgtgggacaaaaacctaaaatatattttgctttaccaaaaaaaaaa

SEQ ID NO: 99671 - DNA, 479 bp, Homo sapiens
tggagggagctgtgccgttggtagaaactgcttttttcttccttaacagtttaaatctgtcgtccattctccgtgaagtgattggacggggcaagactcaggtttcccatctgttctctgtttgcatttgggcgccatttcaaaaaccacacgggaaaagtttataggcaaatctgaattagtgattacaaatatgctaagagactaagagggcctaatgagaaaatgctgcctgatttttaacaggtgcagttcagtgttaattattgattccaacatttcgctagatgaagagcacctatgttctaaaagcaaaatgaggactcccagcagaaagcctttagcctgcccctgtggagtgcagatgaccaaagtgattttgttgtatcacgctgagccgtttctggagggaaaaggaaatggaatttcagtgtgtgggacaaaaacctaaaatatattttgctttaccaaaaaaaaaa

SEQ ID NO: 99672 - DNA, 3975 bp, Homo sapiens
  misc_feature (1138)..(1138): n is a, c, g, or t
atgcatagagctgttctaattaatggagagacaattcacagttcatttattcattgactcaacaaatatttatggaacaacaaatatgtgttgttttaggcattccgagatcaggaagtaaaaaatataaaaatctctgttatcatggaatttacagtctaatgatcaaagggaggcaataaataaataaatttatttatttaaaaactgtattcaaagagtgataagtgataagaagaaagatgttagggaagtgggaggagatataaatgtactacaagactggtcaggaaagaccacacaaaaattgagtaaacacacaaaaggtttgaagaagtaatcaaaagagaatacagaggaagtgcattccatccagtgggaaggggaagaacaaaggatctgaggcaggaatgcaatgtaatgactaattactatttgtgaggctctggtccacatggatgaggaaaaatcatgcctgttttgttgaaactccaaatctggttggggaagaagttactaatcaaataaccacccaaataaatacataatcatatataatgataaattgataaattctgtaaagggaaaatacaggtcactatgaggaggtacaatgcaaagttctgagtgattctgaagagtcaaaaatatcttccctgaatagttgatacctatattgagatctgaaggctgcatagaatttaaccagataaaagagaaaagaaagcactccaacatcataaccagcatgtgttagttaaaagtgatgctgagaaagagcttgagttagattgaagtagaatcagtgatagaaaataacagccgaaaacaaacaaaaaggggacatagtgacaatttctcctgggttattttggctggaaccaacttccattatccagaagctgataaaaaagctttgggaaacatgaacaaaacattgatgaaatgttggaaaccagttgaaacacagtaaaaccaactgggtaaaataggaccacttctcttcatctacactgggatttgtcaagaagtgaactatgacaatacatcaatttttgctactgtttctattctgggtatgcctgccacatttctgctctccagaaataatgttcagaaggacgcctgtgccacagcnaagaattttaagttcacgtgtaccaaggagtgatggcaaaattctccatcgtcaaaaacgtggttggatgtggaatcaatttttcttacttgaagaatatacaggatctgattatcagtacgtaggcaagctacattcagaccaagataaaggagatggatcactcaaatatatcttatctggagatggagctggtactctttttattattgatgaaaaaacaggtgatattcatgccacaaggcgaattgatagggaggaaaaggccttttatactctacgcgcacaagctattaacagaagaactctgaggccagtagagccagagtcagagtttgtgatcaaaattcatgatatcaatgacaatgagccaacgttcccagaagaaatctatacagctagtgttcccgaaatgtctgttgtaggtacttctgtggtgcaagtcacagctacagatgccgatgacccttcatatgggaacagcgccagagtcatttacagcatacttcaagggcagccctatttctctgtggagcctgaaacaggtatcatcaggactgctttaccgaacatgaacagagaaaacagagagcaataccaagtggtcatccaggccaaagacatgggcggccagatgggaggcttatcggggacaaccactgtgaacatcacgctgacagatgtcaatgacaacccaccacgtttcccccagaacactattcatcttcgagttcttgaatcctccccagttggcacagccattggaagtgtcaaagcaactgatgctgacactgggaaaaatgctgaagtagaataccgaattattgatggtgacggtactgatatgtttgacatcgtgactgagaaggacacacaggaaggcatcatcactgtgaaaaagccactcgactatgagagccgaagactttatactctgaaagtcgaagcagaaaacacccatgtagatccccgtttttattacctaggaccatttaaagatactaccatagtgaaaatctctatagaagatgtggatgaacctcctgtttttagtaggtcctcctatctgtttgaagttcatgaagatattgaagtgggcacaatcattggtactgtaatggcaagggacccagattctatttccagccccattagattttccttggatcgccatactgaccttgacagaatctttaacattcattcaggaaatggatctctttatacatcaaaacctcttgaccgtgaactatctcagtggcataatcttactgttattgctgctgaaatcaacaatcccaaagagacaacacgcgtggctgtttttgtgagaattttggatgttaatgacaatgccccacagtttgctgtgttctatgacacttttgtatgtgaaaatgccagaccagggcagctaatacagactataagtgcagtagacaaagatgaccctttaggtggacagaaattttttttcagtttagctgctgtcaatccaaacttcacagtacaggataatgaagataatactgccagaatcttaaccagaaaaaatggattcaatagacatgaaatcagtacctatctcttgcctgtggtgatatcagacaatgattacccaattcagagcagcacaggcacactgaccattcgagtgtgtgcttgtgacagccaaggcaacatgcaatcctgcagtgctgaagccctgctcctccctgccggcctcagcactggggccttgatcgccatcctcctctgcatcatcattctactggttatagtagtactgtttgcagctctgaaaagacagcgaaaaaaagagcctctgatcttgtcaaaagaagatatcagagacaacattgtgagctataacgatgagggtggtggagaggaggacacccaggcctttgatatcggcaccctgaggaatcctgcagccattgaggaaaaaaagctccggcgagatattattccagaaacgttatttattcctcggaggactcctacagctccagataacacggacgtccgggatttcattaatgaaaggctaaaagagcatgatcttgaccccaccgcacccccctacgactcacttgcaacctatgcctatgaaggaaatgattccattgctgaatctctgagttcattagaatcaggtactactgaaggagaccaaaactacgattacctccgagaatggggccctcggtttaataagctagcagaaatgtatggtggtggggaaagtgacaaagactcttaacgtaggatatatgttctgttcaaacaagagaaagtaactctacccatgctgtctccacttcacaatatttgatattcaggagcattttcctgccagtcagcacaattttttttctcatttacttcttaatttgttcattaattacattaattctttcctgtaggatgtctcatggaatatatatgacattttatttaatcacttccaagagccaaagctatggaaatacagtgttgtccatcttagtaaataaaagataatttcagaaacatgaacaggatagttctcccttaagcaacctcacaaacaagccgcttctgttaggtacatgtcctgcccttgcaaatgaagcttttaaaaaggtgaagaaaaattttacagtatatcctgttctgtacattaaattaaaaaaacaaaaatgtacatgtgatgttagtaggtgtgatatgcaacctggtatacagacatttgtgcaatttcatttcatcaaattctatctgctaatgttttatatttatatttttgtatttatttttaaaaaaataaaccagtttttacaactaaaaagtct

SEQ ID NO: 99673 - DNA, 3270 bp, Homo sapiens
  misc_feature (433)..(433): n is a, c, g, or t
gccaatcagagagagctcgcccccgttttcttcggttccctgctgtccagagttaaaagtgatgctgagaaagagcttgagttagattgaagtagaatcagtgatagaaaataacagccgaaaacaaacaaaaaggggacatagtgacaatttctcctgggttattttggctggaaccaacttccattatccagaagctgataaaaaagctttgggaaacatgaacaaaacattgatgaaatgttggaaaccagttgaaacacagtaaaaccaactgggtaaaataggaccacttctcttcatctacactgggatttgtcaagaagtgaactatgacaatacatcaatttttgctactgtttctattctgggtatgcctgccacatttctgctctccagaaataatgttcagaaggacgcctgtgccacagcnaagaattttaagttcacgtgtaccaaggagtgatggcaaaattctccatcgtcaaaaacgtggttggatgtggaatcaatttttcttacttgaagaatatacaggatctgattatcagtacgtaggcaagctacattcagaccaagataaaggagatggatcactcaaatatatcttatctggagatggagctggtactctttttattattgatgaaaaaacaggtgatattcatgccacaaggcgaattgatagggaggaaaaggccttttatactctacgcgcacaagctattaacagaagaactctgaggccagtagagccagagtcagagtttgtgatcaaaattcatgatatcaatgacaatgagccaacgttcccagaagaaatctatacagctagtgttcccgaaatgtctgttgtaggtacttctgtggtgcaagtcacagctacagatgccgatgacccttcatatgggaacagcgccagagtcatttacagcatacttcaagggcagccctatttctctgtggagcctgaaacaggtatcatcaggactgctttaccgaacatgaacagagaaaacagagagcaataccaagtggtcatccaggccaaagacatgggcggccagatgggaggcttatcggggacaaccactgtgaacatcacgctgacagatgtcaatgacaacccaccacgtttcccccagaacactattcatcttcgagttcttgaatcctccccagttggcacagccattggaagtgtcaaagcaactgatgctgacactgggaaaaatgctgaagtagaataccgaattattgatggtgacggtactgatatgtttgacatcgtgactgagaaggacacacaggaaggcatcatcactgtgaaaaagccactcgactatgagagccgaagactttatactctgaaagtcgaagcagaaaacacccatgtagatccccgtttttattacctaggaccatttaaagatactaccatagtgaaaatctctatagaagatgtggatgaacctcctgtttttagtaggtcctcctatctgtttgaagttcatgaagatattgaagtgggcacaatcattggtactgtaatggcaagggacccagattctatttccagccccattagattttccttggatcgccatactgaccttgacagaatctttaacattcattcaggaaatggatctctttatacatcaaaacctcttgaccgtgaactatctcagtggcataatcttactgttattgctgctgaaatcaacaatcccaaagagacaacacgcgtggctgtttttgtgagaattttggatgttaatgacaatgccccacagtttgctgtgttctatgacacttttgtatgtgaaaatgccagaccagggcagctaatacagactataagtgcagtagacaaagatgaccctttaggtggacagaaattttttttcagtttagctgctgtcaatccaaacttcacagtacaggataatgaagataatactgccagaatcttaaccagaaaaaatggattcaatagacatgaaatcagtacctatctcttgcctgtggtgatatcagacaatgattacccaattcagagcagcacaggcacactgaccattcgagtgtgtgcttgtgacagccaaggcaacatgcaatcctgcagtgctgaagccctgctcctccctgccggcctcagcactggggccttgatcgccatcctcctctgcatcatcattctactggttatagtagtactgtttgcagctctgaaaagacagcgaaaaaaagagcctctgatcttgtcaaaagaagatatcagagacaacattgtgagctataacgatgagggtggtggagaggaggacacccaggcctttgatatcggcaccctgaggaatcctgcagccattgaggaaaaaaagctccggcgagatattattccagaaacgttatttattcctcggaggactcctacagctccagataacacggacgtccgggatttcattaatgaaaggctaaaagagcatgatcttgaccccaccgcacccccctacgactcacttgcaacctatgcctatgaaggaaatgattccattgctgaatctctgagttcattagaatcaggtactactgaaggagaccaaaactacgattacctccgagaatggggccctcggtttaataagctagcagaaatgtatggtggtggggaaagtgacaaagactcttaacgtaggatatatgttctgttcaaacaagagaaagtaactctacccatgctgtctccacttcacaatatttgatattcaggagcattttcctgccagtcagcacaattttttttctcatttacttcttaatttgttcattaattacattaattctttcctgtaggatgtctcatggaatatatatgacattttatttaatcacttccaagagccaaagctatggaaatacagtgttgtccatcttagtaaataaaagataatttcagaaacatgaacaggatagttctcccttaagcaacctcacaaacaagccgcttctgttaggtacatgtcctgcccttgcaaatgaagcttttaaaaaggtgaagaaaaattttacagtatatcctgttctgtacattaaattaaaaaaacaaaaatgtacatgtgatgttagtaggtgtgatatgcaacctggtatacagacatttgtgcaatttcatttcatcaaattctatctgctaatgttttatatttatatttttgtatttatttttaaaaaaataaaccagtttttacaactaaaaagtct

SEQ ID NO: 99674 - DNA, 406 bp, Homo sapiens
gttttgacctagagttcctacaagttgagatcattttaaatctggagtctgtcatcctatatattgaactacgccacccagctttgcgatatctgcaatgcaaaaagcctgtctttgtgatcaattatgatcaacaatctgcttctttagggcaggggccctgatctggacagctgtgtattcctcacagtgcttagtagggtgccctctatatagtaagtgtctgttatttgttaaataaacgaatatttgggcagagccaaaaaacagttcctgtggcccttcactaaaaacattttcttccaggttgacattgaatccgctgatcaaccagctgtgaatctgcctaattactagttatgcagtcaaatttcacaatctatgcacaaggatattacagaagact

SEQ ID NO: 99675 - DNA, 222 bp, Homo sapiens
tctcttctcaggccagacagcatttccagacagcctttttactggaaggaggtgagtgttttctctgctcatggatcagatgtctttctcctgcctttcctaacaggcagctgtgcctggtgtctggaggatcaggctgccctggaatgcgagcaggagtgcctgggctaatggctatggttttgccagccccagagactgacaggcagttgttgtttttgt

SEQ ID NO: 99676 - DNA, 639 bp, Homo sapiens
ttccgataattactttagatactggggattcagtgatgaacaagacagaagctgtccctgctgtcatgagaaccgccttctagaagaagaataatacacaagtgagaaacacaaataatacacaagtgagaaatttgtggtttgtactgtgcagagaattaaaatggataaatggatagtgtaaggctgggcactgtaaggcttgtgcctgtaatcctagcagtttgggaggctgaggtgggaggattgtgtaagcctagaagtttgataccagcctgggcaacatagtgagaccccatctccaccaaaaatttagaaattagctgggcatgatgacgtatgcctgtgatcccagctacttgggaggctgaggcaggaggacttgagcctaggaggttgacgctacagtgagctgtgattgtgtcactgcattccagcctgggagacagagtgagaccttgtcttacgtgtacaaaaaaaaggataatgtggtagagactggtgactgctttcattaggcagtcagagatagcctaattgaaaaaggggaattttaattgagatcggaatggcaaaaggagccagctgtgtgaagatctgagagaagagctttatagatagtgagaacaagaaagacaa

SEQ ID NO: 99677 - DNA, 267 bp, Homo sapiens
gtccatttggtgtgtaatcctaaaattctgcattgctatagagcaagagcacttacgctgaaatccatgagctctttgaaattgtgtaaaatttggagagcttttacatctctcatttcactgtgtatctgattttcaaagagaaaaagtgttaaaaaggatagaaaacacaagcttagaacagtcactttaaagaacaaagttttaggcaaaaacactgagaatttcaactcggcttgttgggagttggccctcatttatatccag

SEQ ID NO: 99678 - DNA, 544 bp, Homo sapiens
ccgctgctctctgcagggctcacacctcctcatggttgcattcaaatgtcgtatctttctcaaaagcaggaccccttcttgccaccttccactggaccacccacctccaggggcccttctgtctgctcttttccccccacttctgtggtcctttcctgggccagatctccctccaagctgcacaacagccttccacggtgtgaaccctctgtggctccctattgccatcggcctaatgttcagggctgttccacaaactggacactgctggcttctcccacctcatctcttggggctccttcacacacaaggtatgccccaagctacaatatacctctcaggcacgacataaactttccaacctctgagctttcacttgcatagttcccttggcctagtatgtcgtgcacacacctccttgcatggcaaactcctatttgttcttcaaagcccagctcaaatattccctacttcaagaagtaccccctgatccccataggctgttattccttccttcctctaggtctcatcttcctggactgtg

SEQ ID NO: 99679 - DNA, 272 bp, Homo sapiens
tactctggtatgaggaccacaatttaaaatctatttcttactggacaaatgataggaaacaactgtattcggccactggacaataggcagcacagaactgtaatccctgagagaaagcaaataaacagagagagcccttaatgatggctcgatttctgcctgaaagcactttccagacagggagaggggtcccaagaagaacatgacagtctcattgagttgaaacaagagactgcagtttaggaagtctaaaacagccagaatttgtgagg

SEQ ID NO: 99680 - DNA, 744 bp, Homo sapiens
ctctggtgatcctcccatctcagcctctcaaagtgctgggattacaggcgtgagccaccgtgcccagccaggcaagccccctgattctcaacaagagggctgagcagtgtgaagataagatgcggctttggtccaaagtccagagtgcttcttggggctgaggggcgtagccattgcagtgcttttccaggggagaatgggttgggctccctctcctgagtcgggggacatgagcctagcgacactgctgtgcagtttgctcgggttctagacatcgtccctattggctgtgcatgggaggcttggtgaagcagagaaaggaaagtccagggaaggggcccaaaaagtcaaaactgttaatcacaaaacaaaagaaaaagtgaatttttatggaaaagaaggggatttttatttggaaatgcttaataatagtggttttcattctccagttatcacaaatagcattagaaatgaatgcgattgcaatttactccatcttcaccaaactttgtagaactacatgtcaacatatctctgacttctttcagtcagttgtcagtcaccattttgaaaaaaatacccacatgttcgatattttggtatcacaagcacttgagttcttagtgggattctcagctctccagtttggtctgccatttgctaattagacttctcttactgtgccataaaatgaagactttaacagcagaaaagcagttctcccaatgtttactttaagtttct

SEQ ID NO: 99681 - DNA, 1454 bp, Homo sapiens
ctcacctgtgcctcagaatgtctctgccacctgttcacaaggttggtaatttaacatttgctttactgctgtggtccatgtagtgacaactaagttactttgaaaggctctacaaagttccaagcagttggctgggcagtgttccaggtttccataggggcctcagcatggccggctttccctctcactttgattttagaaacaggcaggattgtgagaacgctctcaggagtttctcaagcctcattttgctcattcgtttcaaggccctatgtgtggcccacaggttcttattgggggtccctggatgggtttcctgaagccaccatgtatttaagtgtattttgggggacagtgcatctaaaactctcattaaattcaccaggaaggtatttaaaaggcccattttttatgaaagtggataaaaagtgaaaattatgccatggaaagttccttcatatttctatctttctctttttagaggaactaatgggaagtgactaggtaaaagggggtgaggcagacacacactgacagccttgttgtagttctgtgcggcttgacgtttctgtgtcttacgggtgggatgggaaacaaaatgataccgctggcatcactggaagaccatttgacttagtggaagcaaaggcggggaggtgcgtatgatgctacaatgtgtttctgtcttccactgagcaagaagaggaggttgagccattgggaggagcacagaggccccttggagcagttgctgcttctcagatttctgtgtctgatgggtactgaagataggtctggagctttggctgctgatgccaaaggcacctgttttaggagattgctctgcttgagaagtccatagtagcttacctaaatagtaaagttcatgactactgccttcaagataagggtctagagggtagctttgaagagtgagaccgtagatgctcacacactctttgacccagcaattctacttttaggggcttattttaagaaataatcaaggtcattattcatcccagagctctttatcatagtgaaaagttggaaatgtaatattaaaatataggggattggttaaacaaattatgtatatccacacaatggaatactaggtaactgttgagaatagtcataaagaaagttgttctgaaagcattgttatgtgcaaaaaggtatgtaatgcctttgtaaaaaaaaaaaaaaaaaaaaaactattgagaaggtactggttgggccctactatgggccaggtaccctgtggagtactggtgacacagtgatgaactagacagatatgtcctcaacaggtcttagtctaccaaggcaagagtcaggtcatactgactctgtcattaaaaaattctgtaaataatccatgggttctgcaaccacagattcaatcacatagattgaaaatatttggggaaaaagccaaaaaataacaatgc

SEQ ID NO: 99682 - DNA, 429 bp, Homo sapiens
acagaaagcgttggtggcccaacatatctcattttcatcattgtcagcctcctgcaactgcaagcttctgaacatgtcataaatccaatagaccaaatgtctccaggagctcagcaaagaggctacagcttttttgtttccacttaggccagggttatgggtagtaataaactcagcagtcaaggccagaaatgtgataatagtaggaaatgagaaaagggttagagaaagaaaagctaagtcggaaaaacgctcagctctccttgctttgctgagttttcaaattcattagcaacctcaattattcaattcctcaattttaatctctaattaaacattgccacagacactgtatccatggagagttgaatttaagtggcctctttttaataattgtgcaactatgatccctgcattgttaacccagag

SEQ ID NO: 99683 - DNA, 759 bp, Homo sapiens
cccgggagtctccagagcagcgcgcggggcagacctcctcgggtcctccggcgcttcggtctccggagacgcccggcctcctgaagggttcggcttgtcctcctctggcgctcagctccctctggcggccgggctggcaggacctcagcgcccagcccttccgtcttgttacgtccagggtctcactctgtgtctcaggctggagtacagtggtgcaattgtagatggctgcagccctcgacctcctgggctcaagtgatcctcctgccttagcctctcgagtagctgggagtacagatgcacaccaccacacccagcctagaatgaagaaacctgcagttgggaagcatgaatttaccacctattaaggcactggtttactgagacaattcaaaacacacattcattttgtgtgcttatgaaatatatcccaagatccccttttatttttcagaattgtggcttgcattgtaagaggagcctgtgaattcagaggcaagtctgctgaggaccgaatgttcctgtccataaaaacagaagtctggcctgggctcctctcttgggtgaatttgcaatgccagatcctctctatcagtctggtttgtttcttgtatctctgggaaggcaggcagacagcacggtcacctgtgaatgcagctacaattggcttagctgcctcactgataaatgtgcccccagtaagctacaaagggattaccagcgttctcagcagctaaaggaactggtgaagatttcccc

SEQ ID NO: 99684 - DNA, 249 bp, Homo sapiens
attgctgggaagatcaaggaagagaaaatgaataatatatgtaagagaactttgcacactacatagccctacacagaacgcattattaccaagtattttacatttataaagtgcttttcaaagcactctccacttaaaattcaattcacaatcaccagctaaggctgaagattcagacacaaaatccccgcctgcatgaagctcatgttctggactccagcctgggtgacagagcgagactccatctcc

SEQ ID NO: 99685 - DNA, 900 bp, Homo sapiens
gatatttatagtaagatatattttttaacatcatgacctatagacttgtatgtacgtttatgtgtacatacaagtaacatacttacccttacataacatgtataacatgtacatgtacatacaagtataacaatacttacccttacatatcatgcaaatatgttttttagtgtcattttttaaatgctggtttttatccactaaattgagttgatgatccacaaatggattactttctgttatttgaaaaaatgtcctaaaacaagcgctatggaacactaataatggcaaaaagatttaagaaatgtgtcctgtgtgccaggtaccgtcttaagtgtttgttttacatgcagcaactgatttaatccttatagcaactctgacaggaactattatccccttcttacagatgaggaaatttaaacattgaaagtaagaaactcactatgatacaactagacagacattggggaagctgggatgcaaacccagaattctggtccacagttcttgctctttaccactgtattacattgcctttcattggtgccactgacttctcaaaaagaaaagaatggtttcagagtcaaatgtgaagaatgttgtttcttaattattattatttatttttcacttgaaaatgtacaacgcccatgaacaccttaaggctttatagtgctataatgaagaagaagaaaaccatttacttgagcacacaagtctctttaattagctaaaattaattaattaagcatctataaagacaagttgggaaatgctcctggagagtcagtcaagaattctttgagtagcaggtaatacaaactcaacctgagccattctaagaacaagctggatattggcaagaacttacttagtaaactactaggagaatctctc

SEQ ID NO: 99686 - DNA, 889 bp, Homo sapiens
gattgagataggtctcaatcctttttgatttacacagattttcttctagattctcatgcttgactctaaaataaaacgttcattttcacgggtttatggtggcactaatttttgttaatttttttctatcaaaaacactctactgttggcagtttttccttacaatcatacacacacacagacacacacacacttcttggagtgtttctgacttctttgccccacccctaccattgcagttattcagttgatgatgccctttcaaatgagggccattttagaacagagggaatggtctgttgactttgttttaaatggtggcaccatgcatctcccttgggcctgctgggatgttaaatggtgagcccagcagggaggaggcccttgatggtgcccatagcttggtgcaatcaaggtgaagtggatggagagttcctgatgctgattaaaataagcactgaatgcacaacatgtggccatttgtaaactcatttctcatttcacacacgttactgtgctttgccttcctagctgcatttgttggcccagtatgtcctcatttactagatgctgaaacaaagtgatttagtgactgtcagacaaatactggcatagggatccgactccagtcatctgccttctgattccacactgttcttaccccatcaccgttctgccatccctgagatgtagcagggcagccttggccactctcttcttcctgtggattgtactaggtcacccctcatctttaaatgttgaggactcggccgggtgtagtggctcacatctgtaatcccagtacttggggaggccaaggcaggtggatcacttgaggtcaggagttcaagaccagcatggccaacatggagaaaccctgtctctacta

SEQ ID NO: 99687 - DNA, 159 bp, Homo sapiens
tgacacacacacaacaaaacaaacacaaaaccactgatctgtgattgctctccctttgtgtctactgccgtatacatatatacaactatatatacacaaatatatatatacacaaaactgtcatttacctgtatttgcaataaaagcataatgaattag

SEQ ID NO: 99688 - DNA, 547 bp, Homo sapiens
taaccaaaaaaatgttatgtttgatttgaatatgacagattcttagagtagacagctttaaaatgttgggggaggagaagaaggctatttgaaaactcaacttgttactgtcagctcactcatatgtaggtagtcactaatttaagaatagcttctattttaaaaatttgtagttttacaaatattttcccaaataatattttatatattgttaggtttctagactagtccacagaagctctgtaaaccctaatgtaaccaaaggataatatacaattaatgtaataactaattgtatttattttaatgtttctataagataatgtctgctgtgagttgggactccccatgtctaagccattggagacagggactccatccggatgaacagtagagaagggagttttggcatcattttcaacagaaaagtgtgctaccctgtcctgtccctgctggtccaccccacagtctgtgtcaggcaccccgacttccatgctgtcttaggattgatgaactgtcataaacttcgttgattgcaccattatta

SEQ ID NO: 99689 - DNA, 289 bp, Homo sapiens
ttcactttatgaaatgctgagctccctttcccaaaaccaggagcagaaggaagctgccactggtatttgatgccgtccacgtttccaccctggcactgggtcccagagccacctttcagattccgtccggcgtgagtggggcagaagagccagcgctgcctgtgaaggcgaagctactgctgcttcccagctgccactcgggtgcttttggaggccatcaaagaaatggtttcctccagtttccaacagttgaaactactgtttttttttttgtttttttttttgtttt

SEQ ID NO: 99690 - DNA, 463 bp, Homo sapiens
tttttttttttgagatggagttttgctcttgttgtccaggctagagtgcaatggcatgatctcggctcactgcaatctagcctaggtgacagagtaagactccatttcaaaaacaaaacaaaacaaaaaaacccttatatatattttatatcagctgcaaagttcaaaataaaatgcaagtacattttaaaggtataaaaatacattctcttcaaaaagaatattcatcaactttgataaacagataactttttttttttttttttgagatggagttttgctcttgttgtccaggctagagtgcaatggcatgatctcggctcattgcaacctccgcctcctgggttgaagtgattcccctgcctcagcttcccgagtagctgggattacaggcgcatgccatcacgcccggctaacttttgtatttttagtagagacggggtttcaccacattggccaggct

SEQ ID NO: 99691 - DNA, 444 bp, Homo sapiens
  misc_feature (20)..(20): n is a, c, g, or t
tctagaggatccttacaggnagagagaactgagaaatctttgccaccagcctcagcatccaggccacttctgacaaggccactggggttttgtttttttaaagccaggatgagctggacccttgccataattccttcagcccatggaaggagatgaccccagagaagctctagccactgtgggcgctgcctcaacaaagagccttctgtgaggtctgtcccttcacctccaggcccaactcctgacagaggccagtgtccctgcttcctgggcctggtgaggttcactgcacacgggtcagcaatggcataggaatgggaaagctatcgagaaacgagcctgggtcctcacagaatgtacaaatcctgtctcagtaagtggccagcaaaagattggaccaaagctagacatggtagcacatgtctgtggtcccagctacccagg

SEQ ID NO: 99692 - DNA, 734 bp, Homo sapiens
agcggggttccgcccgggctgttccaccagcggcacttcagggcgggatcggccagtctgtggaggcagcggcctctaagccccggagggtttactgcccaggtttgggttccaggaataagaaatccactgaataggcttaacttagaagacacaaaggcgcctcctggcggaagtggccacgctccgcccagcctgagggaaagctgctctgacagctgggcccagagctgcggggggcggggccgccgcgcggggtgaggactcgcctcagggcgctgattggctggtggcgcgctccggggcggggccttcgtatccaggctggcgtcggggctgccgcgggacatccggagcagacacccgcgggcgcgcctgcggccccgaggacccccggctccggagcttcgtcgagcgttttcctagcgttactttcccaaataattttcaggaatgaagttacggctaaagggctctttagagattacttttgggccgggcccggtggctcacgcctgtaatctcaacactttgggaggccgaggccggcgcatcacgaggtcaggagcttgagaccagcctggtatggccaacgtggtaaaacgtcgtctctactaaaaatacaaaaattggccgggcgtggtggcgggcgcctgtaatcccagctactccggaggctgaggaaggaggatcacctgaacccgggaggcggaggttgcagtgagccgagatgg

SEQ ID NO: 99693 - DNA, 399 bp, Homo sapiens
aataccatttgatatcaagtagacttgatgtaaagttgtttcagaacaaagaatcatccttactgggtttctgtaataatttgtttttggtttcattaaagttttggggttttggtttttgttttttcctttgcaacaaggtctcactgttgcccagactggagtgcagcggcatgtgatcagggctgactgcagcctcaacctgccgggctcaagcgatcatcccacctcagcctcccgagtagctgggactacaggtgcatgccaccatgcccggttaatttttgtatttttagtagagatggggttgtaccatgttgcccagactggtcttgaacacctgggctcaaaagtgaactgctcacctcagcctcccaaagtgctaggattacaggcctg

SEQ ID NO: 99694 - DNA, 239 bp, Homo sapiens
aagaacatcaggaaattttcttttccaaagttacttctgaaagtaaattggctgggtgtggtggctcacatctataatcccagcactttgggacgccaaggcaggaggatcctttgagctcaggagttcaagaccagcatgggccacacagtaagacctcatccctacaaaaaatcaaaaaattagctaggtatggtggcacgcacctatagtcctagctactcaggaggctggggcag

SEQ ID NO: 99695 - DNA, 150 bp, Homo sapiens
ggagtaaagactgaatagtcctgtcctaggtcattaaagagagtggtgaaagcactcttgctacagtagttttgtcatttattgtatagtgtaagtctaaagtttgttttattatttggcagttctttttttatcttgttataaaatcat

SEQ ID NO: 99696 - DNA, 524 bp, Homo sapiens
agatactgatggtggcactgcaaactggctcaggctttctggtgaacaatctggtataattgcctaataagaacaatacgacttttcaccttgggtccagtgatttagctaaagcaacatacttgaagaaaataatttcaagctgggcacagtggctcacacctgtaatcccagcactttgggaggccaaggcagaaggatcgcttgaacctaggagtttgagagcagcctgagcaacatggcaaagccctgtctctacaaaaaaatacaaaaattagctgggtgtggtggtgcatgcctgcagtcccagttacttgggagggtgaggtgaaaggattgcttgtgcccgggaggttgagggtgcagtgaaccgtgactgcggcactgcacatcccatcctgggcaacagagtgagacactgtctcaaaaataagaaaaagaaaaagaaaacaaataaaaacaaatttctggctgggtgaagtggctcattcctataaacctagcactttgggagaccaaagtgg

SEQ ID NO: 99697 - DNA, 421 bp, Homo sapiens
tgtgtcctatctggattctacaaccctgggccggacacagtgagtcacacctgtaatcccagcactttgtgggggccaagatgggaggatcacttgaggagaaggagtttgagattttacatcccaaacatatttcaattctagtgatggctctctgcccactctgccctcattctatcccaggcaatcagtattacttgcccagactactataagagcttcctaattggtcttgatatttcctctgttttgctctctcccccaacatattgttctcaaagagacagagtgagattgtaaaaatataaatcaatcagactatgcctctgatttaaactattaaaagcctacccatttcagttggaataaaatccaaactcttcactgtgggcttattaagccaatttgtcctctttgtatc

SEQ ID NO: 99698 - DNA, 679 bp, Homo sapiens
ttcacagttcttttcttttagcacttcaaacatcaagttccactgtgctttggcctccgtttttctccatgagaaatctacaggcatttgaatcgatgttcctctatatgtaatgagttgtgtttctctggctgctttcaagattttttccttcatctttgcttctagtagtttgattatgatgtatctttatgtaggtatctttgacttcatcctgttttaagtttgcttttttaattagtaaattactttcagcaaatttgggaagcttttgtccatttttttcttcacatatttttctgcctcaatcttttctggtattctaataatgacatgcatgttagaccttttcatatataaatatagagaaatagtgtgtatgcatgggtgcgtgtgcacacaccccctcccccatctgcttagaatttctgtctaccctaggatgcttgtagagtatttttaaaaaaagaaaaaaagaacttctgtttttctattcacttcaagactgttcaactttatctcatggagcgtggatataatggctgttttaaaattccaatatgtttttcatactgcaattagcatttgttggttgttctttctcttgactattggccatatttccctgttactttgtatgttgagttaagtttggcttgtatcctggacattttgaata

SEQ ID NO: 99699 - DNA, 363 bp, Homo sapiens
aagattgcaccactgcactccagcctgggcaacacagtgagaccctgtctcagaaaaaaaaaagaaaacaaaaaaccccacaattttctatttccttaaaattgagggaaagtcacgtaaaaactagaagtataaattcttatgggtgggcaaatctgcgtaagagggtttgtttttgaagcatggcagatcagagaagacagttgctcttggaaagttctgtcagcatcacacgcatgcctttcctttccgagtttatctagatgcgctgcttctcagtagccggtcgctttgtccacgacggtcctgacacacaatgtgacatagcttcacacaacggccactttgaccctccctccctac

SEQ ID NO: 99700 - DNA, 808 bp, Homo sapiens
agtccaggctgaggtggtctcagatggagataagccacttcttaggaaccggagtaaaggtaactcttgctatgcaaagagactcacagcattttgtccctcccctagagatctgtggaactttgaacttgagagaaatgattcagggtatctggcagaagaaacttctaaacgacaaagcattcaagaggaagcagagcataaaagtttggaaaatttgcaggagatcatttcggaattttaaggtttaatgactggcctattggatgtgatagaaaagaaaaccccattttctggggagaaattcaagcccaatgcagaaatttgcacaagtaatgaggaatgttaatcaccaagataatgtggaaaatgtctgcagggcatgtcagagaacttcaaggcagcccctcccatcacaggcccaaggcctaggagggaaaaatggttccatgggcctgggccaggcacagggaccctctgctctgtgcagccttgggacatggtaccctgcatcccagctgcttcagctgcagcagtggctaaaaggggccaaggtacagcttgggccattgcttcagagggtgcaagccctactcactggtggcttccacatagtgttgagcctgtgggtgcacagaagtcaagaactgaggtatagaaacctctacttagattttagagcatgtatggaaacagctggatgtccaggaagaagtttgctgcaggggtggagccctcatggagaacacctgcttgggcagtatagaagggaaatgtggggtcggggcccccacacagagtctccacg

SEQ ID NO: 99701 - DNA, 678 bp, Homo sapiens
  misc_feature (388)..(388): n is a, c, g, or t
tcagaagctggttcaaaaggctccaaaatgcgttggaagcttcgtcttttaaaagggaatcccctgtaaatccccaggctcacttttgaaatttactaccagtggctttccctgaggcaaaattgtgcttgtctacaaccacggccgtttttaattttttaaaagccacctcctttttttctcctcaaactggggtgtattcattcacgctccaatcttagtgaatctttgtgtatcactaggctcccaggcccgcattctggttccgggctacttggcagcaccattttcaagggatagccaaagcacttaacttgttggtgggtttcacattgcttagtcctggtcaaatcgtcaaaagatccaagttcctcgtaatcatctttanagactgccccccacccccaccccccttattttccttttgtctcctggtgattaggccaaagtctgggagtaaggagaggattaggtacttaggagcaaagaaagaagtagcttggaacttttgagatgatccctaacatactgtactacttgcttttacaatgtgttagcagaaaccagtgggttataatgtagaatgatgtgctttctgcccaagtggtaattcatcttggtttgctatgttaaaactgtaaatacaacagaacattaataaatatctcttgtgtagca

SEQ ID NO: 99702 - DNA, 678 bp, Homo sapiens
ttactaaaattttggtctggaagcctcgatatggatacaggtcctatttgtttaaaaggagacccgtgtaaaccccccaggctaggaagaaattaactcccaggtgttttccccagtgcaaggttgcttatctcatacccgggcgtttataatttttagaggcaccgtcttggtgtcctcaacaatagggtgtaatcaattcgccttcccatctagagaattttgtgtaaatcacaaggcgcccttacccgtttaactgtctgaggggcacgttgcaagagcatctttcctgcgatatgggaagcccttaaccttgagatagagcttcacaatgcttacagccggaggaactatccatatgaaacaaatttcttgtgattatctttaaaggctatcccccacccccaccccccttattttccttttgtctcctggtgattaggccaaagtctgggagtaaggagaggattaggtacttaggagcaaagaaagaagtagcttggaacttttgagatgatccctaacatactgtactacttgcttttacaatgtgttagcagaaaccagtgggttataatgtagaatgatgtgctttctgcccaagtggtaattcatcttggtttgctatgttaaaactgtaaatacaacagaacattaataaatatctcttgtgtagca

SEQ ID NO: 99703 - DNA, 231 bp, Homo sapiens
  misc_feature (2)..(2): n is a, c, g, or t
  misc_feature (13)..(13): n is a, c, g, or t
  misc_feature (34)..(35): n is a, c, g, or t
  misc_feature (75)..(75): n is a, c, g, or t
  misc_feature (79)..(79): n is a, c, g, or t
ancaccataacantttattttccaaacgtatttnnccttaaaaaaaaaaatccacgcaaatagttgtctctaagncttnttcccaatagcttgcttttacaatgtgttagcagaaaccagtgggttataatgtagaatgatgtgctttctgcccaagtggtaattcatcttggtttgctatgttaaaactgtaaatacaacagaacattaataaatatctcttgtgtagca

SEQ ID NO: 99704 - DNA, 331 bp, Homo sapiens
tcaaaaccgtatcagaacagatgggcactctggttttttaaaagttatttcagtgtgttaaatgatttttggtttgtctgtggtttcatgatgaagctgaaccaaaatcatttgcaaatggttcatgcacacaagttttgttgtcaaatctattgaaaactggtctatcattaatattgttcaccatctgctttgtttgtttttaatgtttataatatgataatgtatatgttctgaaattagttgtttttataataaaaggaaggatattacccctttgatatctcatcaaaagcagccattcctctcattaattctgttacagttttaa

SEQ ID NO: 99705 - DNA, 1934 bp, Homo sapiens
agcgggtagtccccgcctcttccccaggggccgcgtcggagcctccgcggcggcggcggtgcttacagcctgagaagagcgtctcgcccgggagcggcggcggccatcgagacccacccaaggcgcgtccccctcggcctcccagcgctcccaagccgcagcggccgcgccccttcagctagctcgctcgctcgctctgcttccctgctgccggctgcgccatggcgttggcgttggcggcgctggcggcggtcgagccggcctgcggcagccggtaccagcagttgcagaatgaagaagagtctggagaacctgaacaggctgcaggtgatgctcctccaccttacagcagcatttctgcagagagcgcagcatattttgactacaaggatgagtctgggtttccaaagcccccatcttacaatgtagctacaacactgcccagttatgatgaagcggagaggaccaaggctgaagctactatccctttggttcctgggagagatgaggattttgtgggtcgggatgattttgatgatgctgaccagctgaggataggaaatgatgggattttcatgttaacttttttcatggcattcctctttaactggattgggtttttcctgtctttttgcctgaccacttcagctgcaggaaggtatggggccatttcaggatttggtctctctctaattaaatggatcctgattgtcaggttttccacctatttccctggatattttgatggtcagtactggctctggtgggtgttccttgttttaggctttctcctgtttctcagaggatttatcaattatgcaaaagttcggaagatgccagaaactttctcaaatctccccaggaccagagttctctttatttattaaagatgttttctggcaaaggccttcctgcatttatgaattctctctcaagaagcaagagaacacctgcaggaagtgaatcaagatgcagaacacagaggaataatcacctgctttaaaaaaataaagtactgttgaaaagatcatttctctctatttgttcctaggtgtaaaattttaatagttaatgcagaattctgtaatcattgaatcattagtggttaatgtttgaaaaagctcttgcaatcaagtctgtgatgtattaataatgccttatatattgtttgtagtcattttaagtagcatgagccatgtccctgtagtcggtagggggcagtcttgctttattcatcctccatctcaaaatgaacttggaattaaatattgtaagatatgtataatgctggccattttaaaggggttttctcaaaagttaaacttttgttatgactgtgtttttgcacataatccatatttgctgttcaagttaatctagaaatttattcaattctgtatgaacacctggaagcaaaatcatagtgcaaaaatacatttaaggtgtggtcaaaaataagtctttaattggtaaataataagcattaattttttatagcctgtattcacaattctgcggtaccttattgtacctaagggattctaaaggtgttgtcactgtataaaacagaaagcactaggatacaaatgaagcttaattactaaaatgtaattcttgacactctttctataattagcgttcttcacccccacccccacccccaccccccttattttccttttgtctcctggtgattaggccaaagtctgggagtaaggagaggattaggtacttaggagcaaagaaagaagtagcttggaacttttgagatgatccctaacatactgtactacttgcttttacaatgtgttagcagaaaccagtgggttataatgtagaatgatgtgctttctgcccaagtggtaattcatcttggtttgctatgttaaaactgtaaatacaacagaacattaataaatatctcttgtgtagca

SEQ ID NO: 99706 - DNA, 3602 bp, Homo sapiens
agcgggtagtccccgcctcttccccaggggccgcgtcggagcctccgcggcggcggcggtgcttacagcctgagaagagcgtctcgcccgggagcggcggcggccatcgagacccacccaaggcgcgtccccctcggcctcccagcgctcccaagccgcagcggccgcgccccttcagctagctcgctcgctcgctctgcttccctgctgccggctgcgccatggcgttggcgttggcggcgctggcggcggtcgagccggcctgcggcagccggtaccagcagttgcagaatgaagaagagtctggagaacctgaacaggctgcaggtgatgctcctccaccttacagcagcatttctgcagagagcgcagcatattttgactacaaggatgagtctgggtttccaaagcccccatcttacaatgtagctacaacactgcccagttatgatgaagcggagaggaccaaggctgaagctactatccctttggttcctgggagagatgaggattttgtgggtcgggatgattttgatgatgctgaccagctgaggataggaaatgatgggattttcatgttaacttttttcatggcattcctctttaactggattgggtttttcctgtctttttgcctgaccacttcagctgcaggaaggtatggggccatttcaggatttggtctctctctaattaaatggatcctgattgtcaggttttccacctatttccctggatattttgatggtcagtactggctctggtgggtgttccttgttttaggctttctcctgtttctcagaggatttatcaattatgcaaaagttcggaagatgccagaaactttctcaaatctccccaggaccagagttctctttatttattaaagatgttttctggcaaaggccttcctgcatttatgaattctctctcaagaagcaagagaacacctgcaggaagtgaatcaagatgcagaacacagaggaataatcacctgctttaaaaaaataaagtactgttgaaaagatcatttctctctatttgttcctaggtgtaaaattttaatagttaatgcagaattctgtaatcattgaatcattagtggttaatgtttgaaaaagctcttgcaatcaagtctgtgatgtattaataatgccttatatattgtttgtagtcattttaagtagcatgagccatgtccctgtagtcggtagggggcagtcttgctttattcatcctccatctcaaaatgaacttggaattaaatattgtaagatatgtataatgctggccattttaaaggggttttctcaaaagttaaacttttgttatgactgtgtttttgcacataatccatatttgctgttcaagttaatctagaaatttattcaattctgtatgaacacctggaagcaaaatcatagtgcaaaaatacatttaaggtgtggtcaaaaataagtctttaattggtaaataataagcattaattttttatagcctgtattcacaattctgcggtaccttattgtacctaagggattctaaaggtgttgtcactgtataaaacagaaagcactaggatacaaatgaagcttaattactaaaatgtaattcttgacactctttctataattagcgttcttcacccccacccccacccccaccccccttattttccttttgtctcctggtgattaggccaaagtctgggagtaaggagaggattaggtacttaggagcaaagaaagaagtagcttggaacttttgagatgatccctaacatactgtactacttgcttttacaatgtgttagcagaaaccagtgggttataatgtagaatgatgtgctttctgcccaagtggtaattcatcttggtttgctatgttaaaactgtaaatacaacagaacattaataaatatctcttgtgtagcaccttttactgtagattagtgcttaatttcttggcttgcatttgttgattgctaaggcaattttttctaatcttagggaatcattcagtagatgcgattaaaaaactaatgttgggtcaatttttttcttcattttcagcacaagaagtcctcttatatcctactaaatacattcctaaaaatgtatttgaacattggttctgtaaaagataatggactaaaaaagtagagaggagttgtagagatcttaaatcattctggaattcctaattatgcttcaatttttagacataattttagataatttatttccagtgttttctgcatgttctcatttgttctttttctcagttgaatgcaccaactggtttgagtcctgtgagcattcagtcagttgaaattaaagattcctcatttctcctgatttctattcttgtctcaatcttaaatttagagaccagttgtttttatgatatcagccatttgatttttttcattttctatttaagaaatatgaagaaaaaatacaccaagatggtcaaattactacacaaatcagcaccagcacagtctgatagctgcaaatgtccattcatctgctgtgtatgtatatccagaatcagcataggaagtcgttcaggatatcagtatataatgcacagaagtgtgggttgtttgaaagccaaacaggaaaattaggagcctcctggattgacatttcagtgatccctctaaccagtttatggattattatgaataatagtgtagtgtgttctttttcagaagttatatttgataatagagaagggagttttatggaagtttctttgaagatttttttttttccatttcgaatcagattatagcaacaatggagtttggaagtttgtatggcctataatgttctaagttccagaatgaaaagatctgtaacaatctgaatagatgtggacacatatagcagagagaactatgtaaattatcttgcagaacaaaatagaagggtcctaaatcacgttaactcaaacattgtagactagctttgtgtttattcttcaggtccttgcgccttatttggttttgtatattcaacgaactgaaatatttggaattcctatttctacgtatttggtggtccataagactttgtcaaatgtaaacctacagtttgatacgctttaaaatacctagttaagaggatgatttctctttaatcgtttaaatgttctgaaaattaaaatcttttgaggcacatgaagtgggcaccatatatcatctagagtccttactggtattcaggatgaaaatgttcacgctgcattaattgtcatttttctctcccatgttctttctcactttgatacgttaatactgataatggataaagagtgagtttttataataaatggttttggaaaggtattcataggaaccgcggttatttacttaaggttatggagtaaactagcttggaccttgggctgcaggacgactaggattcacccataacgacacagtgccctatgtttcttaacttcttgttgccatttgaaactctgtactcttatgtttaaagggttctgtatagccattttttttttcagaaagttacattgctttgtatagaaataaaaggcattattaaaatttgcttgttaaaaaatgataa

SEQ ID NO: 99707 - DNA, 3546 bp, Homo sapiens
agcgggtagtccccgcctcttccccaggggccgcgtcggagcctccgcggcggcggcggtgcttacagcctgagaagagcgtctcgcccgggagcggcggcggccatcgagacccacccaaggcgcgtccccctcggcctcccagcgctcccaagccgcagcggccgcgccccttcagctagctcgctcgctcgctctgcttccctgctgccggctgcgccatggcgttggcgttggcggcgctggcggcggtcgagccggcctgcggcagccggtaccagcagttgcagaatgaagaagagtctggagaacctgaacaggctgcaggtgatgctcctccaccttacagcagcatttctgcagagagcgcagcatattttgactacaaggatgagtctgggtttccaaagcccccatcttacaatgtagctacaacactgcccagttatgatgaagcggagaggaccaaggctgaagctactatccctttggttcctgggagagatgaggattttgtgggtcgggatgattttgatgatgctgaccagctgaggataggaaatgatgggattttcatgttaacttttttcatggcattcctctttaactggattgggtttttcctgtctttttgcctgaccacttcagctgcaggaaggtatggggccatttcaggatttggtctctctctaattaaatggatcctgattgtcaggttttccacctatttccctggatattttgatggtcagtactggctctggtgggtgttccttgttttaggctttctcctgtttctcagaggatttatcaattatgcaaaagttcggaagatgccagaaactttctcaaatctccccaggaccagagttctctttatttattaaagatgttttctggcaaaggccttcctgcatttatgaattctctctcaagaagcaagagaacacctgcaggaagtgaatcaagatgcagaacacagaggaataatcacctgctttaaaaaaataaagtactgttgaaaagatcatttctctctatttgttcctaggtgtaaaattttaatagttaatgcagaattctgtaatcattgaatcattagtggttaatgtttgaaaaagctcttgcaatcaagtctgtgatgtattaataatgccttatatattgtttgtagtcattttaagtagcatgagccatgtccctgtagtcggtagggggcagtcttgctttattcatcctccatctcaaaatgaacttggaattaaatattgtaagatatgtataatgctggccattttaaaggggttttctcaaaagttaaacttttgttatgactgtgtttttgcacataatccatatttgctgttcaagttaatctagaaatttattcaattctgtatgaacacctggaagcaaaatcatagtgcaaaaatacatttaaggtgtggtcaaaaataagtctttaattggtaaataataagcattaattttttatagcctgtattcacaattctgcggtaccttattgtacctaagggattctaaaggtgttgtcactgtataaaacagaaagcactaggatacaaatgaagcttaattactaaaatgtaattcttgacactctttctataattagcgttcttcacccccacccccacccccaccccccttattttccttttgtctcctggtgattaggccaaagtctgggagtaaggagaggattaggtacttaggagcaaagaaagaagtagcttggaacttttgagatgatccctaacatactgtactacttgcttttacaatgtgttagcagaaaccagtgggttataatgtagaatgatgtgctttctgcccaagtggtaattcatcttggtttgctatgttaaaactgtaaatacaacagaacattaataaatatctcttgtgtagcaccttttactgtagattagtgcttaatttcttggcttgcatttgttgattgctaaggcaattttttctaatcttagggaatcattcagtagatgcgattaaaaaactaatgttgggtcaatttttttcttcattttcagcacaagaagtcctcttatatcctactaaatacattcctaaaaatgtatttgaacattggttctgtaaaagataatggactaaaaaagtagagaggagttgtagagatcttaaatcattctggaattcctaattatgcttcaatttttagacataattttagataatttatttccagtgttttctgcatgttctcatttgttctttttctcagttgaatgcaccaactggtttgagtcctgtgagcattcagtcagttgaaattaaagattcctcatttctcctgatttctattcttgtctcaatcttaaatttagagaccagttgtttttatgatatcagccatttgatttttttcattttctatttaagaaatatgaagaaaaaatacaccaagatggtcaaattactacacaaatcagcaccagcacagtctgatagctgcaaatgtccattcatctgctgtgtatgtatatccagaatcagcataggaagtcgttcaggatatcagtatataatgcacagaagtgtgggttgtttgaaagccaaacaggaaaattaggagcctcctggattgacatttcagtgatccctctaaccagtttatggattattatgaataatagtgtagtgtgttctttttcagaagttatatttgataatagagaagggagttttatggaagtttctttgaagatttttttttttccatttcgaatcagattatagcaacaatggagtttggaagtttgtatggcctataatgttctaagttccagaatgaaaagatctgtaacaatctgaatagatgtggacacatatagcagagagaactatgtaaattatcttgcagaactattcttcaggtccttgcgccttatttggttttgtatattcaacgaactgaaatatttggaattcctatttctacgtatttggtggtccataagactttgtcaaatgtaaacctacagtttgatacgctttaaaatacctagttaagaggatgatttctctttaatcgtttaaatgttctgaaaattaaaatcttttgaggcacatgaagtgggcaccatatatcatctagagtccttactggtattcaggatgaaaatgttcacgctgcattaattgtcatttttctctcccatgttctttctcactttgatacgttaatactgataatggataaagagtgagtttttataataaatggttttggaaaggtattcataggaaccgcggttatttacttaaggttatggagtaaactagcttggaccttgggctgcaggacgactaggattcacccataacgacacagtgccctatgtttcttaacttcttgttgccatttgaaactctgtactcttatgtttaaagggttctgtatagccattttttttttcagaaagttacattgctttgtatagaaataaaaggcattattaaaatttgcttgttaaaaaatgataa

SEQ ID NO: 99708 - DNA, 3842 bp, Homo sapiens
  misc_feature (3670)..(3670): n is a, c, g, or t
agcgggtagtccccgcctcttccccaggggccgcgtcggagcctccgcggcggcggcggtgcttacagcctgagaagagcgtctcgcccgggagcggcggcggccatcgagacccacccaaggcgcgtccccctcggcctcccagcgctcccaagccgcagcggccgcgccccttcagctagctcgctcgctcgctctgcttccctgctgccggctgcgccatggcgttggcgttggcggcgctggcggcggtcgagccggcctgcggcagccggtaccagcagttgcagaatgaagaagagtctggagaacctgaacaggctgcaggtgatgctcctccaccttacagcagcatttctgcagagagcgcagcatattttgactacaaggatgagtctgggtttccaaagcccccatcttacaatgtagctacaacactgcccagttatgatgaagcggagaggaccaaggctgaagctactatccctttggttcctgggagagatgaggattttgtgggtcgggatgattttgatgatgctgaccagctgaggataggaaatgatgggattttcatgttaacttttttcatggcattcctctttaactggattgggtttttcctgtctttttgcctgaccacttcagctgcaggaaggtatggggccatttcaggatttggtctctctctaattaaatggatcctgattgtcaggttttccacctatttccctggatattttgatggtcagtactggctctggtgggtgttccttgttttaggctttctcctgtttctcagaggatttatcaattatgcaaaagttcggaagatgccagaaactttctcaaatctccccaggaccagagttctctttatttattaaagatgttttctggcaaaggccttcctgcatttatgaattctctctcaagaagcaagagaacacctgcaggaagtgaatcaagatgcagaacacagaggaataatcacctgctttaaaaaaataaagtactgttgaaaagatcatttctctctatttgttcctaggtgtaaaattttaatagttaatgcagaattctgtaatcattgaatcattagtggttaatgtttgaaaaagctcttgcaatcaagtctgtgatgtattaataatgccttatatattgtttgtagtcattttaagtagcatgagccatgtccctgtagtcggtagggggcagtcttgctttattcatcctccatctcaaaatgaacttggaattaaatattgtaagatatgtataatgctggccattttaaaggggttttctcaaaagttaaacttttgttatgactgtgtttttgcacataatccatatttgctgttcaagttaatctagaaatttattcaattctgtatgaacacctggaagcaaaatcatagtgcaaaaatacatttaaggtgtggtcaaaaataagtctttaattggtaaataataagcattaattttttatagcctgtattcacaattctgcggtaccttattgtacctaagggattctaaaggtgttgtcactgtataaaacagaaagcactaggatacaaatgaagcttaattactaaaatgtaattcttgacactctttctataattagcgttcttcacccccacccccacccccaccccccttattttccttttgtctcctggtgattaggccaaagtctgggagtaaggagaggattaggtacttaggagcaaagaaagaagtagcttggaacttttgagatgatccctaacatactgtactacttgcttttacaatgtgttagcagaaaccagtgggttataatgtagaatgatgtgctttctgcccaagtggtaattcatcttggtttgctatgttaaaactgtaaatacaacagaacattaataaatatctcttgtgtagcaccttttactgtagattagtgcttaatttcttggcttgcatttgttgattgctaaggcaattttttctaatcttagggaatcattcagtagatgcgattaaaaaactaatgttgggtcaatttttttcttcattttcagcacaagaagtcctcttatatcctactaaatacattcctaaaaatgtatttgaacattggttctgtaaaagataatggactaaaaaagtagagaggagttgtagagatcttaaatcattctggaattcctaattatgcttcaatttttagacataattttagataatttatttccagtgttttctgcatgttctcatttgttctttttctcagttgaatgcaccaactggtttgagtcctgtgagcattcagtcagttgaaattaaagattcctcatttctcctgatttctattcttgtctcaatcttaaatttagagaccagttgtttttatgatatcagccatttgatttttttcattttctatttaagaaatatgaagaaaaaatacaccaagatggtcaaattactacacaaatcagcaccagcacagtctgatagctgcaaatgtccattcatctgctgtgtatgtatatccagaatcagcataggaagtcgttcaggatatcagtatataatgcacagaagtgtgggttgtttgaaagccaaacaggaaaattaggagcctcctggattgacatttcagtgatccctctaaccagtttatggattattatgaataatagtgtagtgtgttctttttcagaagttatatttgataatagagaagggagttttatggaagtttctttgaagatttttttttttccatttcgaatcagattatagcaacaatggagtttggaagtttgtatggcctataatgttctaagttccagaatgaaaagatctgtaacaatctgaatagatgtggacacatatagcagagagaactatgtaaattatcttgcagaacaaaatagaagggtcctaaatcacgttaactcaaacattgtagactagctttgtgtttattcttcaggtccttgcgccttatttggttttgtatattcaacgaactgaaatatttggaattcctatttctacgtatttggtggtccataagactttgtcaaatgtaaacctacagtttgatacgctttaaaatacctagttaagaggatgatttctctttaatcgtttaaatgttctgaaaattaaaatcttttgaggcacatgaagtgggcaccatatatcatctagagtccttactggtattcaggatgaaaatgttcacgctgcattaattgtcatttttctctcccatgttctttctcactttgatacgttaatactgataatggataaagagtgagtttttataataaatggttttggaaaggtattcataggaaccgcggttatttacttaaggttatggagtaaactagcttggaccttgggctgcaggacgactaggattcacccataacgacacagtgccctatgtttcttaacttcttgttgccatttgaaactctgtactcttatgtttaaagggttctgtatagccattttttttttcagaaagttacattgctttgtatagaaataaaaggcattattaaaatttgcttgttaaaaaatgataaaaaaaaaagaaaaaaaaaacaaaaaaaaaaaaaacacaaaaaaacaaaaaaacaaaaagacaaaaaanaaaacacaaaagaaaaaacacgcaaaacgaggcacacaacccgacagaaaaaaaaaagaagcggtggggcgcggcgccgccgccgcgcgagacaagcctctccacacacacggtggggggggggggcccccaggcgaggagcgacgggcgggcgcacaggcgctcaaaggga

SEQ ID NO: 99709 - DNA, 2803 bp, Homo sapiens
agcgggtagtccccgcctcttccccaggggccgcgtcggagcctccgcggcggcggcggtgcttacagcctgagaagagcgtctcgcccgggagcggcggcggccatcgagacccacccaaggcgcgtccccctcggcctcccagcgctcccaagccgcagcggccgcgccccttcagctagctcgctcgctcgctctgcttccctgctgccggctgcgccatggcgttggcgttggcggcgctggcggcggtcgagccggcctgcggcagccggtaccagcagttgcagaatgaagaagagtctggagaacctgaacaggctgcaggtgatgctcctccaccttacagcagcatttctgcagagagcgcagcatattttgactacaaggatgagtctgggtttccaaagcccccatcttacaatgtagctacaacactgcccagttatgatgaagcggagaggaccaaggctgaagctactatccctttggttcctgggagagatgaggattttgtgggtcgggatgattttgatgatgctgaccagctgaggataggaaatgatgggattttcatgttaacttttttcatggcattcctctttaactggattgggtttttcctgtctttttgcctgaccacttcagctgcaggaaggtatggggccatttcaggatttggtctctctctaattaaatggatcctgattgtcaggttttccacctatttccctggatattttgatggtcagtactggctctggtgggtgttccttgttttaggctttctcctgtttctcagaggatttatcaattatgcaaaagttcggaagatgccagaaactttctcaaatctccccaggaccagagttctctttatttattaaagatgttttctggcaaaggccttcctgcatttatgaattctctctcaagaagcaagagaacacctgcaggaagtgaatcaagatgcagaacacagaggaataatcacctgctttaaaaaaataaagtactgttgaaaagatcatttctctctatttgttcctaggtgtaaaattttaatagttaatgcagaattctgtaatcattgaatcattagtggttaatgtttgaaaaagctcttgcaatcaagtctgtgatgtattaataatgccttatatattgtttgtagtcattttaagtagcatgagccatgtccctgtagtcggtagggggcagtcttgctttattcatcctccatctcaaaatgaacttggaattaaatattgtaagatatgtataatgctggccattttaaaggggttttctcaaaagttaaacttttgttatgactgtgtttttgcacataatccatatttgctgttcaagttaatctagaaatttattcaattctgtatgaacacctggaagcaaaatcatagtgcaaaaatacatttaaggtgtggtcaaaaataagtctttaattggtaaataataagcattaattttttatagcctgtattcacaattctgcggtaccttattgtacctaagggattctaaaggtgttgtcactgtataaaacagaaagcactaggatacaaatgaagcttaattactaaaatgtaattcttgacactctttctataattagcgttcttcacccccacccccacccccaccccccttattttccttttgtctcctggtgattaggccaaagtctgggagtaaggagaggattaggtacttaggagcaaagaaagaagtagcttggaacttttgagatgatccctaacatactgtactacttgcttttacaatgtgttagcagaaaccagtgggttataatgtagaatgatgtgctttctgcccaagtggtaattcatcttggtttgctatgttaaaactgtaaatacaacagaacattaataaatatctcttgtgtagcaccttttactgtagattagtgcttaatttcttggcttgcatttgttgattgctaaggcaattttttctaatcttagggaatcattcagtagatgcgattaaaaaactaatgttgggtcaatttttttcttcattttcagcacaagaagtcctcttatatcctactaaatacattcctaaaaatgtatttgaacattggttctgtaaaagataatggactaaaaaagtagagaggagttgtagagatcttaaatcattctggaattcctaattatgcttcaatttttagacataattttagataatttatttccagtgttttctgcatgttctcatttgttctttttctcagttgaatgcaccaactggtttgagtcctgtgagcattcagtcagttgaaattaaagattcctcatttctcctgatttctattcttgtctcaatcttaaatttagagaccagttgtttttatgatatcagccatttgatttttttcattttctatttaagaaatatgaagaaaaaatacaccaagatggtcaaattactacacaaatcagcaccagcacagtctgatagctgcaaatgtccattcatctgctgtgtatgtatatccagaatcagcataggaagtcgttcaggatatcagtatataatgcagagtgtgcgtgttgaagcaacagaaataggagctctggatggattcatgatccttaacagttatggtatttgatacagggggggttcaaagtattgataagaggaggtgaggttgaaattttccttgacaatcaacagggggtgtgcaaagtttcaaaaatatatggtgaattattaaggaacatgttgttggtgttgtttttttctaatt

SEQ ID NO: 99710 - DNA, 3540 bp, Homo sapiens
agcgggtagtccccgcctcttccccaggggccgcgtcggagcctccgcggcggcggcggtgcttacagcctgagaagagcgtctcgcccgggagcggcggcggccatcgagacccacccaaggcgcgtccccctcggcctcccagcgctcccaagccgcagcggccgcgccccttcagctagctcgctcgctcgctctgcttccctgctgccggctgcgccatggcgttggcgttggcggcgctggcggcggtcgagccggcctgcggcagccggtaccagcagttgcagaatgaagaagagtctggagaacctgaacaggctgcaggtgatgctcctccaccttacagcagcatttctgcagagagcgcagcatattttgactacaaggatgagtctgggtttccaaagcccccatcttacaatgtagctacaacactgcccagttatgatgaagcggagaggaccaaggctgaagctactatccctttggttcctgggagagatgaggattttgtgggtcgggatgattttgatgatgctgaccagctgaggataggaaatgatgggattttcatgttaacttttttcatggcattcctctttaactggattgggtttttcctgtctttttgcctgaccacttcagctgcaggaaggtatggggccatttcaggatttggtctctctctaattaaatggatcctgattgtcaggttttccacctatttccctggatattttgatggtcagtactggctctggtgggtgttccttgttttaggctttctcctgtttctcagaggatttatcaattatgcaaaagttcggaagatgccagaaactttctcaaatctccccaggaccagagttctctttatttattaaagatgttttctggcaaaggccttcctgcatttatgaattctctctcaagaagcaagagaacacctgcaggaagtgaatcaagatgcagaacacagaggaataatcacctgctttaaaaaaataaagtactgttgaaaagatcatttctctctatttgttcctaggtgtaaaattttaatagttaatgcagaattctgtaatcattgaatcattagtggttaatgtttgaaaaagctcttgcaatcaagtctgtgatgtattaataatgccttatatattgtttgtagtcattttaagtagcatgagccatgtccctgtagtcggtagggggcagtcttgctttattcatcctccatctcaaaatgaacttggaattaaatattgtaagatatgtataatgctggccattttaaaggggttttctcaaaagttaaacttttgttatgactgtgtttttgcacataatccatatttgctgttcaagttaatctagaaatttattcaattctgtatgaacacctggaagcaaaatcatagtgcaaaaatacatttaaggtgtggtcctgcggtaccttattgtacctaagggattctaaaggtgttgtcactgtataaaacagaaagcactaggatacaaatgaagcttaattactaaaatgtaattcttgacactctttctataattagcgttcttcacccccacccccacccccaccccccttattttccttttgtctcctggtgattaggccaaagtctgggagtaaggagaggattaggtacttaggagcaaagaaagaagtagcttggaacttttgagatgatccctaacatactgtactacttgcttttacaatgtgttagcagaaaccagtgggttataatgtagaatgatgtgctttctgcccaagtggtaattcatcttggtttgctatgttaaaactgtaaatacaacagaacattaataaatatctcttgtgtagcaccttttactgtagattagtgcttaatttcttggcttgcatttgttgattgctaaggcaattttttctaatcttagggaatcattcagtagatgcgattaaaaaactaatgttgggtcaatttttttcttcattttcagcacaagaagtcctcttatatcctactaaatacattcctaaaaatgtatttgaacattggttctgtaaaagataatggactaaaaaagtagagaggagttgtagagatcttaaatcattctggaattcctaattatgcttcaatttttagacataattttagataatttatttccagtgttttctgcatgttctcatttgttctttttctcagttgaatgcaccaactggtttgagtcctgtgagcattcagtcagttgaaattaaagattcctcatttctcctgatttctattcttgtctcaatcttaaatttagagaccagttgtttttatgatatcagccatttgatttttttcattttctatttaagaaatatgaagaaaaaatacaccaagatggtcaaattactacacaaatcagcaccagcacagtctgatagctgcaaatgtccattcatctgctgtgtatgtatatccagaatcagcataggaagtcgttcaggatatcagtatataatgcacagaagtgtgggttgtttgaaagccaaacaggaaaattaggagcctcctggattgacatttcagtgatccctctaaccagtttatggattattatgaataatagtgtagtgtgttctttttcagaagttatatttgataatagagaagggagttttatggaagtttctttgaagatttttttttttccatttcgaatcagattatagcaacaatggagtttggaagtttgtatggcctataatgttctaagttccagaatgaaaagatctgtaacaatctgaatagatgtggacacatatagcagagagaactatgtaaattatcttgcagaacaaaatagaagggtcctaaatcacgttaactcaaacattgtagactagctttgtgtttattcttcaggtccttgcgccttatttggttttgtatattcaacgaactgaaatatttggaattcctatttctacgtatttggtggtccataagactttgtcaaatgtaaacctacagtttgatacgctttaaaatacctagttaagaggatgatttctctttaatcgtttaaatgttctgaaaattaaaatcttttgaggcacatgaagtgggcaccatatatcatctagagtccttactggtattcaggatgaaaatgttcacgctgcattaattgtcatttttctctcccatgttctttctcactttgatacgttaatactgataatggataaagagtgagtttttataataaatggttttggaaaggtattcataggaaccgcggttatttacttaaggttatggagtaaactagcttggaccttgggctgcaggacgactaggattcacccataacgacacagtgccctatgtttcttaacttcttgttgccatttgaaactctgtactcttatgtttaaagggttctgtatagccattttttttttcagaaagttacattgctttgtatagaaataaaaggcattattaaaatttgcttgttaaaaaatgataa

SEQ ID NO: 99711 - DNA, 1914 bp, Homo sapiens
tcatcgctgttccagacagcgatgactcgagagcggcggtgcttacagcctgagaagagcgtctcgcccgggagcggcggcggccatcgagacccacccaaggcgcgtccccctcggcctcccagcgctcccaagccgcagcggccgcgccccttcagctagctcgctcgctcgctctgcttccctgctgccggctgcgccatggcgttggcgttggcggcgctggcggcggtcgagccggcctgcggcagccggtaccagcagttgcagaatgaagaagagtctggagaacctgaacaggctgcaggtgatgctcctccaccttacagcagcatttctgcagagagcgcagcatattttgactacaaggatgagtctgggtttccaaagcccccatcttacaatgtagctacaacactgcccagttatgatgaagcggagaggaccaaggctgaagctactatccctttggttcctgggagagatgaggattttgtgggtcgggatgattttgatgatgctgaccagctgaggataggaaatgatgggattttcatgttaacttttttcatggcattcctctttaactggattgggtttttcctgtctttttgcctgaccacttcagctgcaggaaggtatggggccatttcaggatttggtctctctctaattaaatggatcctgattgtcaggttttccacctatttccctggatattttgatggtcagtactggctctggtgggtgttccttgttttaggctttctcctgtttctcagaggatttatcaattatgcaaaagttcggaagatgccagaaactttctcaaatctccccaggaccagagttctctttatttattaaagatgttttctggcaaaggccttcctgcatttatgaattctctctcaagaagcaagagaacacctgcaggaagtgaatcaagatgcagaacacagaggaataatcacctgctttaaaaaaataaagtactgttgaaaagatcatttctctctatttgttcctaggtgtaaaattttaatagttaatgcagaattctgtaatcattgaatcattagtggttaatgtttgaaaaagctcttgcaatcaagtctgtgatgtattaataatgccttatatattgtttgtagtcattttaagtagcatgagccatgtccctgtagtcggtagggggcagtcttgctttattcatcctccatctcaaaatgaacttggaattaaatattgtaagatatgtataatgctggccattttaaaggggttttctcaaaagttaaacttttgttatgactgtgtttttgcacataatccatatttgctgttcaagttaatctagaaatttattcaattctgtatgaacacctggaagcaaaatcatagtgcaaaaatacatttaaggtgtggtcaaaaataagtctttaattggtaaataataagcattaattttttatagcctgtattcacaattctgcggtaccttattgtacctaagggattctaaaggtgttgtcactgtataaaacagaaagcactaggatacaaatgaagcttaattactaaaatgtaattcttgacactctttctataattagcgttcttcacccccacccccacccccaccccccttattttccttttgtctcctggtgattaggccaaagtctgggagtaaggagaggattaggtacttaggagcaaagaaagaagtagcttggaacttttgagatgatccctaacatactgtactacttgcttttacaatgtgttagcagaaaccagtgggttataatgtagaatgatgtgctttctgcccaagtggtaattcatcttggtttgctatgttaaaactgtaaatacaacagaacattaataaatatctcttgtgtagca

SEQ ID NO: 99712 - DNA, 2174 bp, Homo sapiens
  misc_feature (2002)..(2002): n is a, c, g, or t
agcgggtagtccccgcctcttccccaggggccgcgtcggagcctccgcggcggcggcggtgcttacagcctgagaagagcgtctcgcccgggagcggcggcggccatcgagacccacccaaggcgcgtccccctcggcctcccagcgctcccaagccgcagcggccgcgccccttcagctagctcgctcgctcgctctgcttccctgctgccggctgcgccatggcgttggcgttggcggcgctggcggcggtcgagccggcctgcggcagccggtaccagcagttgcagaatgaagaagagtctggagaacctgaacaggctgcaggtgatgctcctccaccttacagcagcatttctgcagagagcgcagcatattttgactacaaggatgagtctgggtttccaaagcccccatcttacaatgtagctacaacactgcccagttatgatgaagcggagaggaccaaggctgaagctactatccctttggttcctgggagagatgaggattttgtgggtcgggatgattttgatgatgctgaccagctgaggataggaaatgatgggattttcatgttaacttttttcatggcattcctctttaactggattgggtttttcctgtctttttgcctgaccacttcagctgcaggaaggtatggggccatttcaggatttggtctctctctaattaaatggatcctgattgtcaggttttccacctatttccctggatattttgatggtcagtactggctctggtgggtgttccttgttttaggctttctcctgtttctcagaggatttatcaattatgcaaaagttcggaagatgccagaaactttctcaaatctccccaggaccagagttctctttatttattaaagatgttttctggcaaaggccttcctgcatttatgaattctctctcaagaagcaagagaacacctgcaggaagtgaatcaagatgcagaacacagaggaataatcacctgctttaaaaaaataaagtactgttgaaaagatcatttctctctatttgttcctaggtgtaaaattttaatagttaatgcagaattctgtaatcattgaatcattagtggttaatgtttgaaaaagctcttgcaatcaagtctgtgatgtattaataatgccttatatattgtttgtagtcattttaagtagcatgagccatgtccctgtagtcggtagggggcagtcttgctttattcatcctccatctcaaaatgaacttggaattaaatattgtaagatatgtataatgctggccattttaaaggggttttctcaaaagttaaacttttgttatgactgtgtttttgcacataatccatatttgctgttcaagttaatctagaaatttattcaattctgtatgaacacctggaagcaaaatcatagtgcaaaaatacatttaaggtgtggtcaaaaataagtctttaattggtaaataataagcattaattttttatagcctgtattcacaattctgcggtaccttattgtacctaagggattctaaaggtgttgtcactgtataaaacagaaagcactaggatacaaatgaagcttaattactaaaatgtaattcttgacactctttctataattagcgttcttcacccccacccccacccccaccccccttattttccttttgtctcctggtgattaggccaaagtctgggagtaaggagaggattaggtacttaggagcaaagaaagaagtagcttggaacttttgagatgatccctaacatactgtactacttgcttttacaatgtgttagcagaaaccagtgggttataatgtagaatgatgtgctttctgcccaagtggtaattcatcttggtttgctatgttaaaactgtaaatacaacagaacattaataaatatctcttgtgtagcaaaaaaaaagaaaaaaaaaacaaaaaaaaaaaaaacacaaaaaaacaaaaaaacaaaaagacaaaaaanaaaacacaaaagaaaaaacacgcaaaacgaggcacacaacccgacagaaaaaaaaaagaagcggtggggcgcggcgccgccgccgcgcgagacaagcctctccacacacacggtggggggggggggcccccaggcgaggagcgacgggcgggcgcacaggcgctcaaaggga

SEQ ID NO: 99713 - DNA, 3496 bp, Homo sapiens
agcgggtagtccccgcctcttccccaggggccgcgtcggagcctccgcggcggcggcggtgcttacagcctgagaagagcgtctcgcccgggagcggcggcggccatcgagacccacccaaggcgcgtccccctcggcctcccagcgctcccaagccgcagcggccgcgccccttcagctagctcgctcgctcgctctgcttccctgctgccggctgcgccatggcgttggcgttggcggcgctggcggcggtcgagccggcctgcggcagccggtaccagcagttgcagaatgaagaagagtctggagaacctgaacaggctgcaggtgatgctcctccaccttacagcagcatttctgcagagagcgcagcatattttgactacaaggatgagtctgggtttccaaagcccccatcttacaatgtagctacaacactgcccagttatgatgaagcggagaggaccaaggctgaagctactatccctttggttcctgggagagatgaggattttgtgggtcgggatgattttgatgatgctgaccagctgaggataggaaatgatgggattttcatgttaacttttttcatggcattcctctttaactggattgggtttttcctgtctttttgcctgaccacttcagctgcaggaaggtatggggccatttcaggatttggtctctctctaattaaatggatcctgattgtcaggttttccacctatttccctggatattttgatggtcagtactggctctggtgggtgttccttgttttagatgttttctggcaaaggccttcctgcatttatgaattctctctcaagaagcaagagaacacctgcaggaagtgaatcaagatgcagaacacagaggaataatcacctgctttaaaaaaataaagtactgttgaaaagatcatttctctctatttgttcctaggtgtaaaattttaatagttaatgcagaattctgtaatcattgaatcattagtggttaatgtttgaaaaagctcttgcaatcaagtctgtgatgtattaataatgccttatatattgtttgtagtcattttaagtagcatgagccatgtccctgtagtcggtagggggcagtcttgctttattcatcctccatctcaaaatgaacttggaattaaatattgtaagatatgtataatgctggccattttaaaggggttttctcaaaagttaaacttttgttatgactgtgtttttgcacataatccatatttgctgttcaagttaatctagaaatttattcaattctgtatgaacacctggaagcaaaatcatagtgcaaaaatacatttaaggtgtggtcaaaaataagtctttaattggtaaataataagcattaattttttatagcctgtattcacaattctgcggtaccttattgtacctaagggattctaaaggtgttgtcactgtataaaacagaaagcactaggatacaaatgaagcttaattactaaaatgtaattcttgacactctttctataattagcgttcttcacccccacccccacccccaccccccttattttccttttgtctcctggtgattaggccaaagtctgggagtaaggagaggattaggtacttaggagcaaagaaagaagtagcttggaacttttgagatgatccctaacatactgtactacttgcttttacaatgtgttagcagaaaccagtgggttataatgtagaatgatgtgctttctgcccaagtggtaattcatcttggtttgctatgttaaaactgtaaatacaacagaacattaataaatatctcttgtgtagcaccttttactgtagattagtgcttaatttcttggcttgcatttgttgattgctaaggcaattttttctaatcttagggaatcattcagtagatgcgattaaaaaactaatgttgggtcaatttttttcttcattttcagcacaagaagtcctcttatatcctactaaatacattcctaaaaatgtatttgaacattggttctgtaaaagataatggactaaaaaagtagagaggagttgtagagatcttaaatcattctggaattcctaattatgcttcaatttttagacataattttagataatttatttccagtgttttctgcatgttctcatttgttctttttctcagttgaatgcaccaactggtttgagtcctgtgagcattcagtcagttgaaattaaagattcctcatttctcctgatttctattcttgtctcaatcttaaatttagagaccagttgtttttatgatatcagccatttgatttttttcattttctatttaagaaatatgaagaaaaaatacaccaagatggtcaaattactacacaaatcagcaccagcacagtctgatagctgcaaatgtccattcatctgctgtgtatgtatatccagaatcagcataggaagtcgttcaggatatcagtatataatgcacagaagtgtgggttgtttgaaagccaaacaggaaaattaggagcctcctggattgacatttcagtgatccctctaaccagtttatggattattatgaataatagtgtagtgtgttctttttcagaagttatatttgataatagagaagggagttttatggaagtttctttgaagatttttttttttccatttcgaatcagattatagcaacaatggagtttggaagtttgtatggcctataatgttctaagttccagaatgaaaagatctgtaacaatctgaatagatgtggacacatatagcagagagaactatgtaaattatcttgcagaacaaaatagaagggtcctaaatcacgttaactcaaacattgtagactagctttgtgtttattcttcaggtccttgcgccttatttggttttgtatattcaacgaactgaaatatttggaattcctatttctacgtatttggtggtccataagactttgtcaaatgtaaacctacagtttgatacgctttaaaatacctagttaagaggatgatttctctttaatcgtttaaatgttctgaaaattaaaatcttttgaggcacatgaagtgggcaccatatatcatctagagtccttactggtattcaggatgaaaatgttcacgctgcattaattgtcatttttctctcccatgttctttctcactttgatacgttaatactgataatggataaagagtgagtttttataataaatggttttggaaaggtattcataggaaccgcggttatttacttaaggttatggagtaaactagcttggaccttgggctgcaggacgactaggattcacccataacgacacagtgccctatgtttcttaacttcttgttgccatttgaaactctgtactcttatgtttaaagggttctgtatagccattttttttttcagaaagttacattgctttgtatagaaataaaaggcattattaaaatttgcttgttaaaaaatgataa

SEQ ID NO: 99714 - DNA, 3473 bp, Homo sapiens
agcgggtagtccccgcctcttccccaggggccgcgtcggagcctccgcggcggcggcggtgcttacagcctgagaagagcgtctcgcccgggagcggcggcggccatcgagacccacccaaggcgcgtccccctcggcctcccagcgctcccaagccgcagcggccgcgccccttcagctagctcgctcgctcgctctgcttccctgctgccggctgcgccatggcgttggcgttggcggcgctggcggcggtcgagccggcctgcggcagccggtaccagcagttgcagaatgaagaagagtctggagaacctgaacaggctgcaggtgatgctcctccaccttacagcagcatttctgcagagagcgcagcatattttgactacaaggatgagtctgggtttccaaagcccccatcttacaatgtagctacaacactgcccagttatgatgaagcggagaggaccaaggctgaagctactatccctttggttcctgggagagatgaggattttgtgggtcgggatgattttgatgatgctgaccagctgaggataggaaatgatgggattttcatgttaacttttttcatggcattcctctttaactggattgggtttttcctgtctttttgcctgaccacttcagctgcaggaaggtatggggccatttcaggatttggtctctctctaattaaatggatcctgattgtcaggttttccacctatttccctggatattttgatggtcagtactggctctggtgggtgttccttgttttagtgcatttatgaattctctctcaagaagcaagagaacacctgcaggaagtgaatcaagatgcagaacacagaggaataatcacctgctttaaaaaaataaagtactgttgaaaagatcatttctctctatttgttcctaggtgtaaaattttaatagttaatgcagaattctgtaatcattgaatcattagtggttaatgtttgaaaaagctcttgcaatcaagtctgtgatgtattaataatgccttatatattgtttgtagtcattttaagtagcatgagccatgtccctgtagtcggtagggggcagtcttgctttattcatcctccatctcaaaatgaacttggaattaaatattgtaagatatgtataatgctggccattttaaaggggttttctcaaaagttaaacttttgttatgactgtgtttttgcacataatccatatttgctgttcaagttaatctagaaatttattcaattctgtatgaacacctggaagcaaaatcatagtgcaaaaatacatttaaggtgtggtcaaaaataagtctttaattggtaaataataagcattaattttttatagcctgtattcacaattctgcggtaccttattgtacctaagggattctaaaggtgttgtcactgtataaaacagaaagcactaggatacaaatgaagcttaattactaaaatgtaattcttgacactctttctataattagcgttcttcacccccacccccacccccaccccccttattttccttttgtctcctggtgattaggccaaagtctgggagtaaggagaggattaggtacttaggagcaaagaaagaagtagcttggaacttttgagatgatccctaacatactgtactacttgcttttacaatgtgttagcagaaaccagtgggttataatgtagaatgatgtgctttctgcccaagtggtaattcatcttggtttgctatgttaaaactgtaaatacaacagaacattaataaatatctcttgtgtagcaccttttactgtagattagtgcttaatttcttggcttgcatttgttgattgctaaggcaattttttctaatcttagggaatcattcagtagatgcgattaaaaaactaatgttgggtcaatttttttcttcattttcagcacaagaagtcctcttatatcctactaaatacattcctaaaaatgtatttgaacattggttctgtaaaagataatggactaaaaaagtagagaggagttgtagagatcttaaatcattctggaattcctaattatgcttcaatttttagacataattttagataatttatttccagtgttttctgcatgttctcatttgttctttttctcagttgaatgcaccaactggtttgagtcctgtgagcattcagtcagttgaaattaaagattcctcatttctcctgatttctattcttgtctcaatcttaaatttagagaccagttgtttttatgatatcagccatttgatttttttcattttctatttaagaaatatgaagaaaaaatacaccaagatggtcaaattactacacaaatcagcaccagcacagtctgatagctgcaaatgtccattcatctgctgtgtatgtatatccagaatcagcataggaagtcgttcaggatatcagtatataatgcacagaagtgtgggttgtttgaaagccaaacaggaaaattaggagcctcctggattgacatttcagtgatccctctaaccagtttatggattattatgaataatagtgtagtgtgttctttttcagaagttatatttgataatagagaagggagttttatggaagtttctttgaagatttttttttttccatttcgaatcagattatagcaacaatggagtttggaagtttgtatggcctataatgttctaagttccagaatgaaaagatctgtaacaatctgaatagatgtggacacatatagcagagagaactatgtaaattatcttgcagaacaaaatagaagggtcctaaatcacgttaactcaaacattgtagactagctttgtgtttattcttcaggtccttgcgccttatttggttttgtatattcaacgaactgaaatatttggaattcctatttctacgtatttggtggtccataagactttgtcaaatgtaaacctacagtttgatacgctttaaaatacctagttaagaggatgatttctctttaatcgtttaaatgttctgaaaattaaaatcttttgaggcacatgaagtgggcaccatatatcatctagagtccttactggtattcaggatgaaaatgttcacgctgcattaattgtcatttttctctcccatgttctttctcactttgatacgttaatactgataatggataaagagtgagtttttataataaatggttttggaaaggtattcataggaaccgcggttatttacttaaggttatggagtaaactagcttggaccttgggctgcaggacgactaggattcacccataacgacacagtgccctatgtttcttaacttcttgttgccatttgaaactctgtactcttatgtttaaagggttctgtatagccattttttttttcagaaagttacattgctttgtatagaaataaaaggcattattaaaatttgcttgttaaaaaatgataa

SEQ ID NO: 99715 - DNA, 1268 bp, Homo sapiens
  misc_feature (1096)..(1096): n is a, c, g, or t
agcgggtagtccccgcctcttccccaggggccgcgtcggagcctccgcggcggcggcggtgcttacagcctgagaagagcgtctcgcccgggagcggcggcggccatcgagacccacccaaggcgcgtccccctcggcctcccagcgctcccaagccgcagcggccgcgccccttcagctagctcgctcgctcgctctgcttccctgctgccggctgcgccatggcgttggcgttggcggcgctggcggcggtcgagccggcctgcggcagccggtaccagcagttgcagaatgaagaagagtctggagaacctgaacaggctgcaggtgatgctcctccaccttacagcagcatttctgcagagagcgcagcatattttgactacaaggatgagtctgggtttccaaagcccccatcttacaatgtagctacaacactgcccagttatgatgaagcggagaggaccaaggctgaagctactatccctttggttcctgggagagatgaggattttgtgggtcgggatgattttgatgatgctgaccagctgaggataggaaatgatgggattttcatgttaacttttttcatggcattcctctttaactggattgggtttttcctgtctttttgcctgaccacttcagctgcaggaaggtatggggccatttcaggatttggtctctctctaattaaatggatcctgattgtcaggttttccacctatttccctggatattttgatggtcagtactggctctggtgggtgttccttgttttaggctttctcctgtttctcagaggatttatcaattatgcaaaagttcggaagatgccagaaactttctcaaatctccccaggaccagagttctctttatttattaaagatgttttctggcaaaggccttcctgcatttatgaattctctctcaagaagcaagagaacacctgcaggaagtgaatcaagatgcagaacacagaggaataatcacctgctttaaaaaaataaagtactgttgaaaagataaaaaaaagaaaaaaaaaacaaaaaaaaaaaaaacacaaaaaaacaaaaaaacaaaaagacaaaaaanaaaacacaaaagaaaaaacacgcaaaacgaggcacacaacccgacagaaaaaaaaaagaagcggtggggcgcggcgccgccgccgcgcgagacaagcctctccacacacacggtggggggggggggcccccaggcgaggagcgacgggcgggcgcacaggcgctcaaaggga

SEQ ID NO: 99716 - DNA, 3546 bp, Homo sapiens
agcgggtagtccccgcctcttccccaggggccgcgtcggagcctccgcggcggcggcggtgcttacagcctgagaagagcgtctcgcccgggagcggcggcggccatcgagacccccttcagctagctcgctcgctcgctctgcttccctgctgccggctgcgccatggcgttggcgttggcggcgctggcggcggtcgagccggcctgcggcagccggtaccagcagttgcagaatgaagaagagtctggagaacctgaacaggctgcaggtgatgctcctccaccttacagcagcatttctgcagagagcgcagcatattttgactacaaggatgagtctgggtttccaaagcccccatcttacaatgtagctacaacactgcccagttatgatgaagcggagaggaccaaggctgaagctactatccctttggttcctgggagagatgaggattttgtgggtcgggatgattttgatgatgctgaccagctgaggataggaaatgatgggattttcatgttaacttttttcatggcattcctctttaactggattgggtttttcctgtctttttgcctgaccacttcagctgcaggaaggtatggggccatttcaggatttggtctctctctaattaaatggatcctgattgtcaggttttccacctatttccctggatattttgatggtcagtactggctctggtgggtgttccttgttttaggctttctcctgtttctcagaggatttatcaattatgcaaaagttcggaagatgccagaaactttctcaaatctccccaggaccagagttctctttatttattaaagatgttttctggcaaaggccttcctgcatttatgaattctctctcaagaagcaagagaacacctgcaggaagtgaatcaagatgcagaacacagaggaataatcacctgctttaaaaaaataaagtactgttgaaaagatcatttctctctatttgttcctaggtgtaaaattttaatagttaatgcagaattctgtaatcattgaatcattagtggttaatgtttgaaaaagctcttgcaatcaagtctgtgatgtattaataatgccttatatattgtttgtagtcattttaagtagcatgagccatgtccctgtagtcggtagggggcagtcttgctttattcatcctccatctcaaaatgaacttggaattaaatattgtaagatatgtataatgctggccattttaaaggggttttctcaaaagttaaacttttgttatgactgtgtttttgcacataatccatatttgctgttcaagttaatctagaaatttattcaattctgtatgaacacctggaagcaaaatcatagtgcaaaaatacatttaaggtgtggtcaaaaataagtctttaattggtaaataataagcattaattttttatagcctgtattcacaattctgcggtaccttattgtacctaagggattctaaaggtgttgtcactgtataaaacagaaagcactaggatacaaatgaagcttaattactaaaatgtaattcttgacactctttctataattagcgttcttcacccccacccccacccccaccccccttattttccttttgtctcctggtgattaggccaaagtctgggagtaaggagaggattaggtacttaggagcaaagaaagaagtagcttggaacttttgagatgatccctaacatactgtactacttgcttttacaatgtgttagcagaaaccagtgggttataatgtagaatgatgtgctttctgcccaagtggtaattcatcttggtttgctatgttaaaactgtaaatacaacagaacattaataaatatctcttgtgtagcaccttttactgtagattagtgcttaatttcttggcttgcatttgttgattgctaaggcaattttttctaatcttagggaatcattcagtagatgcgattaaaaaactaatgttgggtcaatttttttcttcattttcagcacaagaagtcctcttatatcctactaaatacattcctaaaaatgtatttgaacattggttctgtaaaagataatggactaaaaaagtagagaggagttgtagagatcttaaatcattctggaattcctaattatgcttcaatttttagacataattttagataatttatttccagtgttttctgcatgttctcatttgttctttttctcagttgaatgcaccaactggtttgagtcctgtgagcattcagtcagttgaaattaaagattcctcatttctcctgatttctattcttgtctcaatcttaaatttagagaccagttgtttttatgatatcagccatttgatttttttcattttctatttaagaaatatgaagaaaaaatacaccaagatggtcaaattactacacaaatcagcaccagcacagtctgatagctgcaaatgtccattcatctgctgtgtatgtatatccagaatcagcataggaagtcgttcaggatatcagtatataatgcacagaagtgtgggttgtttgaaagccaaacaggaaaattaggagcctcctggattgacatttcagtgatccctctaaccagtttatggattattatgaataatagtgtagtgtgttctttttcagaagttatatttgataatagagaagggagttttatggaagtttctttgaagatttttttttttccatttcgaatcagattatagcaacaatggagtttggaagtttgtatggcctataatgttctaagttccagaatgaaaagatctgtaacaatctgaatagatgtggacacatatagcagagagaactatgtaaattatcttgcagaacaaaatagaagggtcctaaatcacgttaactcaaacattgtagactagctttgtgtttattcttcaggtccttgcgccttatttggttttgtatattcaacgaactgaaatatttggaattcctatttctacgtatttggtggtccataagactttgtcaaatgtaaacctacagtttgatacgctttaaaatacctagttaagaggatgatttctctttaatcgtttaaatgttctgaaaattaaaatcttttgaggcacatgaagtgggcaccatatatcatctagagtccttactggtattcaggatgaaaatgttcacgctgcattaattgtcatttttctctcccatgttctttctcactttgatacgttaatactgataatggataaagagtgagtttttataataaatggttttggaaaggtattcataggaaccgcggttatttacttaaggttatggagtaaactagcttggaccttgggctgcaggacgactaggattcacccataacgacacagtgccctatgtttcttaacttcttgttgccatttgaaactctgtactcttatgtttaaagggttctgtatagccattttttttttcagaaagttacattgctttgtatagaaataaaaggcattattaaaatttgcttgttaaaaaatgataa

SEQ ID NO: 99717 - DNA, 3678 bp, Homo sapiens
tatttttagtagagattgggttttgccatgttggccaggatggcaaaatttaatttttaatggccgtttagtagtcctttgtgtgatgtactataatttatttgtctcctatgattggaatttaggttgtttctaatttttgctgacacaacacttatatgtacccattttgcctctttgaatatttccatagaataacttcctgggattagaatacttttcttaaaggatttgtgcatttcaaggctttcaaaatacgttgccaaatagctttcgagaaaggctatttatttcagtttttgggttcttatctttctaattggctttatgcttacattaaaatatgaaatttttatttagttgcagaatgaagaagagtctggagaacctgaacaggctgcaggtgatgctcctccaccttacagcagcatttctgcagagagcgcagcatattttgactacaaggatgagtctgggtttccaaagcccccatcttacaatgtagctacaacactgcccagttatgatgaagcggagaggaccaaggctgaagctactatccctttggttcctgggagagatgaggattttgtgggtcgggatgattttgatgatgctgaccagctgaggataggaaatgatgggattttcatgttaacttttttcatggcattcctctttaactggattgggtttttcctgtctttttgcctgaccacttcagctgcaggaaggtatggggccatttcaggatttggtctctctctaattaaatggatcctgattgtcaggttttccacctatttccctggatattttgatggtcagtactggctctggtgggtgttccttgttttaggctttctcctgtttctcagaggatttatcaattatgcaaaagttcggaagatgccagaaactttctcaaatctccccaggaccagagttctctttatttattaaagatgttttctggcaaaggccttcctgcatttatgaattctctctcaagaagcaagagaacacctgcaggaagtgaatcaagatgcagaacacagaggaataatcacctgctttaaaaaaataaagtactgttgaaaagatcatttctctctatttgttcctaggtgtaaaattttaatagttaatgcagaattctgtaatcattgaatcattagtggttaatgtttgaaaaagctcttgcaatcaagtctgtgatgtattaataatgccttatatattgtttgtagtcattttaagtagcatgagccatgtccctgtagtcggtagggggcagtcttgctttattcatcctccatctcaaaatgaacttggaattaaatattgtaagatatgtataatgctggccattttaaaggggttttctcaaaagttaaacttttgttatgactgtgtttttgcacataatccatatttgctgttcaagttaatctagaaatttattcaattctgtatgaacacctggaagcaaaatcatagtgcaaaaatacatttaaggtgtggtcaaaaataagtctttaattggtaaataataagcattaattttttatagcctgtattcacaattctgcggtaccttattgtacctaagggattctaaaggtgttgtcactgtataaaacagaaagcactaggatacaaatgaagcttaattactaaaatgtaattcttgacactctttctataattagcgttcttcacccccacccccacccccaccccccttattttccttttgtctcctggtgattaggccaaagtctgggagtaaggagaggattaggtacttaggagcaaagaaagaagtagcttggaacttttgagatgatccctaacatactgtactacttgcttttacaatgtgttagcagaaaccagtgggttataatgtagaatgatgtgctttctgcccaagtggtaattcatcttggtttgctatgttaaaactgtaaatacaacagaacattaataaatatctcttgtgtagcaccttttactgtagattagtgcttaatttcttggcttgcatttgttgattgctaaggcaattttttctaatcttagggaatcattcagtagatgcgattaaaaaactaatgttgggtcaatttttttcttcattttcagcacaagaagtcctcttatatcctactaaatacattcctaaaaatgtatttgaacattggttctgtaaaagataatggactaaaaaagtagagaggagttgtagagatcttaaatcattctggaattcctaattatgcttcaatttttagacataattttagataatttatttccagtgttttctgcatgttctcatttgttctttttctcagttgaatgcaccaactggtttgagtcctgtgagcattcagtcagttgaaattaaagattcctcatttctcctgatttctattcttgtctcaatcttaaatttagagaccagttgtttttatgatatcagccatttgatttttttcattttctatttaagaaatatgaagaaaaaatacaccaagatggtcaaattactacacaaatcagcaccagcacagtctgatagctgcaaatgtccattcatctgctgtgtatgtatatccagaatcagcataggaagtcgttcaggatatcagtatataatgcacagaagtgtgggttgtttgaaagccaaacaggaaaattaggagcctcctggattgacatttcagtgatccctctaaccagtttatggattattatgaataatagtgtagtgtgttctttttcagaagttatatttgataatagagaagggagttttatggaagtttctttgaagatttttttttttccatttcgaatcagattatagcaacaatggagtttggaagtttgtatggcctataatgttctaagttccagaatgaaaagatctgtaacaatctgaatagatgtggacacatatagcagagagaactatgtaaattatcttgcagaacaaaatagaagggtcctaaatcacgttaactcaaacattgtagactagctttgtgtttattcttcaggtccttgcgccttatttggttttgtatattcaacgaactgaaatatttggaattcctatttctacgtatttggtggtccataagactttgtcaaatgtaaacctacagtttgatacgctttaaaatacctagttaagaggatgatttctctttaatcgtttaaatgttctgaaaattaaaatcttttgaggcacatgaagtgggcaccatatatcatctagagtccttactggtattcaggatgaaaatgttcacgctgcattaattgtcatttttctctcccatgttctttctcactttgatacgttaatactgataatggataaagagtgagtttttataataaatggttttggaaaggtattcataggaaccgcggttatttacttaaggttatggagtaaactagcttggaccttgggctgcaggacgactaggattcacccataacgacacagtgccctatgtttcttaacttcttgttgccatttgaaactctgtactcttatgtttaaagggttctgtatagccattttttttttcagaaagttacattgctttgtatagaaataaaaggcattattaaaatttgcttgttaaaaaatgataa

SEQ ID NO: 99718 - DNA, 3471 bp, Homo sapiens
agcgggtagtccccgcctcttccccaggggccgcgtcggagcctccgcggcggcggcggtgcttacagcctgagaagagcgtctcgcccgggagcggcggcggccatcgagacccacccaaggcgcgtccccctcggcctcccagcgctcccaagccgcagcggccgcgccccttcagctagctcgctcgctcgctctgcttccctgctgccggctgcgccatggcgttggcgttggcggcgctggcggcggtcgagccggcctgcggcagccggtaccagcagttgcagaatgaagaagagtctggagaacctgaacaggctgcaggtgatgctcctccaccttacagcagcatttctgcagagagcgcaggatgaggattttgtgggtcgggatgattttgatgatgctgaccagctgaggataggaaatgatgggattttcatgttaacttttttcatggcattcctctttaactggattgggtttttcctgtctttttgcctgaccacttcagctgcaggaaggtatggggccatttcaggatttggtctctctctaattaaatggatcctgattgtcaggttttccacctatttccctggatattttgatggtcagtactggctctggtgggtgttccttgttttaggctttctcctgtttctcagaggatttatcaattatgcaaaagttcggaagatgccagaaactttctcaaatctccccaggaccagagttctctttatttattaaagatgttttctggcaaaggccttcctgcatttatgaattctctctcaagaagcaagagaacacctgcaggaagtgaatcaagatgcagaacacagaggaataatcacctgctttaaaaaaataaagtactgttgaaaagatcatttctctctatttgttcctaggtgtaaaattttaatagttaatgcagaattctgtaatcattgaatcattagtggttaatgtttgaaaaagctcttgcaatcaagtctgtgatgtattaataatgccttatatattgtttgtagtcattttaagtagcatgagccatgtccctgtagtcggtagggggcagtcttgctttattcatcctccatctcaaaatgaacttggaattaaatattgtaagatatgtataatgctggccattttaaaggggttttctcaaaagttaaacttttgttatgactgtgtttttgcacataatccatatttgctgttcaagttaatctagaaatttattcaattctgtatgaacacctggaagcaaaatcatagtgcaaaaatacatttaaggtgtggtcaaaaataagtctttaattggtaaataataagcattaattttttatagcctgtattcacaattctgcggtaccttattgtacctaagggattctaaaggtgttgtcactgtataaaacagaaagcactaggatacaaatgaagcttaattactaaaatgtaattcttgacactctttctataattagcgttcttcacccccacccccacccccaccccccttattttccttttgtctcctggtgattaggccaaagtctgggagtaaggagaggattaggtacttaggagcaaagaaagaagtagcttggaacttttgagatgatccctaacatactgtactacttgcttttacaatgtgttagcagaaaccagtgggttataatgtagaatgatgtgctttctgcccaagtggtaattcatcttggtttgctatgttaaaactgtaaatacaacagaacattaataaatatctcttgtgtagcaccttttactgtagattagtgcttaatttcttggcttgcatttgttgattgctaaggcaattttttctaatcttagggaatcattcagtagatgcgattaaaaaactaatgttgggtcaatttttttcttcattttcagcacaagaagtcctcttatatcctactaaatacattcctaaaaatgtatttgaacattggttctgtaaaagataatggactaaaaaagtagagaggagttgtagagatcttaaatcattctggaattcctaattatgcttcaatttttagacataattttagataatttatttccagtgttttctgcatgttctcatttgttctttttctcagttgaatgcaccaactggtttgagtcctgtgagcattcagtcagttgaaattaaagattcctcatttctcctgatttctattcttgtctcaatcttaaatttagagaccagttgtttttatgatatcagccatttgatttttttcattttctatttaagaaatatgaagaaaaaatacaccaagatggtcaaattactacacaaatcagcaccagcacagtctgatagctgcaaatgtccattcatctgctgtgtatgtatatccagaatcagcataggaagtcgttcaggatatcagtatataatgcacagaagtgtgggttgtttgaaagccaaacaggaaaattaggagcctcctggattgacatttcagtgatccctctaaccagtttatggattattatgaataatagtgtagtgtgttctttttcagaagttatatttgataatagagaagggagttttatggaagtttctttgaagatttttttttttccatttcgaatcagattatagcaacaatggagtttggaagtttgtatggcctataatgttctaagttccagaatgaaaagatctgtaacaatctgaatagatgtggacacatatagcagagagaactatgtaaattatcttgcagaacaaaatagaagggtcctaaatcacgttaactcaaacattgtagactagctttgtgtttattcttcaggtccttgcgccttatttggttttgtatattcaacgaactgaaatatttggaattcctatttctacgtatttggtggtccataagactttgtcaaatgtaaacctacagtttgatacgctttaaaatacctagttaagaggatgatttctctttaatcgtttaaatgttctgaaaattaaaatcttttgaggcacatgaagtgggcaccatatatcatctagagtccttactggtattcaggatgaaaatgttcacgctgcattaattgtcatttttctctcccatgttctttctcactttgatacgttaatactgataatggataaagagtgagtttttataataaatggttttggaaaggtattcataggaaccgcggttatttacttaaggttatggagtaaactagcttggaccttgggctgcaggacgactaggattcacccataacgacacagtgccctatgtttcttaacttcttgttgccatttgaaactctgtactcttatgtttaaagggttctgtatagccattttttttttcagaaagttacattgctttgtatagaaataaaaggcattattaaaatttgcttgttaaaaaatgataa

SEQ ID NO: 99719 - DNA, 3230 bp, Homo sapiens
agcgggtagtccccgcctcttccccaggggccgcgtcggagcctccgcggcggcggcggtgcttacagcctgagaagagcgtctcgcccgggagcggcggcggccatcgagacccacccaaggcgcgtccccctcggcctcccagcgctcccaagccgcagcggccgcgccccttcagctagctcgctcgctcgctctgcttccctgctgccggctgcgccatggcgttggcgttggcggcgctggcggcggtcgagccggcctgcggcagccggtaccagcagttgcagaatgaagaagagtctggagaacctgaacaggctgcaggtgatgctcctccaccttacagcagcatttctgcagagagcgcagcatattttgactacaaggatgagtctgggtttccaaagcccccatcttacaatgtagctacaacactgcccagttatgatgaagcggagaggaccaaggctgaagctactatccctttggttcctgggagagatgaggattttgtgggtcgggatgattttgatgatgtgcatttatgaattctctctcaagaagcaagagaacacctgcaggaagtgaatcaagatgcagaacacagaggaataatcacctgctttaaaaaaataaagtactgttgaaaagatcatttctctctatttgttcctaggtgtaaaattttaatagttaatgcagaattctgtaatcattgaatcattagtggttaatgtttgaaaaagctcttgcaatcaagtctgtgatgtattaataatgccttatatattgtttgtagtcattttaagtagcatgagccatgtccctgtagtcggtagggggcagtcttgctttattcatcctccatctcaaaatgaacttggaattaaatattgtaagatatgtataatgctggccattttaaaggggttttctcaaaagttaaacttttgttatgactgtgtttttgcacataatccatatttgctgttcaagttaatctagaaatttattcaattctgtatgaacacctggaagcaaaatcatagtgcaaaaatacatttaaggtgtggtcaaaaataagtctttaattggtaaataataagcattaattttttatagcctgtattcacaattctgcggtaccttattgtacctaagggattctaaaggtgttgtcactgtataaaacagaaagcactaggatacaaatgaagcttaattactaaaatgtaattcttgacactctttctataattagcgttcttcacccccacccccacccccaccccccttattttccttttgtctcctggtgattaggccaaagtctgggagtaaggagaggattaggtacttaggagcaaagaaagaagtagcttggaacttttgagatgatccctaacatactgtactacttgcttttacaatgtgttagcagaaaccagtgggttataatgtagaatgatgtgctttctgcccaagtggtaattcatcttggtttgctatgttaaaactgtaaatacaacagaacattaataaatatctcttgtgtagcaccttttactgtagattagtgcttaatttcttggcttgcatttgttgattgctaaggcaattttttctaatcttagggaatcattcagtagatgcgattaaaaaactaatgttgggtcaatttttttcttcattttcagcacaagaagtcctcttatatcctactaaatacattcctaaaaatgtatttgaacattggttctgtaaaagataatggactaaaaaagtagagaggagttgtagagatcttaaatcattctggaattcctaattatgcttcaatttttagacataattttagataatttatttccagtgttttctgcatgttctcatttgttctttttctcagttgaatgcaccaactggtttgagtcctgtgagcattcagtcagttgaaattaaagattcctcatttctcctgatttctattcttgtctcaatcttaaatttagagaccagttgtttttatgatatcagccatttgatttttttcattttctatttaagaaatatgaagaaaaaatacaccaagatggtcaaattactacacaaatcagcaccagcacagtctgatagctgcaaatgtccattcatctgctgtgtatgtatatccagaatcagcataggaagtcgttcaggatatcagtatataatgcacagaagtgtgggttgtttgaaagccaaacaggaaaattaggagcctcctggattgacatttcagtgatccctctaaccagtttatggattattatgaataatagtgtagtgtgttctttttcagaagttatatttgataatagagaagggagttttatggaagtttctttgaagatttttttttttccatttcgaatcagattatagcaacaatggagtttggaagtttgtatggcctataatgttctaagttccagaatgaaaagatctgtaacaatctgaatagatgtggacacatatagcagagagaactatgtaaattatcttgcagaacaaaatagaagggtcctaaatcacgttaactcaaacattgtagactagctttgtgtttattcttcaggtccttgcgccttatttggttttgtatattcaacgaactgaaatatttggaattcctatttctacgtatttggtggtccataagactttgtcaaatgtaaacctacagtttgatacgctttaaaatacctagttaagaggatgatttctctttaatcgtttaaatgttctgaaaattaaaatcttttgaggcacatgaagtgggcaccatatatcatctagagtccttactggtattcaggatgaaaatgttcacgctgcattaattgtcatttttctctcccatgttctttctcactttgatacgttaatactgataatggataaagagtgagtttttataataaatggttttggaaaggtattcataggaaccgcggttatttacttaaggttatggagtaaactagcttggaccttgggctgcaggacgactaggattcacccataacgacacagtgccctatgtttcttaacttcttgttgccatttgaaactctgtactcttatgtttaaagggttctgtatagccattttttttttcagaaagttacattgctttgtatagaaataaaaggcattattaaaatttgcttgttaaaaaatgataa

SEQ ID NO: 99720 - DNA, 2572 bp, Homo sapiens
atcaagtctgtgatgtattaataatgccttatatattgttgtaagagctttttcaaacattaaccacattagtggttaatgtttgaaaaagctcttgcaatcaagtctgtgatgtattaataatgccttatatattgtttgtagtcattttaagtagcatgagccatgtccctgtagtcggtagggggcagtcttgctttattcatcctccatctcaaaatgaacttggaattaaatattgtaagatatgtataatgctggccattttaaaggggttttctcaaaagttaaacttttgttatgactgtgtttttgcacataatccatatttgctgttcaagttaatctagaaatttattcaattctgtatgaacacctggaagcaaaatcatagtgcaaaaatacatttaaggtgtggtcaaaaataagtctttaattggtaaataataagcattaattttttatagcctgtattcacaattctgcggtaccttattgtacctaagggattctaaaggtgttgtcactgtataaaacagaaagcactaggatacaaatgaagcttaattactaaaatgtaattcttgacactctttctataattagcgttcttcacccccacccccacccccaccccccttattttccttttgtctcctggtgattaggccaaagtctgggagtaaggagaggattaggtacttaggagcaaagaaagaagtagcttggaacttttgagatgatccctaacatactgtactacttgcttttacaatgtgttagcagaaaccagtgggttataatgtagaatgatgtgctttctgcccaagtggtaattcatcttggtttgctatgttaaaactgtaaatacaacagaacattaataaatatctcttgtgtagcaccttttactgtagattagtgcttaatttcttggcttgcatttgttgattgctaaggcaattttttctaatcttagggaatcattcagtagatgcgattaaaaaactaatgttgggtcaatttttttcttcattttcagcacaagaagtcctcttatatcctactaaatacattcctaaaaatgtatttgaacattggttctgtaaaagataatggactaaaaaagtagagaggagttgtagagatcttaaatcattctggaattcctaattatgcttcaatttttagacataattttagataatttatttccagtgttttctgcatgttctcatttgttctttttctcagttgaatgcaccaactggtttgagtcctgtgagcattcagtcagttgaaattaaagattcctcatttctcctgatttctattcttgtctcaatcttaaatttagagaccagttgtttttatgatatcagccatttgatttttttcattttctatttaagaaatatgaagaaaaaatacaccaagatggtcaaattactacacaaatcagcaccagcacagtctgatagctgcaaatgtccattcatctgctgtgtatgtatatccagaatcagcataggaagtcgttcaggatatcagtatataatgcacagaagtgtgggttgtttgaaagccaaacaggaaaattaggagcctcctggattgacatttcagtgatccctctaaccagtttatggattattatgaataatagtgtagtgtgttctttttcagaagttatatttgataatagagaagggagttttatggaagtttctttgaagatttttttttttccatttcgaatcagattatagcaacaatggagtttggaagtttgtatggcctataatgttctaagttccagaatgaaaagatctgtaacaatctgaatagatgtggacacatatagcagagagaactatgtaaattatcttgcagaacaaaatagaagggtcctaaatcacgttaactcaaacattgtagactagctttgtgtttattcttcaggtccttgcgccttatttggttttgtatattcaacgaactgaaatatttggaattcctatttctacgtatttggtggtccataagactttgtcaaatgtaaacctacagtttgatacgctttaaaatacctagttaagaggatgatttctctttaatcgtttaaatgttctgaaaattaaaatcttttgaggcacatgaagtgggcaccatatatcatctagagtccttactggtattcaggatgaaaatgttcacgctgcattaattgtcatttttctctcccatgttctttctcactttgatacgttaatactgataatggataaagagtgagtttttataataaatggttttggaaaggtattcataggaaccgcggttatttacttaaggttatggagtaaactagcttggaccttgggctgcaggacgactaggattcacccataacgacacagtgccctatgtttcttaacttcttgttgccatttgaaactctgtactcttatgtttaaagggttctgtatagccattttttttttcagaaagttacattgctttgtatagaaataaaaggcattattaaaatttgcttgttaaaaaatgataa

SEQ ID NO: 99721 - DNA, 2527 bp, Homo sapiens
ggcggtacggccggactacgggattagtggttaatgtttgaaaaagctcttgcaatcaagtctgtgatgtattaataatgccttatatattgtttgtagtcattttaagtagcatgagccatgtccctgtagtcggtagggggcagtcttgctttattcatcctccatctcaaaatgaacttggaattaaatattgtaagatatgtataatgctggccattttaaaggggttttctcaaaagttaaacttttgttatgactgtgtttttgcacataatccatatttgctgttcaagttaatctagaaatttattcaattctgtatgaacacctggaagcaaaatcatagtgcaaaaatacatttaaggtgtggtcaaaaataagtctttaattggtaaataataagcattaattttttatagcctgtattcacaattctgcggtaccttattgtacctaagggattctaaaggtgttgtcactgtataaaacagaaagcactaggatacaaatgaagcttaattactaaaatgtaattcttgacactctttctataattagcgttcttcacccccacccccacccccaccccccttattttccttttgtctcctggtgattaggccaaagtctgggagtaaggagaggattaggtacttaggagcaaagaaagaagtagcttggaacttttgagatgatccctaacatactgtactacttgcttttacaatgtgttagcagaaaccagtgggttataatgtagaatgatgtgctttctgcccaagtggtaattcatcttggtttgctatgttaaaactgtaaatacaacagaacattaataaatatctcttgtgtagcaccttttactgtagattagtgcttaatttcttggcttgcatttgttgattgctaaggcaattttttctaatcttagggaatcattcagtagatgcgattaaaaaactaatgttgggtcaatttttttcttcattttcagcacaagaagtcctcttatatcctactaaatacattcctaaaaatgtatttgaacattggttctgtaaaagataatggactaaaaaagtagagaggagttgtagagatcttaaatcattctggaattcctaattatgcttcaatttttagacataattttagataatttatttccagtgttttctgcatgttctcatttgttctttttctcagttgaatgcaccaactggtttgagtcctgtgagcattcagtcagttgaaattaaagattcctcatttctcctgatttctattcttgtctcaatcttaaatttagagaccagttgtttttatgatatcagccatttgatttttttcattttctatttaagaaatatgaagaaaaaatacaccaagatggtcaaattactacacaaatcagcaccagcacagtctgatagctgcaaatgtccattcatctgctgtgtatgtatatccagaatcagcataggaagtcgttcaggatatcagtatataatgcacagaagtgtgggttgtttgaaagccaaacaggaaaattaggagcctcctggattgacatttcagtgatccctctaaccagtttatggattattatgaataatagtgtagtgtgttctttttcagaagttatatttgataatagagaagggagttttatggaagtttctttgaagatttttttttttccatttcgaatcagattatagcaacaatggagtttggaagtttgtatggcctataatgttctaagttccagaatgaaaagatctgtaacaatctgaatagatgtggacacatatagcagagagaactatgtaaattatcttgcagaacaaaatagaagggtcctaaatcacgttaactcaaacattgtagactagctttgtgtttattcttcaggtccttgcgccttatttggttttgtatattcaacgaactgaaatatttggaattcctatttctacgtatttggtggtccataagactttgtcaaatgtaaacctacagtttgatacgctttaaaatacctagttaagaggatgatttctctttaatcgtttaaatgttctgaaaattaaaatcttttgaggcacatgaagtgggcaccatatatcatctagagtccttactggtattcaggatgaaaatgttcacgctgcattaattgtcatttttctctcccatgttctttctcactttgatacgttaatactgataatggataaagagtgagtttttataataaatggttttggaaaggtattcataggaaccgcggttatttacttaaggttatggagtaaactagcttggaccttgggctgcaggacgactaggattcacccataacgacacagtgccctatgtttcttaacttcttgttgccatttgaaactctgtactcttatgtttaaagggttctgtatagccattttttttttcagaaagttacattgctttgtatagaaataaaaggcattattaaaatttgcttgttaaaaaatgataa

SEQ ID NO: 99722 - DNA, 2298 bp, Homo sapiens
agcggccgcccgggcaggtacgcgggatgactgtgtttttgcacataatccatatttgctgttcaagttaatctagaaatttattcaattctgtatgaacacctggaagcaaaatcatagtgcaaaaatacatttaaggtgtggtcaaaaataagtctttaattggtaaataataagcattaattttttatagcctgtattcacaattctgcggtaccttattgtacctaagggattctaaaggtgttgtcactgtataaaacagaaagcactaggatacaaatgaagcttaattactaaaatgtaattcttgacactctttctataattagcgttcttcacccccacccccacccccaccccccttattttccttttgtctcctggtgattaggccaaagtctgggagtaaggagaggattaggtacttaggagcaaagaaagaagtagcttggaacttttgagatgatccctaacatactgtactacttgcttttacaatgtgttagcagaaaccagtgggttataatgtagaatgatgtgctttctgcccaagtggtaattcatcttggtttgctatgttaaaactgtaaatacaacagaacattaataaatatctcttgtgtagcaccttttactgtagattagtgcttaatttcttggcttgcatttgttgattgctaaggcaattttttctaatcttagggaatcattcagtagatgcgattaaaaaactaatgttgggtcaatttttttcttcattttcagcacaagaagtcctcttatatcctactaaatacattcctaaaaatgtatttgaacattggttctgtaaaagataatggactaaaaaagtagagaggagttgtagagatcttaaatcattctggaattcctaattatgcttcaatttttagacataattttagataatttatttccagtgttttctgcatgttctcatttgttctttttctcagttgaatgcaccaactggtttgagtcctgtgagcattcagtcagttgaaattaaagattcctcatttctcctgatttctattcttgtctcaatcttaaatttagagaccagttgtttttatgatatcagccatttgatttttttcattttctatttaagaaatatgaagaaaaaatacaccaagatggtcaaattactacacaaatcagcaccagcacagtctgatagctgcaaatgtccattcatctgctgtgtatgtatatccagaatcagcataggaagtcgttcaggatatcagtatataatgcacagaagtgtgggttgtttgaaagccaaacaggaaaattaggagcctcctggattgacatttcagtgatccctctaaccagtttatggattattatgaataatagtgtagtgtgttctttttcagaagttatatttgataatagagaagggagttttatggaagtttctttgaagatttttttttttccatttcgaatcagattatagcaacaatggagtttggaagtttgtatggcctataatgttctaagttccagaatgaaaagatctgtaacaatctgaatagatgtggacacatatagcagagagaactatgtaaattatcttgcagaacaaaatagaagggtcctaaatcacgttaactcaaacattgtagactagctttgtgtttattcttcaggtccttgcgccttatttggttttgtatattcaacgaactgaaatatttggaattcctatttctacgtatttggtggtccataagactttgtcaaatgtaaacctacagtttgatacgctttaaaatacctagttaagaggatgatttctctttaatcgtttaaatgttctgaaaattaaaatcttttgaggcacatgaagtgggcaccatatatcatctagagtccttactggtattcaggatgaaaatgttcacgctgcattaattgtcatttttctctcccatgttctttctcactttgatacgttaatactgataatggataaagagtgagtttttataataaatggttttggaaaggtattcataggaaccgcggttatttacttaaggttatggagtaaactagcttggaccttgggctgcaggacgactaggattcacccataacgacacagtgccctatgtttcttaacttcttgttgccatttgaaactctgtactcttatgtttaaagggttctgtatagccattttttttttcagaaagttacattgctttgtatagaaataaaaggcattattaaaatttgcttgttaaaaaatgataa

SEQ ID NO: 99723 - DNA, 1897 bp, Homo sapiens
ttgctacacaagagatatttattaatgttctgttgtatttacagttttaacatagcaaaccgagatgatccctaacatactgtactacttgcttttacaatgtgttagcagaaaccagtgggttataatgtagaatgatgtgctttctgcccaagtggtaattcatcttggtttgctatgttaaaactgtaaatacaacagaacattaataaatatctcttgtgtagcaccttttactgtagattagtgcttaatttcttggcttgcatttgttgattgctaaggcaattttttctaatcttagggaatcattcagtagatgcgattaaaaaactaatgttgggtcaatttttttcttcattttcagcacaagaagtcctcttatatcctactaaatacattcctaaaaatgtatttgaacattggttctgtaaaagataatggactaaaaaagtagagaggagttgtagagatcttaaatcattctggaattcctaattatgcttcaatttttagacataattttagataatttatttccagtgttttctgcatgttctcatttgttctttttctcagttgaatgcaccaactggtttgagtcctgtgagcattcagtcagttgaaattaaagattcctcatttctcctgatttctattcttgtctcaatcttaaatttagagaccagttgtttttatgatatcagccatttgatttttttcattttctatttaagaaatatgaagaaaaaatacaccaagatggtcaaattactacacaaatcagcaccagcacagtctgatagctgcaaatgtccattcatctgctgtgtatgtatatccagaatcagcataggaagtcgttcaggatatcagtatataatgcacagaagtgtgggttgtttgaaagccaaacaggaaaattaggagcctcctggattgacatttcagtgatccctctaaccagtttatggattattatgaataatagtgtagtgtgttctttttcagaagttatatttgataatagagaagggagttttatggaagtttctttgaagatttttttttttccatttcgaatcagattatagcaacaatggagtttggaagtttgtatggcctataatgttctaagttccagaatgaaaagatctgtaacaatctgaatagatgtggacacatatagcagagagaactatgtaaattatcttgcagaacaaaatagaagggtcctaaatcacgttaactcaaacattgtagactagctttgtgtttattcttcaggtccttgcgccttatttggttttgtatattcaacgaactgaaatatttggaattcctatttctacgtatttggtggtccataagactttgtcaaatgtaaacctacagtttgatacgctttaaaatacctagttaagaggatgatttctctttaatcgtttaaatgttctgaaaattaaaatcttttgaggcacatgaagtgggcaccatatatcatctagagtccttactggtattcaggatgaaaatgttcacgctgcattaattgtcatttttctctcccatgttctttctcactttgatacgttaatactgataatggataaagagtgagtttttataataaatggttttggaaaggtattcataggaaccgcggttatttacttaaggttatggagtaaactagcttggaccttgggctgcaggacgactaggattcacccataacgacacagtgccctatgtttcttaacttcttgttgccatttgaaactctgtactcttatgtttaaagggttctgtatagccattttttttttcagaaagttacattgctttgtatagaaataaaaggcattattaaaatttgcttgttaaaaaatgataa

SEQ ID NO: 99724 - DNA, 396 bp, Homo sapiens
ggaaagagagactcctgacttcaggagtttttagaaaaagcattccagttttttctagttctagaggccttgataactttaagaactgaaattttaatgtttattgaataccgtgatgtcagtatacagtaatcttaaaactatgttaaaatgcacttgtgtctccaaacatcctgccttcttttgtgactacatccttctcttagccaaaataacaagctaactagagtttcaatattcaatatccttctctggcagatgttttctggcaaaggccttcctgcatttatgaattctctctcaagaagcaagagaacacctgcaggaagtgaatcaagatgcagaacacagaggaataatcacctgctttaaaaaaataaagtactgttgaaaaga

SEQ ID NO: 99725 - DNA, 467 bp, Homo sapiens
ttttgcagtggcattcctctttaactggattgggtttttcctgtctttttgcctgaccacttcagctgcaggaaggtatggggccatttcaggatttggtctctctctaattaaatggatcctgattgtcagggtaagttgtataacagaaaagatgggctctacagagaggcaataatcagaatatttttgaatattcgatttttcatttgcttttttaaaagttatttcagtgtgttaaatgatttttggtttgtctgtggtttcatgatgaagctgaaccaaaatcatttgcaaatggttcatgcacacaagttttgttgtcaaatctattgaaaactggtctatcattaatattgttcaccatctgctttgtttgtttttaatgtttataatatgataatgtatatgttctgaaattagttgtttttataataaaaggaaggatattacccctttgatatctc

SEQ ID NO: 99726 - DNA, 394 bp, Homo sapiens
caggctgtcttttatcctttggaaagtcatttaaacagaggcaggtgtaaggcactcttgttcttgggtaacaggacatgtctaacatctttcccctcctctgcttttgcagtggcattcctctttaactggattgggtttttcctgtctttttgcctgaccacttcagctgcaggaaggtatggggccatttcaggatttggtctctctctaattaaatggatcctgattgtcagggtaagttgtataacagaaaagatgggctctacagagaggcaataatcagaatatttttgaatattcgatttttcatttgcttttttaaaagttatttcagtgtgttaaatgatttttggtttgtctgtggtttcatgatgaagctgaaccaaaatca

SEQ ID NO: 99727 - DNA, 3548 bp, Homo sapiens
agcgggtagtccccgcctcttccccaggggccgcgtcggagcctccgcggcggcggcggtgcttacagcctgagaagagcgtctcgcccgggagcggcggcggccatcgagacccacccaaggcgcgtccccctcggcctcccagcgctcccaagccgcagcggccgcgccccttcagctagctcgctcgctcgctctgcttccctgctgccggctgcgccatggcgttggcgttggcggcgctggcggcggtcgagccggcctgcggcagccggtaccagcagttgcagaatgaagaagagtctggagaacctgaacaggctgcaggtgatgctcctccaccttacagcagcatttctgcagagagcgcagcatattttgactacaaggatgagtctgggtttccaaagcccccatcttacaatgtagctacaacactgcccagttatgatgaagcggagaggaccaaggctgaagctactatccctttggttcctgggagagatgaggattttgtgggtcgggatgattttgatgatgctgaccagctgaggataggaaatgatgggattttcatgttaacttttttcatggcattcctctttaactggattgggtttttcctgtctttttgcctgaccacttcagctgcaggaaggtatggggccatttcaggatttggtctctctctaattaaatggatcctgattgtcaggttttccacctatttccctggatattttgatggtcagtactggctctggtgggtgttccttgttttaggctttctcctgtttctcagaggatttatcaattatgcaaaagttcggaagatgccagaaactttctcaaatctccccaggaccagagttctctttatttattaaagatgttttctggcaaaggccttcctgcatttatgaattctctctcaagaagcaagagaacacctgcaggaagtgaatcaagatgcagaacacagaggaataatcacctgctttaaaaaaataaagtactgttgaaaagatcatttctctctatttgttcctaggtgtaaaattttaatagttaatgcagaattctgtaatcattgaatcattagtggttaatgtttgaaaaagctcttgcaatcaagtctgtgatgtattaataatgccttatatattgtttgtagtcattttaagtagcatgagccatgtccctgtagtcggtagggggcagtcttgctttattcatcctccatctcaaaatgaacttggaattaaatattgtaagatatgtataatgctggccattttaaaggggttttctcaaaagttaaacttttgttatgactgtgtttttgcacataatccatatttgctgttcaagttaatctagaaatttattcaattctgtatgaacacctggaagcaaaatcatagtgcaaaaatacatttaaggtgtggtcaaaaataagtctttaattggtaaataataagcattaattttttatagcctgtattcacaattctgcggtaccttattgtacctaagggattctaaaggtgttgtcactgtataaaacagaaagcactaggatacaaatgaagcttaattactaaaatgtaattcttgacactctttctataattagcgttcttcacccccacccccacccccaccccccttattttccttttgtctcctggtgattaggccaaagtctgggagtaaggagaggattaggtacttaggagcaaagaaagaagtagcttggaacttttgagatgatccctaacatactgtactacttgcttttacaatgtgttagcagaaaccagtgggttataatgtagaatgatgtgctttctgcccaagtggtaattcatcttggtttgctatgttaaaactgtaaatacaacagaacattaataaatatctcttgtgtagcaccttttactgtagattagtgcttaatttcttggcttgcatttgttgattgctaaggcaattttttctaatcttagggaatcattcagtagatgcgattaaaaaactaatgttgggtcaatttttttcttcattttcagcacaagaagtcctcttatatcctactaaatacattcctaaaaatgtatttgaacattggttctgtaaaagataatggactaaaaaagtagagaggagttgtagagatcttaaatcattctggaattcctaattatgcttcaatttttagacataattttagataatttatttccagtgttttctgcatgttctcatttgttctttttctcagttgaatgcaccaactggtttgagtcctgtgagcattcagtcagttgaaattaaagattcctcatttctcctgatttctattcttgtctcaatcttaaatttagagaccagttgtttttatgatatcagccatttgatttttttcattttctatttaagaaatatgaagaaaaaatacaccaagatggtcaaattactacacaaatcagcaccagcacagtctgatagctgcaaatgtccattcatctgctgtgtatgtatatccagaatcagcataggaagtcgttcaggatatcagtatataatgcacagaagtgtgggttgtttgaaagccaaacagggattattatgaataatagtgtagtgtgttctttttcagaagttatatttgataatagagaagggagttttatggaagtttctttgaagatttttttttttccatttcgaatcagattatagcaacaatggagtttggaagtttgtatggcctataatgttctaagttccagaatgaaaagatctgtaacaatctgaatagatgtggacacatatagcagagagaactatgtaaattatcttgcagaacaaaatagaagggtcctaaatcacgttaactcaaacattgtagactagctttgtgtttattcttcaggtccttgcgccttatttggttttgtatattcaacgaactgaaatatttggaattcctatttctacgtatttggtggtccataagactttgtcaaatgtaaacctacagtttgatacgctttaaaatacctagttaagaggatgatttctctttaatcgtttaaatgttctgaaaattaaaatcttttgaggcacatgaagtgggcaccatatatcatctagagtccttactggtattcaggatgaaaatgttcacgctgcattaattgtcatttttctctcccatgttctttctcactttgatacgttaatactgataatggataaagagtgagtttttataataaatggttttggaaaggtattcataggaaccgcggttatttacttaaggttatggagtaaactagcttggaccttgggctgcaggacgactaggattcacccataacgacacagtgccctatgtttcttaacttcttgttgccatttgaaactctgtactcttatgtttaaagggttctgtatagccattttttttttcagaaagttacattgctttgtatagaaataaaaggcattattaaaatttgcttgttaaaaaatgataa

SEQ ID NO: 99728 - DNA, 2124 bp, Homo sapiens
agcgggtagtccccgcctcttccccaggggccgcgtcggagcctccgcggcggcggcggtgcttacagcctgagaagagcgtctcgcccgggagcggcggcggccatcgagacccacccaaggcgcgtccccctcggcctcccagcgctcccaagccgcagcggccgcgccccttcagctagctcgctcgctcgctctgcttccctgctgccggctgcgccatggcgttggcgttggcggcgctggcggcggtcgagccggcctgcggcagccggtaccagcagttgcagaatgaagaagagtctggagaacctgaacaggctgcaggtgatgctcctccaccttacagcagcatttctgcagagagcgcagcatattttgactacaaggatgagtctgggtttccaaagcccccatcttacaatgtagctacaacactgcccagttatgatgaagcggagaggaccaaggctgaagctactatccctttggttcctgggagagatgaggattttgtgggtcgggatgattttgatgatgctgaccagctgaggataggaaatgatgggattttcatgttaacttttttcatggcattcctctttaactggattgggtttttcctgtctttttgcctgaccacttcagctgcaggaaggtatggggccatttcaggatttggtctctctctaattaaatggatcctgattgtcaggttttccacctatttccctggatattttgatggtcagtactggctctggtgggtgttccttgttttaggctttctcctgtttctcagaggatttatcaattatgcaaaagttcggaagatgccagaaactttctcaaatctccccaggaccagagttctctttatttattaaagatgttttctggcaaaggccttcctgcatttatgaattctctctcaagaagcaagagaacacctgcaggaagtgaatcaagatgcagaacacagaggaataatcacctgctttaaaaaaataaagtactgttgaaaagatcatttctctctatttgttcctaggtgtaaaattttaatagttaatgcagaattctgtaatcattgaatcattagtggttaatgtttgaaaaagctcttgcaatcaagtctgtgatgtattaataatgccttatatattgtttgtagtcattttaagtagcatgagccatgtccctgtagtcggtagggggcagtcttgctttattcatcctccatctcaaaatgaacttggaattaaatattgtaagatatgtataatgctggccattttaaaggggttttctcaaaagttaaacttttgttatgactgtgtttttgcacataatccatatttgctgttcaagttaatctagaaatttattcaattctgtatgaacacctggaagcaaaatcatagtgcaaaaatacatttaaggtgtggtcaaaaataagtctttaattggtaaataataagcattaattttttatagcctgtattcacaattctgcggtaccttattgtacctaagggattctaaaggtgttgtcactgtataaaacagaaagcactaggatacaaatgaagcttaattactaaaatgtaattcttgacactctttctataattagcgttcttcacccccacccccacccccaccccccttattttccttttgtctcctggtgattaggccaaagtctgggagtaaggagaggattaggtacttaggagcaaagaaagaagtagcttggaacttttgagatgatccctaacatactgtactacttgcttttacaatgtgttagcagaaaccagtgggttataatgtagaatgatgtgctttctgcccaagtggtaattcatcttggtttgctatgttaaaactgtaaatacaacagaacattaataaatatctcttgtgtagcacaaaaaaaaaaacttcaggacacaacacattagtggggcggcgcggccaagaaaaagtccagaaacaccgggggggggggccccgagaaaggggaagtgggccatgcccgagaaacggcacgaagggtgggtccccaaaaacccggggacgcgctgaacccaaggggggggtgggccagggccgggatac

SEQ ID NO: 99729 - DNA, 3583 bp, Homo sapiens
agcgggtagtccccgcctcttccccaggggccgcgtcggagcctccgcggcggcggcggtgcttacagcctgagaagagcgtctcgcccgggagcggcggcggccatcgagacccacccaaggcgcgtccccctcggcctcccagcgctcccaagccgcagcggccgcgccccttcagctagctcgctcgctcgctctgcttccctgctgccggctgcgccatggcgttggcgttggcggcgctggcggcggtcgagccggcctgcggcagccggtaccagcagttgcagaatgaagaagagtctggagaacctgaacaggctgcaggtgatgctcctccaccttacagcagcatttctgcagagagcgcagcatattttgactacaaggatgagtctgggtttccaaagcccccatcttacaatgtagctacaacactgcccagttatgatgaagcggagaggaccaaggctgaagctactatccctttggttcctgggagagatgaggattttgtgggtcgggatgattttgatgatgctgaccagctgaggataggaaatgatgggattttcatgttaacttttttcatggcattcctctttaactggattgggtttttcctgtctttttgcctgaccacttcagctgcaggaaggtatggggccatttcaggatttggtctctctctaattaaatggatcctgattgtcaggttttccacctatttccctggatattttgatggtcagtactggctctggtgggtgttccttgttttagaggatttatcaattatgcaaaagttcggaagatgccagaaactttctcaaatctccccaggaccagagttctctttatttattaaagatgttttctggcaaaggccttcctgcatttatgaattctctctcaagaagcaagagaacacctgcaggaagtgaatcaagatgcagaacacagaggaataatcacctgctttaaaaaaataaagtactgttgaaaagatcatttctctctatttgttcctaggtgtaaaattttaatagttaatgcagaattctgtaatcattgaatcattagtggttaatgtttgaaaaagctcttgcaatcaagtctgtgatgtattaataatgccttatatattgtttgtagtcattttaagtagcatgagccatgtccctgtagtcggtagggggcagtcttgctttattcatcctccatctcaaaatgaacttggaattaaatattgtaagatatgtataatgctggccattttaaaggggttttctcaaaagttaaacttttgttatgactgtgtttttgcacataatccatatttgctgttcaagttaatctagaaatttattcaattctgtatgaacacctggaagcaaaatcatagtgcaaaaatacatttaaggtgtggtcaaaaataagtctttaattggtaaataataagcattaattttttatagcctgtattcacaattctgcggtaccttattgtacctaagggattctaaaggtgttgtcactgtataaaacagaaagcactaggatacaaatgaagcttaattactaaaatgtaattcttgacactctttctataattagcgttcttcacccccacccccacccccaccccccttattttccttttgtctcctggtgattaggccaaagtctgggagtaaggagaggattaggtacttaggagcaaagaaagaagtagcttggaacttttgagatgatccctaacatactgtactacttgcttttacaatgtgttagcagaaaccagtgggttataatgtagaatgatgtgctttctgcccaagtggtaattcatcttggtttgctatgttaaaactgtaaatacaacagaacattaataaatatctcttgtgtagcaccttttactgtagattagtgcttaatttcttggcttgcatttgttgattgctaaggcaattttttctaatcttagggaatcattcagtagatgcgattaaaaaactaatgttgggtcaatttttttcttcattttcagcacaagaagtcctcttatatcctactaaatacattcctaaaaatgtatttgaacattggttctgtaaaagataatggactaaaaaagtagagaggagttgtagagatcttaaatcattctggaattcctaattatgcttcaatttttagacataattttagataatttatttccagtgttttctgcatgttctcatttgttctttttctcagttgaatgcaccaactggtttgagtcctgtgagcattcagtcagttgaaattaaagattcctcatttctcctgatttctattcttgtctcaatcttaaatttagagaccagttgtttttatgatatcagccatttgatttttttcattttctatttaagaaatatgaagaaaaaatacaccaagatggtcaaattactacacaaatcagcaccagcacagtctgatagctgcaaatgtccattcatctgctgtgtatgtatatccagaatcagcataggaagtcgttcaggatatcagtatataatgcacagaagtgtgggttgtttgaaagccaaacaggaaaattaggagcctcctggattgacatttcagtgatccctctaaccagtttatggattattatgaataatagtgtagtgtgttctttttcagaagttatatttgataatagagaagggagttttatggaagtttctttgaagatttttttttttccatttcgaatcagattatagcaacaatggagtttggaagtttgtatggcctataatgttctaagttccagaatgaaaagatctgtaacaatctgaatagatgtggacacatatagcagagagaactatgtaaattatcttgcagaacaaaatagaagggtcctaaatcacgttaactcaaacattgtagactagctttgtgtttattcttcaggtccttgcgccttatttggttttgtatattcaacgaactgaaatatttggaattcctatttctacgtatttggtggtccataagactttgtcaaatgtaaacctacagtttgatacgctttaaaatacctagttaagaggatgatttctctttaatcgtttaaatgttctgaaaattaaaatcttttgaggcacatgaagtgggcaccatatatcatctagagtccttactggtattcaggatgaaaatgttcacgctgcattaattgtcatttttctctcccatgttctttctcactttgatacgttaatactgataatggataaagagtgagtttttataataaatggttttggaaaggtattcataggaaccgcggttatttacttaaggttatggagtaaactagcttggaccttgggctgcaggacgactaggattcacccataacgacacagtgccctatgtttcttaacttcttgttgccatttgaaactctgtactcttatgtttaaagggttctgtatagccattttttttttcagaaagttacattgctttgtatagaaataaaaggcattattaaaatttgcttgttaaaaaatgataa

SEQ ID NO: 99730 - DNA, 3540 bp, Homo sapiens
agcgggtagtccccgcctcttccccaggggccgcgtcggagcctccgcggcggcggcggtgcttacagcctgagaagagcgtctcgcccgggagcggcggcggccatcgagacccacccaaggcgcgtccccctcggcctcccagcgctcccaagccgcagcggccgcgccccttcagctagctcgctcgctcgctctgcttccctgctgccggctgcgccatggcgttggcgttggcggcgctggcggcggtcgagccggcctgcggcagccggtaccagcagttgcagaatgaagaagagtctggagaacctgaacaggctgcaggtgatgctcctccaccttacagcagcatttctgcagagagcgcagcatattttgactacaaggatgagtctgggtttccaaagcccccatcttacaatgtagctacaacactgcccagttatgatgaagcggagaggaccaaggctgaagctactatccctttggttcctgggagagatgaggattttgtgggtcgggatgattttgatgatgctgaccagctgaggataggaaatgatgggattttcatgttaacttttttcatggcattcctctttaactggattgggtttttcctgtctttttgcctgaccacttcagctgcaggaaggtatggggccatttcaggatttggtctctctctaattaaatggatcctgattgtcaggttttccacctatttccctggatattttgatggtcagtactggctctggtgggtgttccttgttttagaggatttatcaattatgcaaaagttcggaagatgccagaaactttctcaaatctccccaggaccagagttctctttatttattaaagatgttttctggcaaaggccttcctgcatttatgaattctctctcaagaagcaagagaacacctgcaggaagtgaatcaagatgcagaacacagaggaataatcacctgctttaaaaaaataaagtactgttgaaaagatcatttctctctatttgttcctaggtgtaaaattttaatagttaatgcagaattctgtaatcattgaatcattagtggttaatgtttgaaaaagctcttgcaatcaagtctgtgatgtattaataatgccttatatattgtttgtagtcattttaagtagcatgagccatgtccctgtagtcggtagggggcagtcttgctttattcatcctccatctcaaaatgaacttggaattaaatattgtaagatatgtataatgctggccattttaaaggggttttctcaaaagttaaacttttgttatgactgtgtttttgcacataatccatatttgctgttcaagttaatctagaaatttattcaattctgtatgaacacctggaagcaaaatcatagtgcaaaaatacatttaaggtgtggtcaaaaataagtctttaattgctgcggtaccttattgtacctaagggattctaaaggtgttgtcactgtataaaacagaaagcactaggatacaaatgaagcttaattactaaaatgtaattcttgacactctttctataattagcgttcttcacccccacccccacccccaccccccttattttccttttgtctcctggtgattaggccaaagtctgggagtaaggagaggattaggtacttaggagcaaagaaagaagtagcttggaacttttgagatgatccctaacatactgtactacttgcttttacaatgtgttagcagaaaccagtgggttataatgtagaatgatgtgctttctgcccaagtggtaattcatcttggtttgctatgttaaaactgtaaatacaacagaacattaataaatatctcttgtgtagcaccttttactgtagattagtgcttaatttcttggcttgcatttgttgattgctaaggcaattttttctaatcttagggaatcattcagtagatgcgattaaaaaactaatgttgggtcaatttttttcttcattttcagcacaagaagtcctcttatatcctactaaatacattcctaaaaatgtatttgaacattggttctgtaaaagataatggactaaaaaagtagagaggagttgtagagatcttaaatcattctggaattcctaattatgcttcaatttttagacataattttagataatttatttccagtgttttctgcatgttctcatttgttctttttctcagttgaatgcaccaactggtttgagtcctgtgagcattcagtcagttgaaattaaagattcctcatttctcctgatttctattcttgtctcaatcttaaatttagagaccagttgtttttatgatatcagccatttgatttttttcattttctatttaagaaatatgaagaaaaaatacaccaagatggtcaaattactacacaaatcagcaccagcacagtctgatagctgcaaatgtccattcatctgctgtgtatgtatatccagaatcagcataggaagtcgttcaggatatcagtatataatgcacagaagtgtgggttgtttgaaagccaaacaggaaaattaggagcctcctggattgacatttcagtgatccctctaaccagtttatggattattatgaataatagtgtagtgtgttctttttcagaagttatatttgataatagagaagggagttttatggaagtttctttgaagatttttttttttccatttcgaatcagattatagcaacaatggagtttggaagtttgtatggcctataatgttctaagttccagaatgaaaagatctgtaacaatctgaatagatgtggacacatatagcagagagaactatgtaaattatcttgcagaacaaaatagaagggtcctaaatcacgttaactcaaacattgtagactagctttgtgtttattcttcaggtccttgcgccttatttggttttgtatattcaacgaactgaaatatttggaattcctatttctacgtatttggtggtccataagactttgtcaaatgtaaacctacagtttgatacgctttaaaatacctagttaagaggatgatttctctttaatcgtttaaatgttctgaaaattaaaatcttttgaggcacatgaagtgggcaccatatatcatctagagtccttactggtattcaggatgaaaatgttcacgctgcattaattgtcatttttctctcccatgttctttctcactttgatacgttaatactgataatggataaagagtgagtttttataataaatggttttggaaaggtattcataggaaccgcggttatttacttaaggttatggagtaaactagcttggaccttgggctgcaggacgactaggattcacccataacgacacagtgccctatgtttcttaacttcttgttgccatttgaaactctgtactcttatgtttaaagggttctgtatagccattttttttttcagaaagttacattgctttgtatagaaataaaaggcattattaaaatttgcttgttaaaaaatgataa

SEQ ID NO: 99731 - DNA, 986 bp, Homo sapiens
  misc_feature (892)..(892): n is a, c, g, or t
  misc_feature (909)..(909): n is a, c, g, or t
  misc_feature (913)..(913): n is a, c, g, or t
  misc_feature (916)..(917): n is a, c, g, or t
  misc_feature (922)..(922): n is a, c, g, or t
  misc_feature (937)..(937): n is a, c, g, or t
  misc_feature (945)..(945): n is a, c, g, or t
  misc_feature (947)..(947): n is a, c, g, or t
  misc_feature (952)..(952): n is a, c, g, or t
agcgggtagtccccgcctcttccccaggggccgcgtcggagcctccgcggcggcggcggtgcttacagcctgagaagagcgtctcgcccgggagcggcggcggccatcgagacccacccaaggcgcgtccccctcggcctcccagcgctcccaagccgcagcggccgcgccccttcagctagctcgctcgctcgctctgcttccctgctgccggctgcgccatggcgttggcgttggcggcgctggcggcggtcgagccggcctgcggcagccggtaccagcagttgcagaatgaagaagagtctggagaacctgaacaggctgcaggtgatgctcctccaccttacagcagcatttctgcagagagcgcagcatattttgactacaaggatgagtctgggtttccaaagcccccatcttacaatgtagctacaacactgcccagttatgatgaagcggagaggaccaaggctgaagctactatccctttggttcctgggagagatgaggattttgtgggtcgggatgattttgatgatgctgaccagctgaggataggaaatgatgggattttcatgttaacttttttcatggcattcctctttaactggattgggtttttcctgtctttttgcctgaccacttcagctgcaggaaggtatggggccatttcaggatttggtctctctctaattaaatggatcctgattgtcaggttttccacctatttccctggatattttgatggtcagtactggctctggtgggtgttccttgttttaggctttctcctgtttctcagaggatttatcaattatgcaaaagttcggaagatgccagaaactttctcaaatctccccaggaccagagttctctttatttattaaagcgntggttctggaaggcctnctgnttnntgaantccttcagaagcaangaactgcngnaggantagatgcgaccagggagataccggtttaacttag

SEQ ID NO: 99732 - DNA, 3389 bp, Homo sapiens
agcgggtagtccccgcctcttccccaggggccgcgtcggagcctccgcggcggcggcggtgcttacagcctgagaagagcgtctcgcccgggagcggcggcggccatcgagacccacccaaggcgcgtccccctcggcctcccagcgctcccaagccgcagcggccgcgccccttcagctagctcgctcgctcgctctgcttccctgctgccggctgcgccatggcgttggcgttggcggcgctggcggcggtcgagccggcctgcggcagccggtaccagcagttgcagaatgaagaagagtctggagaacctgaacaggctgcaggtgatgctcctccaccttacagcagcatttctgcagagagcgcagcatattttgactacaaggatgagtctgggtttccaaagcccccatcttacaatgtagctacaacactgcccagttatgatgaagcggagaggaccaaggctgaagctactatccctttggttcctgggagattttccacctatttccctggatattttgatggtcagtactggctctggtgggtgttccttgttttaggctttctcctgtttctcagaggatttatcaattatgcaaaagttcggaagatgccagaaactttctcaaatctccccaggaccagagttctctttatttattaaagatgttttctggcaaaggccttcctgcatttatgaattctctctcaagaagcaagagaacacctgcaggaagtgaatcaagatgcagaacacagaggaataatcacctgctttaaaaaaataaagtactgttgaaaagatcatttctctctatttgttcctaggtgtaaaattttaatagttaatgcagaattctgtaatcattgaatcattagtggttaatgtttgaaaaagctcttgcaatcaagtctgtgatgtattaataatgccttatatattgtttgtagtcattttaagtagcatgagccatgtccctgtagtcggtagggggcagtcttgctttattcatcctccatctcaaaatgaacttggaattaaatattgtaagatatgtataatgctggccattttaaaggggttttctcaaaagttaaacttttgttatgactgtgtttttgcacataatccatatttgctgttcaagttaatctagaaatttattcaattctgtatgaacacctggaagcaaaatcatagtgcaaaaatacatttaaggtgtggtcaaaaataagtctttaattggtaaataataagcattaattttttatagcctgtattcacaattctgcggtaccttattgtacctaagggattctaaaggtgttgtcactgtataaaacagaaagcactaggatacaaatgaagcttaattactaaaatgtaattcttgacactctttctataattagcgttcttcacccccacccccacccccaccccccttattttccttttgtctcctggtgattaggccaaagtctgggagtaaggagaggattaggtacttaggagcaaagaaagaagtagcttggaacttttgagatgatccctaacatactgtactacttgcttttacaatgtgttagcagaaaccagtgggttataatgtagaatgatgtgctttctgcccaagtggtaattcatcttggtttgctatgttaaaactgtaaatacaacagaacattaataaatatctcttgtgtagcaccttttactgtagattagtgcttaatttcttggcttgcatttgttgattgctaaggcaattttttctaatcttagggaatcattcagtagatgcgattaaaaaactaatgttgggtcaatttttttcttcattttcagcacaagaagtcctcttatatcctactaaatacattcctaaaaatgtatttgaacattggttctgtaaaagataatggactaaaaaagtagagaggagttgtagagatcttaaatcattctggaattcctaattatgcttcaatttttagacataattttagataatttatttccagtgttttctgcatgttctcatttgttctttttctcagttgaatgcaccaactggtttgagtcctgtgagcattcagtcagttgaaattaaagattcctcatttctcctgatttctattcttgtctcaatcttaaatttagagaccagttgtttttatgatatcagccatttgatttttttcattttctatttaagaaatatgaagaaaaaatacaccaagatggtcaaattactacacaaatcagcaccagcacagtctgatagctgcaaatgtccattcatctgctgtgtatgtatatccagaatcagcataggaagtcgttcaggatatcagtatataatgcacagaagtgtgggttgtttgaaagccaaacaggaaaattaggagcctcctggattgacatttcagtgatccctctaaccagtttatggattattatgaataatagtgtagtgtgttctttttcagaagttatatttgataatagagaagggagttttatggaagtttctttgaagatttttttttttccatttcgaatcagattatagcaacaatggagtttggaagtttgtatggcctataatgttctaagttccagaatgaaaagatctgtaacaatctgaatagatgtggacacatatagcagagagaactatgtaaattatcttgcagaacaaaatagaagggtcctaaatcacgttaactcaaacattgtagactagctttgtgtttattcttcaggtccttgcgccttatttggttttgtatattcaacgaactgaaatatttggaattcctatttctacgtatttggtggtccataagactttgtcaaatgtaaacctacagtttgatacgctttaaaatacctagttaagaggatgatttctctttaatcgtttaaatgttctgaaaattaaaatcttttgaggcacatgaagtgggcaccatatatcatctagagtccttactggtattcaggatgaaaatgttcacgctgcattaattgtcatttttctctcccatgttctttctcactttgatacgttaatactgataatggataaagagtgagtttttataataaatggttttggaaaggtattcataggaaccgcggttatttacttaaggttatggagtaaactagcttggaccttgggctgcaggacgactaggattcacccataacgacacagtgccctatgtttcttaacttcttgttgccatttgaaactctgtactcttatgtttaaagggttctgtatagccattttttttttcagaaagttacattgctttgtatagaaataaaaggcattattaaaatttgcttgttaaaaaatgataa

SEQ ID NO: 99733 - DNA, 554 bp, Homo sapiens
agcgggtagtccccgcctcttccccaggggccgcgtcggagcctccgcggcggcggcggtgcttacagcctgagaagagcgtctcgcccgggagcggcggcggccatcgagacccacccaaggcgcgtccccctcggcctcccagcgctcccaagccgcagcggccgcgccccttcagctagctcgctcgctcgctctgcttccctgctgccggctgcgccatggcgttggcgttggcggcgctggcggcggtcgagccggcctgcggcagccggtaccagcagttgcagaatgaagaagagtctggagaacctgaacaggctgcaggtgatgctcctccaccttacagcagcatttctgcagagagcgcagcatattttgactacaaggatgagtctgggtttccaaagcccccatcttacaatgtagctacaacactgcccagttatgatgaagcggagaggaccaaggctgaagctactatccctttggttcctgggagaatgacgattttgggggtcggcatgaatttgcatcagctccacatcttagga

SEQ ID NO: 99734 - DNA, 691 bp, Homo sapiens
agtacaaaaattagccaggcatggtggtgtgcgtgcacgcctgtaatcccaactactcaagaactggaggcaggagaatggcttgaacctggaaggcggaggttgtagtgagctgagatcacgccactgcactccagcctgggtgacagagactccgtcctggtgctccagcctcggtgacagagactccatctcaaaaaaaaggaaaaaaaaaagaaaagccatctggggacaactggtaacatttacagaccaggtggcctgatgtttgcactgatgacaacccagtctccttcagcctggcctgccctctgcactccggatctaagtgtctgggcctgctggacaaccctacttggctgtaacacagactcctcccgttggtccacagacaaaactcagcctgcttgcttctcctggttctcttttgctattttaagtctcccttgactcctcactcccttttgcagccagaccagcacacaagtgtctttttgctccatcgacggctgtctgtcctcactggctcccacccactgcccggctcagtctctcaccaggatgaccacgacagcccccgacctactgtctttctgcttctcccatccattcgccatggcaatcagagggattttttgcaaataataaaaacctggcctcgttggcctcagcggtggagctctgcagaccg

SEQ ID NO: 99735 - DNA, 472 bp, Homo sapiens
agtacaaaaattagccaggcatggtggtgtgcgtgcacgcctgtaatcccaactactcaagaactggaggcaggagaatggcttgaacctggaaggcggaggttgtagtgagctgagatcacgccactgcactccagcctgggtgacagagactccgtcctggtgctccagcctcggtgacagagactccatctcaaaaaaaaggaaaaaaaaaagaaaagccatctggggacaactggtaacatttacagccagaccagcacacaagtgtctttttgctccatcgacggctgtctgtcctcactggctcccacccactgcccggctcagtctctcaccaggatgaccacgacagcccccgacctactgtctttctgcttctcccatccattcgccatggcaatcagagggattttttgcaaataataaaaacctggcctcgttggcctcagcggtggagctctgcagaccg

SEQ ID NO: 99736 - DNA, 145 bp, Homo sapiens
gggctttgaaaaggccgtgcagaggagactcttgagctagattttggcattatcgacagtggggcacagcataggtaggcaagtaattcaagatgttctaggcccagcagggtggctcatgcctgtaatgggatgagctggggca

SEQ ID NO: 99737 - DNA, 414 bp, Homo sapiens
tttgatgcagaaattttttaaattttcaagaagttcaatttgtctttttcttttgttgcctgtgcctttggtatcaaatccaagaaatcaataccaaatccaatgtcataggttttgcctatgttttcttctaagaattttatagtttcaggccttacatttaggtctttgatccattttcagttaatttttgcacacggtataagataagggcccaaattcattattttccatgtggacataccgtttacctggtaccacttgttgggaagtctgaatgaatggtgtgggcatgtgggcaccctcgtcaaaaaccatttgatgaggccaggcgtggtggctcacgcctgtaatcccagcactttgggaggccgaggcaggagaattgtttgaacccacatggcggagactgcg

SEQ ID NO: 99738 - DNA, 251 bp, Homo sapiens
  misc_feature (19)..(19): n is a, c, g, or t
tctagaggatctgggaatnctcctcctcctcacatggctctggtttgcaaaatgtgtaccattgtcttgaccatttagagtgtggttagaaggaaccctgaactgtaagaaaagtagaggctttgtgtgtgtgtgtgtgtgtgtgtgtgtgtgtgtgtgtgtgtgtgatgtccacttaataataaatctgtcatcactgactggtgttcatttcctctgaaataaacaaatcactattaagtcctttgaaa

SEQ ID NO: 99739 - DNA, 263 bp, Homo sapiens
atgggtaatgacatgtgcccacccttctggcatcacacgggggcagttcactgccctgaacaccctgtgctctgcctgtcacttcgtagtgcccccagaagccactggtctcactctctctagcttcaccccagcagcctctagtctcccgctctctctagctgcacctttcccggagtgtcgtcgtcacattggaatcatcctgggcttagttttgtagattggcctcttcacttacagttctagaagttttcacaaatttg

SEQ ID NO: 99740 - DNA, 161 bp, Homo sapiens
gagcttggacaggccacagggcatgggctctgagcttcagcctgggcatctgaaagttcctggtcaccgtgggggtctccatggtcacccaggccatgttcgcctgagaagagggtgctaccaagaagcgccggggctgggctcctctcaaggggctcacg

SEQ ID NO: 99741 - DNA, 301 bp, Homo sapiens
tgggttcatgccattctcctgcctcagcctcccaagtagctgggacttccagcgtctgccaccacacccagctaattttttgtatttttagtagagacggggtttcaccatgttagccaggatggtctcgatctcctgacctcgtgatccgcccgcctcggcctcccaaaatgctggaattacaggcatgagccaccacgcccggcctctcctaaggtttctatgtgtctatcaacttttctgctctgcaggcatttcctgaagacctacagtgtgttgagccctacgcatttctctctct

SEQ ID NO: 99742 - DNA, 177 bp, Homo sapiens
tctgggaggtgctggctttcacccctccccagggagccctcatctaggtcaccggggcctcctgaccttggcctggagcagcacttcagtggctcacattccacctgcacagggattgggcccaggagtcctcactttcatcctggtgtctccttagttcctggaggagggtgggaa

SEQ ID NO: 99743 - DNA, 440 bp, Homo sapiens
ttccttccaaattcacaattttttagaaaatggttttgttttaacaaagaatttttgttctcccccggcattttctttcttcgaattagaaaaccattcaggcaagcaccggctttcaaacggtgtttttttctcccagttggcgctaaaatgcactcatttctcctcaaaaagattctataatagataaagggcggcccattttttttaaactggtcgcattggggataagcgggcctcattcttttgtgactggacccattctctttcgaaggcagagcaagtatatcccttggggctctcaacccataccctgagggtcctatcaaaatatcctttccattcacttacaatagaacgaattccaagggaagttgttacaaacacaatttcccagtgacaccagcttcccaatgatgtttttgggtccgcacgtgccc

SEQ ID NO: 99744 - DNA, 275 bp, Homo sapiens
tgattaactggacccattctcgattaactggacccattctcgattaactggacccattctcgattaactggacccattctcgattaactggacccattctctttcgaaggcagagcaagtatatcccttggggctctcaacccataccctgagggtcctatcaaaatatcctttccattcacttacaatagaacgaattccaagggaagttgttacaaacacaatttcccagtgacaccagcttcccaatgatgtttttgggtccgcacgtgccc

SEQ ID NO: 99745 - DNA, 648 bp, Homo sapiens
aggctgaggggcgcctggggttcgcctccgtgggcgcttcttccggtcagccaccggggcttacccgccatagcgcagatgcaggctcctgagctgggcctttcttttgagtgactcgtgtgaagatttagactttcgaaacttattaggaataagaccttatttacaaaaacaactcctcacccggtcggtagtttccgatttgaattttctaatattgtttgaaaatatttatcttatttacttttttggacgactccttaaattttgtgactcaggagattggtcctagcaccgtagtctttttttttttttttttttttgggaaagggagttccggcctttggtcgcgcccgggggggagtccaaggggggggatctcaagcctcaaggggacccccaatttcccaaccctcccagggtgccaagggattcctccgggccttaagccctcccggagtacggggggacccacgggggggcaccaaccattgccggggtataatttggggacttttaaattaagacgtgtgggggtctcactatattgttggggccagggcggggctttgagaacttccggggacctctcggggtgactccgccacctttggcccccccaatttgtggggattcacgggcattgat

SEQ ID NO: 99746 - DNA, 1042 bp, Homo sapiens
cccccatggacttagggcccccacaaagagaaaccatgtgccttctccccacttcccttctggcttgggcaaatgaggctccctttaggggtagaggtactctacaggggctatgttccctttaggggtagaggtagtctacaggggccagctgggcagagatgaaatcttgcaaaggaacccttcttacactcgaaaagcaagaatagcaaagggactttgggaaggacataaaacaagaaaaggaagctcctcaccaacagctcccagatggagggagtttgtgtgtctagcattttcaccaaagtgctgctcatcctgatgcacagatgcagattggagctgctgcctgtgccctcaccatgggtatgtacccaccacaggcattcccaggtgatgcgggggcagaggattccctctttccactcaggataacaacccctcgatggggttttcaacaagtatagaaagctcctggactcagccaagaccctcacctacagtcccagtcctcccaccttcttcaggtctctagaagacagaactgatgggtttacaacatcctattatccagcactagtcctaggttgtggatgtagggaaaggccaggtaaacaaggaagggagaacaggtgaatgaccccaattgtttgaaaccaaaagagcagaattgcccctaattgatttaagtaaacagcaagtaacataggtctgttaaatagaagaggatgtgagcaccagatgcacgtgataaagaccatgctctggaagattcattccaaggagtagaagtggtatttactcagggcatttaaggagagcagggactctgaaatgaggtgagagaaaagataagacatgcaggaacagctggcaacaccaagaaagaatttaaggagagggatctctctgttagagaacttaacattaccctaggaacagcaagagcatcatcagccccaggaaaatctacctctgatatggagaccaggcttaagaaaatcccctagaacccagagaaaaagtgcaaaacaaggaaaat

SEQ ID NO: 99747 - DNA, 700 bp, Homo sapiens
atcatatcattattttaagtgataaatgatcatctacattcagctctgatgagtaataggtgttcaaaaataggaacttccagccaagtgtggtggctcatgcttgtaattccaacacttttggaggctgaggcaggagggtcgcttgagcccaggagttcaagaccagcctgggcagcaaagtgaaacctcatctctactaaaaattttaaaacattagccaagtgtggtggtacatgcctgtggtcgcagttattcaggacgctgagactgaacgatcacatgaggccagccaaggattcgaggtgtcagtgagccacgaatgtaccactgcactccatcctaggcacagagcaagagcaagaccctgtctcaatcaatcagtcaatcagtcaaaactatgaatttcccagctgtatatgaaggcacctcaaaacaccacagtgaactcacagagggacacggaatagtttagattttaattttttgagggaaatgcgatgacatctgtcacacaccgcacaaacggctactattaaactgaacttactgattagtggctactaattaatagttggtcattaagcagtaattagtgattaattatcaagtaattaggacttaattaaaggaactgtcacagtttcctttagtcctagggcagccatgaaaaaaaaaatgctgactctccaaagacacc

SEQ ID NO: 99748 - DNA, 322 bp, Homo sapiens
agactttgcttctcctttattcagtgagggattggactagctggtccttaaggacttttcagaaagtctggttctgggagatgaccaatgggatcatcttatgctatgagctttcctggaatgacaggtaattggtgcgccttcccagcagggtcagggagagtcgctgggacttgaagggaaggcttttggggagaggagccagtgttacaaactatcgaaaagcttggaggtgggaaatttgcgaaaggtgattccagggtcagcttttttgtcacctgcttccgacttcggcagtttggagagggcgagtaataccctt

SEQ ID NO: 99749 - DNA, 225 bp, Homo sapiens
caacatattatatggttatggtttgtgtgcatgtgtgtgtgtccgtgtgcatgtcattgtctcattaaaatctcctctatcaagaataactttttgtctacttgacctatccgtttaagatggaagtgtgttaaaatctcccactctgattttaattcaatttcatatctccagtcttgccctcttacctgaactccagactcttgtatccttcttgtaccctct

SEQ ID NO: 99750 - DNA, 657 bp, Homo sapiens
agcctctatttgacttcaactacaagagagatgccaagctgagaccagttaagccacagaactctttcagaaaagtcatatttttctcaaatgacctagcttttaccttcgttaactcaaacctgcacccatctgaagtgaaaccagcaaccacttaacagcaaacagtagcagcagcatgcaccaaaagagaatggaaagtgaaaagaacacaacagatcattttaaaagtagtgtgtcaattgcctggttctccactgacagctaaaattaaacaaaaaagtgaattccgttctacagtgtgaccatcttatgggaacactagaggatatccatagacagcagagaaaaaatagcaaaatagatattttgactcacagaaaatgaatgtttgcaaagattcaccaagaaataaagtcaaccaaaaaagcaaagtcatggaaaagaaatgcaaatctccacaaaaggcagcttttcagggctattcctgtctacacgccctctgaataaccatctcaaaatatgttcaagaagtatattttggaggtggcattgcagatgggatctcaaagccaagtctctacatatgatacaggcaaacagatgtttacatgacttgctcctccttgccttctgccatgattgtgaggcctctcc

SEQ ID NO: 99751 - DNA, 404 bp, Homo sapiens
gctggatacctgtcaagatgtattcatgtaaactatagcccttgagtgataattatgtatcaacataggtttatcagttgtaacaaatgtaccactgttgccatggattgaatgtttatatcccttcaaattagtgcgttgaaatcctttttgcttttttttttagtttctttttttctaagttcatgtcagataggtaatatgcccacatggtagctgacagagcagaagcatcaccatcttggacaagcactgccattctaaagttccccttgatcaaaaattgcctaaatccaaaggtcatcagcctaatgactaaggtcagcatgaccataagccacaaatgacatctccgaccagaaacatttcaaccataagataaatccctccctgaccagagacaa

SEQ ID NO: 99752 - DNA, 174 bp, Homo sapiens
ctgtagattcgaatcgagctcggtacctatatcacagaatgactgaggataggaatgagaatataaaaaaaggagatgaaatgagaggaaataatctcagagcctactgaacctaacactataggacaggtagatttagtataatttggcaagtatctgctattgaccaagaaa

SEQ ID NO: 99753 - DNA, 603 bp, Homo sapiens
aaaatatgactactaattgctttgttcagatataattttggttcgttgggactggaaatggcaaatgtataccatggtttgtaggttttttgtttttgtttttaatgctgttcatggagttgcactaattcatttatttaaacaagtactgaacacttagtcttaaaaacactattctcagctctggggtggaatagaaagattaattatgctttaggaataactattcttgatctcttggtaaattaaaacttgctgtgaaaggatcatctttgtaattgttaatgagcattcttcaagcagattgaatatccacagtttcttagtttaatttcatcattttgtgaaccaaaggcattttttctaagtaaaataaatggttgagtaaaaaaaatcgcccaacaaattttgtataatctaaattgctgttttttttaaaaaaatggatactgtcctttcaccatcccatctcctttccccagctgctgctgctgctttctgctttcctcctctttctttattcctttcagctttgggcggctgtacatgcaaagttttgttttttatcttgacacttcccattcttgcttccattccctgtaa

SEQ ID NO: 99754 - DNA, 865 bp, Homo sapiens
ctcccgggttcccaccctgtgcacacatctccactgcagagccaagcacttcttcctctcacctggactccaccatagcccatgttgcttcattggcctccaatactctgtacacatgacagccagaatgatccttcaagaaattcagcctggttgtgcaccccctttttagaaatgcaaatggcttcccattgctctaagggtgaagaccaacacttcaacctgatcctcccagcccacctggcccacctggcctgcattgtctggcaccctctgcacctcacctcaccgtcattccttattctctttcctcaagcctcattctccttcttcagctgtcaacaccatgttgtcctccctcccccaggcttctctgggcttttcctcttcctggaacagtggtcctccacatctccctactttactccaaatctgcttgcccctctgccatgtaggccaagggaatcacagccatccttgcacaggtcttagactctctggggacatcttcctggtgcttatcaagttgaaactttgcattcattagtaaaattaaatcaccacttgctttcacactgcatggtaatctctcttgtgtccccagtgtccagccattggcaggcacataacatgtgctcaggaaattttatttgaataaatgagtgaatgattcaatgaatggagcaagcctgagatagcctcatttcctttcccattggaggattgttctttcttctgtgaggacagaacctataccttgctgaaatattctggacagtgagaacccttctgctgagattgtcctttagctcctcacttggtgggatctcagagaagaactcttggagacagtttgaggacacca

SEQ ID NO: 99755 - DNA, 665 bp, Homo sapiens
ggtggtggcaccgcagacggcggcggcagcgttttaggcagatgcgcgctgcaggcaactccagcgctgttaaaccaacatcctcccttttcagaaatctacaccaacacctatgcagccgggggcacggtggaaggaggtgtatcgggagtggagctcaacacaggtatggggacagccgttggcctcatggccgcaggggccgcaggagcctcaggggccgcaaggaagaggagctctaccatgggaaccctgcgggactacgctgacgcagacatcaacatggctttcttggacagctacttctcggagaaagcgtatgcttatgcagatgaagatgaaggtcgaccagccaatgactgcttgctcatttatgaccacgagggagtcgggtctcccgtaggctctattggttgttgcagttggattgtggatgacttagatgaaagctgcatggaaactttagatccaaaatttaggactcttgctgagatctgcttaaacacagaaattgaaccatttccttcacaccaggcttgtataccaatcagtactgacctccctttgctcggacctaattactttgttaatgaatcttcaggattgactccctcagaagttgaattccaagaagaaatggcagcatctgaacccgtggtccatgg

SEQ ID NO: 99756 - DNA, 174 bp, Homo sapiens
caccatgggtcccccgtaggcagtcttaagaggatagctgtttttgttctccttccaaattcccattagacttgaggtcagagtcacactttacttgttttgaatatttaaagtagtatacctaatagctcaatagactgtatgcttttatttttattttttgagcctgccttc

SEQ ID NO: 99757 - DNA, 2127 bp, Homo sapiens
atgttcaggattctaaaaagagcaatggttcacaaggaaacttctgcctcaggtggggagaggagtccatagatcagggaaacttatgtcttggtgaaatggaagaccatgtttctaaacacctgtcgccaggttacttgaatttccactagaggagcagaaatgccaccaatgccaagtgccccacctgtgcatccacctccagatggaggatggggttggattgtggttggagcagcttttatctccattggattttcctatgcattccccaaagctgtcaccgtattcttcaaagaaattcagcaaatattccacactacctacagtgaaatagcatggatttcatccattatgctggctgttatgtacgcaggaggtcctgtaagtagtgttttggtgaataaatacggcagccggccggtggtgatagcaggaggcttattatgctgtcttggaatggtgttggcctcctttagtagcagcgtggtacagctgtacctcactatgggattcattacaggtttaggtttagccttcaacctgcaacccgccttaaccataattggcaaatacttctataggaagcgacccatggcaaatggattggccatggcaggaagtcctgttttcttaagttcattggctcctttcaatcagtacctttttaatacttttggctggaaaggaagcttcctgattttgggaagtctacttttgaatgcctgtgtggctggttccctcatgagaccccttggacccaatcaaaccacttctaagtctaaaaataagactggcaaaacagaagatgattcaagcccaaagaaaatcaaaacgaagaaatcaacttgggaaaaagttaataagtatttagatttctccctttttaagcatagaggatttctgatatatctgtctggaaatgtcattatgttcctaggtttttttgcccccattatattcttggctccatatgctaaagaccaaggaattgatgagtactcggcagcttttctgctatctgttatggctttcgttgatatgtttgctaggccttctgtaggattaattgcaaactccaaatatattcgacctcgaattcagtacttcttcagttttgcaatcatgttcaatggagtgtgtcacctcttgtgcccactggcacaggactacacaagcctggtattatatgctgtattttttggccttggatttgggagtgttagcagtgttctctttgaaactctcatggacctcgtgggtgcaccaagattttccagtgccgtcggacttgtcacaattgtggagtgtggcccagttcttcttggccctcctcttgcaggtaaattggtggatttaactggagaatataaatacatgtacatgtcctgtggggctattgtggtagcagcaagcgtgtggctgctcattggcaatgctatcaactatagattgcttgcaaaggaaaggaaggaggaaaatgcaaggcagaagaccagagaatctgaacccttgagcaaatctaaacattcggaagatgttaacgtcaaagtttcaaatgcacagagtgtaacctcagaaagagaaactaacatttaacaagaatcacatctctgatttcagtgtttatgactttatctaggagtttgtttttcattttgtttttttaaagtattagaaaaggttttagctgaaatgaggagtcacaattaaggatggaggtgatattttcctcaatggcaaattttaaattagtttttaaaaacttacttatttgggtagttaaattttgagattatgcatagaaagaatccatgctataggtttatttccatacctgactctgggtgtggtggttaaaatactaattttaaagtcttccagtgactttcggtcttggttatatggagaattctgaatcccaaacccctggtttaagtaggtagaaggaggatgcctaatcctacaaagtgaccctttatacatttcattttttatttgatattaaagtatgagatagagttgagagacaattaattatcccctcttacacacaaacacacatactcccacatacttacccacatgtacacagagtatctggagaataaaacccaaattcaaaaa

SEQ ID NO: 99758 - DNA, 649 bp, Homo sapiens
tccccttcccgccaccgcctccttctccgctggctgtggcgggcgaggacacgtcaggggccataaataaataaataattccattcacccgttgacagcgaggcgaatcggctgcggtttgctgggaacggagggctgcagcgcccaccctgcgccagagaccagataaagagtcaatcttaagatgtgatactttcctgtgaaacctgaaacaaggtgatctggggaaccaaagactctgggactcttggtgccaacagagttactctgttacttgaatttccactagaggagcagaaatgccaccaatgccaagtgccccacctgtgcatccacctccagatggaggatggggttggattgtggttggagcagcttttatctccattggattttcctatgcattccccaaagctgtcaccgtattcttcaaagaaattcagcaaatattccacactacctacagtgaaatagcatggatttcatccattatgctggctgttatgtacgcaggaggttggtatcatatgcaatagctgtatattccatcagttgattgacgtgttattatgggatcgctgtctaaagaacacaattggaaagataataaatttgttccagtttggaatcttcctaagttattgttaat

SEQ ID NO: 99759 - DNA, 2264 bp, Homo sapiens
tccccttcccgccaccgcctccttctccgctggctgtggcgggcgaggacacgtcaggggccataaataaataaataattccattcacccgttgacagcgaggcgaatcggctgcggtttgctgggaacggagggctgcagcgcccaccctgcgccagagaccagataaagagtcaatcttaagatgtgatactttcctgtgaaacctgaaacaaggtgatctggggaaccaaagactctgggactcttggtgccaacagagttactctgttacttgaatttccactagaggagcagaaatgccaccaatgccaagtgccccacctgtgcatccacctccagatggaggatggggttggattgtggttggagcagcttttatctccattggattttcctatgcattccccaaagctgtcaccgtattcttcaaagaaattcagcaaatattccacactacctacagtgaaatagcatggatttcatccattatgctggctgttatgtacgcaggaggtcctgtaagtagtgttttggtgaataaatacggcagccggccggtggtgatagcaggaggcttattatgctgtcttggaatggtgttggcctcctttagtagcagcgtggtacagctgtacctcactatgggattcattacaggtttaggtttagccttcaacctgcaacccgccttaaccataattggcaaatacttctataggaagcgacccatggcaaatggattggccatggcaggaagtcctgttttcttaagttcattggctcctttcaatcagtacctttttaatacttttggctggaaaggaagcttcctgattttgggaagtctacttttgaatgcctgtgtggctggttccctcatgagaccccttggacccaatcaaaccacttctaagtctaaaaataagactggcaaaacagaagatgattcaagcccaaagaaaatcaaaacgaagaaatcaacttgggaaaaagttaataagtatttagatttctccctttttaagcatagaggatttctgatatatctgtctggaaatgtcattatgttcctaggtttttttgcccccattatattcttggctccatatgctaaagaccaaggaattgatgagtactcggcagcttttctgctatctgttatggctttcgttgatatgtttgctaggccttctgtaggattaattgcaaactccaaatatattcgacctcgaattcagtacttcttcagttttgcaatcatgttcaatggagtgtgtcacctcttgtgcccactggcacaggactacacaagcctggtattatatgctgtattttttggccttggatttgggagtgttagcagtgttctctttgaaactctcatggacctcgtgggtgcaccaagattttccagtgccgtcggacttgtcacaattgtggagtgtggcccagttcttcttggccctcctcttgcaggtaaattggtggatttaactggagaatataaatacatgtacatgtcctgtggggctattgtggtagcagcaagcgtgtggctgctcattggcaatgctatcaactatagattgcttgcaaaggaaaggaaggaggaaaatgcaaggcagaagaccagagaatctgaacccttgagcaaatctaaacattcggaagatgttaacgtcaaagtttcaaatgcacagagtgtaacctcagaaagagaaactaacatttaacaagaatcacatctctgatttcagtgtttatgactttatctaggagtttgtttttcattttgtttttttaaagtattagaaaaggttttagctgaaatgaggagtcacaattaaggatggaggtgatattttcctcaatggcaaattttaaattagtttttaaaaacttacttatttgggtagttaaattttgagattatgcatagaaagaatccatgctataggtttatttccatacctgactctgggtgtggtggttaaaatactaattttaaagtcttccagtgactttcggtcttggttatatggagaattctgaatcccaaacccctggtttaagtaggtagaaggaggatgcctaatcctacaaagtgaccctttatacatttcattttttatttgatattaaagtatgagatagagttgagagacaattaattatcccctcttacacacaaacacacatactcccacatacttacccacatgtacacagagtatctggagaataaaacccaaattcaaaaa

SEQ ID NO: 99760 - DNA, 2108 bp, Homo sapiens
tctggagatatgtatgtaagtttgcttgtggctaaaagttaatgatcagttgcctctcttcttagccctgagcctggagaaaagtgtcaaacgcaggttctctctctattcaggttacttgaatttccactagaggagcagaaatgccaccaatgccaagtgccccacctgtgcatccacctccagatggaggatggggttggattgtggttggagcagcttttatctccattggattttcctatgcattccccaaagctgtcaccgtattcttcaaagaaattcagcaaatattccacactacctacagtgaaatagcatggatttcatccattatgctggctgttatgtacgcaggaggtcctgtaagtagtgttttggtgaataaatacggcagccggccggtggtgatagcaggaggcttattatgctgtcttggaatggtgttggcctcctttagtagcagcgtggtacagctgtacctcactatgggattcattacaggtttaggtttagccttcaacctgcaacccgccttaaccataattggcaaatacttctataggaagcgacccatggcaaatggattggccatggcaggaagtcctgttttcttaagttcattggctcctttcaatcagtacctttttaatacttttggctggaaaggaagcttcctgattttgggaagtctacttttgaatgcctgtgtggctggttccctcatgagaccccttggacccaatcaaaccacttctaagtctaaaaataagactggcaaaacagaagatgattcaagcccaaagaaaatcaaaacgaagaaatcaacttgggaaaaagttaataagtatttagatttctccctttttaagcatagaggatttctgatatatctgtctggaaatgtcattatgttcctaggtttttttgcccccattatattcttggctccatatgctaaagaccaaggaattgatgagtactcggcagcttttctgctatctgttatggctttcgttgatatgtttgctaggccttctgtaggattaattgcaaactccaaatatattcgacctcgaattcagtacttcttcagttttgcaatcatgttcaatggagtgtgtcacctcttgtgcccactggcacaggactacacaagcctggtattatatgctgtattttttggccttggatttgggagtgttagcagtgttctctttgaaactctcatggacctcgtgggtgcaccaagattttccagtgccgtcggacttgtcacaattgtggagtgtggcccagttcttcttggccctcctcttgcaggtaaattggtggatttaactggagaatataaatacatgtacatgtcctgtggggctattgtggtagcagcaagcgtgtggctgctcattggcaatgctatcaactatagattgcttgcaaaggaaaggaaggaggaaaatgcaaggcagaagaccagagaatctgaacccttgagcaaatctaaacattcggaagatgttaacgtcaaagtttcaaatgcacagagtgtaacctcagaaagagaaactaacatttaacaagaatcacatctctgatttcagtgtttatgactttatctaggagtttgtttttcattttgtttttttaaagtattagaaaaggttttagctgaaatgaggagtcacaattaaggatggaggtgatattttcctcaatggcaaattttaaattagtttttaaaaacttacttatttgggtagttaaattttgagattatgcatagaaagaatccatgctataggtttatttccatacctgactctgggtgtggtggttaaaatactaattttaaagtcttccagtgactttcggtcttggttatatggagaattctgaatcccaaacccctggtttaagtaggtagaaggaggatgcctaatcctacaaagtgaccctttatacatttcattttttatttgatattaaagtatgagatagagttgagagacaattaattatcccctcttacacacaaacacacatactcccacatacttacccacatgtacacagagtatctggagaataaaacccaaattcaaaaa

SEQ ID NO: 99761 - DNA, 2244 bp, Homo sapiens
tccccttcccgccaccgcctccttctccgctggctgtggcgggcgaggacacgtcaggggccataaataaataaataattccattcacccgttgacagcgaggcgaatcggctgcggtttgctgggaacggagggctgcagcgcccaccctgcgccagagaccagataaagagtcaatcttaagatgtgatactttcctgtgaaacctgaaacaaggtgatctggggaaccaaagactctgggactcttggtgccaacagagttactctaggagcagaaatgccaccaatgccaagtgccccacctgtgcatccacctccagatggaggatggggttggattgtggttggagcagcttttatctccattggattttcctatgcattccccaaagctgtcaccgtattcttcaaagaaattcagcaaatattccacactacctacagtgaaatagcatggatttcatccattatgctggctgttatgtacgcaggaggtcctgtaagtagtgttttggtgaataaatacggcagccggccggtggtgatagcaggaggcttattatgctgtcttggaatggtgttggcctcctttagtagcagcgtggtacagctgtacctcactatgggattcattacaggtttaggtttagccttcaacctgcaacccgccttaaccataattggcaaatacttctataggaagcgacccatggcaaatggattggccatggcaggaagtcctgttttcttaagttcattggctcctttcaatcagtacctttttaatacttttggctggaaaggaagcttcctgattttgggaagtctacttttgaatgcctgtgtggctggttccctcatgagaccccttggacccaatcaaaccacttctaagtctaaaaataagactggcaaaacagaagatgattcaagcccaaagaaaatcaaaacgaagaaatcaacttgggaaaaagttaataagtatttagatttctccctttttaagcatagaggatttctgatatatctgtctggaaatgtcattatgttcctaggtttttttgcccccattatattcttggctccatatgctaaagaccaaggaattgatgagtactcggcagcttttctgctatctgttatggctttcgttgatatgtttgctaggccttctgtaggattaattgcaaactccaaatatattcgacctcgaattcagtacttcttcagttttgcaatcatgttcaatggagtgtgtcacctcttgtgcccactggcacaggactacacaagcctggtattatatgctgtattttttggccttggatttgggagtgttagcagtgttctctttgaaactctcatggacctcgtgggtgcaccaagattttccagtgccgtcggacttgtcacaattgtggagtgtggcccagttcttcttggccctcctcttgcaggtaaattggtggatttaactggagaatataaatacatgtacatgtcctgtggggctattgtggtagcagcaagcgtgtggctgctcattggcaatgctatcaactatagattgcttgcaaaggaaaggaaggaggaaaatgcaaggcagaagaccagagaatctgaacccttgagcaaatctaaacattcggaagatgttaacgtcaaagtttcaaatgcacagagtgtaacctcagaaagagaaactaacatttaacaagaatcacatctctgatttcagtgtttatgactttatctaggagtttgtttttcattttgtttttttaaagtattagaaaaggttttagctgaaatgaggagtcacaattaaggatggaggtgatattttcctcaatggcaaattttaaattagtttttaaaaacttacttatttgggtagttaaattttgagattatgcatagaaagaatccatgctataggtttatttccatacctgactctgggtgtggtggttaaaatactaattttaaagtcttccagtgactttcggtcttggttatatggagaattctgaatcccaaacccctggtttaagtaggtagaaggaggatgcctaatcctacaaagtgaccctttatacatttcattttttatttgatattaaagtatgagatagagttgagagacaattaattatcccctcttacacacaaacacacatactcccacatacttacccacatgtacacagagtatctggagaataaaacccaaattcaaaaa

SEQ ID NO: 99762 - DNA, 422 bp, Homo sapiens
agtttgttgatacgttaattacactcattgacttctgaattttagaacaatcctccatttctacaataaatgcacttggtcatgatatattaccttttagaacatattgttggattctacatgctagaattttatttagaatttttgggctgggcgtgatggctcacacctctaatcccagcactttgggttggcttaagtccaggagtctaagactagcctaggcaacatgacaaaaccctgtctctgcagaaaataaattttaaaaaaagtcagctgggtttggtggtctgcacctgtaggtcccagctacttgggaggcttgggaggctgaggtgggaggatcacttgacttcaggagttggaggttgcagtgagccaagatggcaccactgaactgcagcctgggtgatagaacaaga

SEQ ID NO: 99763 - DNA, 543 bp, Homo sapiens
gacaattctagcctaattgtcttacatgtagagtgactaaaactgttcgaagacctttaaagtctttttgacctaacaaccaaagacagagttcagtatagccacagtcactggaaagggagggagagaagtccccaaaaggagagagccagagaagagtgagcaccaaatactgtgaataaattctgtacaaatctgtctaaggcttaaccacgtatgcataagacagactcagagcagttcagctaagaaggataaatgaactaaatggagatttgagctaccacgcaagagacagaatttgacctttaaggctaaccagattaattacctatttttaaaaaatcaaaactctggaggaatatatcaaaatccagaccctatacaacataatatccacaatgtacagatgtaacccaaaattacttaacaggaaaatgtgacccattctccagataaaaaaataagacactgatcctgaaaagacacatatgttagaattaaaagacaagaattttaaatcagttgttataaattttgccc

SEQ ID NO: 99764 - DNA, 550 bp, Homo sapiens
cccagcatgttatactacctgttcaggggaggtgtgcatgttctgagataatcacgccgtgttcttgagctttccaccgcagggaagtgaagtcatgcccccgcctctcctttatgcaagtagggcggggagtctaaacccatgcaggtagggtgtggggacccagctgtactctcccgccacctgtgggtgctgctcttgcggcagcctcgtaggtgagggataatgtggttcagccaacctgactacatccaagctgggatgatgaggacagcaagaaggcccactggctctgcaagtcctgtaggcctgggtccctcgagacaaagctcagatggcttctgtatcaaattcaaggacccagcatggtggctgctgctttgctcaccttcagaggcctggaagctggtgtttcctgcatgtgtaactgacggccccagtcccacatttgttagaaaaaaaccttcactttgatgagagtacagtactcctggctttttgtaattcaattgaaactcactgccactccctcattacagcagaagatgac

SEQ ID NO: 99765 - DNA, 322 bp, Homo sapiens
tacattctggagcagccttcagccctgatgggtgggagtaggtggataagtggcttagctttcttgctccttggagggtacaactctgggctagacgctgcaccatctcccagggtccccagcagccttggtccccagctgcccacaacagcctatcctcttggcacctgctcagtgacctggctggcttccttgttccttgactcacgtccccactccctactggtgtttcctaggatcacctaccaaataaacaacttctaccgaatttcctgtctcaaggcatgcattggggaaactcaacccaatgcagtttccagat

SEQ ID NO: 99766 - DNA, 457 bp, Homo sapiens
ataccaggaagagtaaaggggttgcacttatttttggataaagcatctgcacaacagtgtaccaggcacgaagcaacagatgtggcggagtgatgcgagtgatcattgatactgaagacgggagaacagatgagtcattgctaatagaatctcaagagaaataacaagcaacatggaattcagtatttgaatgagattttcttagaaaaagaaacaagtctatgaaacgaggcactgttcctgcccttgctgccctgagcctgtgggcctcattggtgacatccttggagtgcactctaagctggccttgcagctttagaaacgcaggcccctgcaggtgagcggcttgtcccgctcgggctgggttcaatccagatgcccccgtgcagccctctcttggcctcacacttcaatgtcgtcagtcccaacagggtgcaaggccagtgctttgtggttt

SEQ ID NO: 99767 - DNA, 438 bp, Homo sapiens
tataaaaagctgttaaaataggctaagtgtgagccataaacattaaactactaacgtaaatcaagtgtattttctatcttatacttccagggtccttcaagattatctgataagtaaaattaaagaatcagcacctaaattaaagtgctatacctaaaacaagaaactgaatcaaataaaatgaagttaacaggggaaaatgtgagatgcaccaaaactgagacaggtttatgacctgacagcaatgtgggtgaaaagagcaaggctgaatgtgagcagacctcatgtggagtatgatgtgcagtcttctataccccaactttcaaagagaccctgacaagctagaggggggcgcacaggaagaggagaagggcagtcaggctgacgaatgggcaacagccagaatctctctccacaggcaagaactacaaccatggc

SEQ ID NO: 99768 - DNA, 336 bp, Homo sapiens
gtgacagagtgagaatccatctcaaaatagaaaaaaaaaaaaaagacacatcaataggaacctcccaaaataaaatgtgaagggaaaaaagaatgaaaaatataaaaatgaacactctccacactgggtatctaagaactgtaggatagtgtcaaaagatgtacacatagttggaataccataaaaagaaagagaaagaagcaaaataaatatttgaaataataacttagaatattccaaaactaatggcaactaccaaatcacacatctaaaagctcagagaacaccaagtagagtaaataccaaaaaagctacacgtacacataggaaaatcat

SEQ ID NO: 99769 - DNA, 687 bp, Homo sapiens
aagtgtcttcctggggtaagactggattaggggaccctgctcggtcagtggtcctggtgatcgcctagggaaatagatctattctgctgggatctgggactgaatcctaggcaggtttgtggggagtaggatggtgagaggtgctggaaggcacgggtccacttcttaaccttccttttaactctgtgctgctgggtggaagctttatagtcaatgtcctctccatctctggccacattcccaggactcctgatcattagagtgactgttgtcccaagtggacataattataaatagctcccttcttttactgaaagtgtcctacagtggacaataatttagtcccctcctccagtggaaaatatactacacgcatgcaaaagctcagagggctccaggagtcgtcccaactcccctttctcagttccttgggatttttttttttaagtttgtcctctactagatcgcttctcattcaccaggatatcttagatcaaggctggcgtttgaagcctctgcctgagttcaagccccttgcttccggtgttcctgtccaagcccgcggactggaatctcccaaggaagttacgaataattcggggggggtggcgaaatggggggtggagtggggcgtgaaactgcagccttcacctggctaacagaagaggactcaggacgcccagcacc

SEQ ID NO: 99770 - DNA, 764 bp, Homo sapiens
  misc_feature (48)..(48): n is a, c, g, or t
gcatagcgtcgttcatccaaaaaaattagaaatataaaggaagttcgntaggaactctcgcctaggctggagtgcagtggcgcaacctgggctcactgcaaccttcacctccagggttcaagtgattctcctgcctcagcctcccgagtagctgggactacaggcacccaccaccatgactggctaatttttgtatttttagtagagacaggatttcaccatattggccaggctggtctcgaactcctgaccttgtgatcccaaagtgctgggattacagacgtgagccactgcgcctggctccttttgtatattttggtatgcatggagaggtgtttattgcctgaacatggagcccaaattacctgcccccaccccccacactggtcagcactggagctctggtgccaagctgacctctgggatcattttgtggattctcaagggctgtgaggggaaaacatttcaaattaggcaggatgcccagtaactaggagcacttggaatctccagcctcacaaacacaaccacgtctaaatgagattcaaagagaggaaaaattaccctccatgaatatcccttgaaattgcccagcagagaatactctggagcggcacgtggatgcatcccgagttctttggaaggaggatgtgaagagtgcccaggctggcaccccctggatagtatagcacaggcagtgtggagcctgatgaagcacaggcaggcgcgatgtggacagcagcacggacgtccggccgcccaag

SEQ ID NO: 99771 - DNA, 308 bp, Homo sapiens
taggcaaagaagggttgtctacacagcttggtaccaccattgatgaagggtttgagtgagatggggtagttgccactgccccaaagtgcttagtattactatcttagtctgcttgggctgccataacaaaacaccatggcctgagtagcttaaacaacagaaatttatttttggttctagagtctgggaagtccaagatcaatgtgccagcaaggtaggtttcattctgaagcttcttctcttgccttctaggtggctgccatcttgctgtgtgctcacatgacctctttgtgcacacttagggggtg

SEQ ID NO: 99772 - DNA, 577 bp, Homo sapiens
actttcatgatgcttgtgttaatgtaagtcatgcttagctctttcctggtggaatgaagtcctggggtccagaggccgctctagagggtcatgccttgtgtcctggtgctttcagaggccctagcgggactgctgtggcccctgcctggctgctgtagtccattagagggagctggcctcatggttcatcttagcctgtgccccggctctgtcgccttgtcatggagcctagtctccggcactctttaaactaaggctgctggccagggacaagcagtgttgaaggtggagaagggaggacctcgttggaagatggccttttccattgcattacttaactatatgacatctattagtaaccaatttatcccctcagtcttccaagaggcaggcaccaaagccgagaggccgagcagctcacctgtggccatgtgggcaagcccccgcctgctgctgggtcctcccgcctccgtggctcactctgagcatctgctccccacacagtttccagcacggtgggtgaggggccttgagtgtttgctgctgctgctgctgttcccaggatggaagaggagac

SEQ ID NO: 99773 - DNA, 537 bp, Homo sapiens
tgcctcccgggttcaagcgattcttgtgcctcagcctcccgagtagctagaattataggcgcccaccaccatgcccagctaatttttgtgttttttgtagagacgggatttcaccatgttgcccaggctggtcttgaactcctaggctcaagcaatatgcccgcctcggcctcccaaagcgctgggattacaggcatgagccaccatgcctggcctctctttaaacactttttgcttacacactgcttttggaatgaaaagaacaaggagacttcagtcatatcctcctggatttgaatgctaaggagctgcgtaacatttctgaaatcttcccatgtttattaataagagaataattctacctaccttgtagggttaaaggttgagtacgatagcatggaagaatttgcccagcacctagtaggctgtcagcgcctgttacctttcctttccccaatgctccctaaagctaagttcattggcccatcatgtagagtaatgggtccacaggcggtgaattacttgtgatgctcttcc

SEQ ID NO: 99774 - DNA, 236 bp, Homo sapiens
ggtggtggcagcaggatccatccttgttcacatgtgctaacagcaacagtagcagcagtgcagggggctggaggggtgaaaggttgcatgctcactggctgcagtgctagcaggtactggggtgcctgcctctgcacaggcattcccagcagcagtggaggaagcagagctcaggggcatgagggcccacactggtgtgtatgtggtcatgctggtggtggtattagcatggggtt

SEQ ID NO: 99775 - DNA, 875 bp, Homo sapiens
  misc_feature (374)..(374): n is a, c, g, or t
tgaaattctgaagtctcactgtgtcacccaggctggagtgcagtggtgcaatcttgggctcactgcaaccccccgggttcaagcgattctcctgcctcagcatcctgagtagctgcgattacaagcacctaccaccacacctagcttatttctgtatttttagtatagatgggctttcaccgtgttggccaggctggtctcgaactcctgacctcaagtgatccgcccaccttggcctctcaaagtgctggaattacaggagtgagccaccacgcccggccaaagggtggctgaaagttggttgcctcctaacttccaccaaaaaaaaattattcagaacattgttcagaaaacattattcagcacgataactnggaacaacatcaaataacctaaaagaatgaaaagtataccattaacaatgaactaatggaggcagtcaaaatatcaattaccaattacaggtccaaagataaacacagcagatatatgcacataatctttatattcatgaagccttctaaaaagaataaaatctttgttcttggccatttggaaagtgctgctacctagatctagggaatccaacagtcaacttcttcagaagaacgaatgaatttcaattacaaacccaaactgttgcaacatgaaaaactgttccaccaattagggatatcgtccaattctaaagggagaaattcacagctttcagcatgtctatgtcagccatgaactttggagtaatggagctgtccacagaactcaaaaagcctgaaaaaactaagtaaaataagagcctggatttttccaccaatttatttagggccactagcaaccaggaatgatttagaacagactatattttaatttagttt

SEQ ID NO: 99776 - DNA, 306 bp, Homo sapiens
agaagtagaaggtggaggtttccctgaagaagaagactcaacctggttccagagagactgccactcagcaactgcaagtatggccttggaatcggagagacttgggttcatgtcctggcttagccaagttccaccgaatgagttacttaaactcaccaagcttcgatttccccttctctaaattacagatactaataaaagcccctgattcattgggttgttgtgacaattacattatacagaatgtaggtaaagcacttagcactcttggcaaaaactaagtgcccagtaaatattaactatttt

SEQ ID NO: 99777 - DNA, 629 bp, Homo sapiens
  misc_feature (67)..(67): n is a, c, g, or t
  misc_feature (76)..(76): n is a, c, g, or t
  misc_feature (139)..(139): n is a, c, g, or t
attaccggtaccggtgttatcgatgcacaggataggtgaactatcaatgaatgatgatgagtaggtngggagaaanctttcgggactagtgggtccagcagggctcttacttaatttcttgtatcaaaatgaaatccangaaacatcaaatatataaatatttatttttaaaaaatataaaagttggagaaaaatattttttagaaggcttgcactgcagaaggccttctaatacataacataaaaccttgaatccataaaagaataaatctgacaatgcaaaatgtacaaatttcttgataaccaaaaaatggcataaagaaagcaaaaaatagagaaaaactgcaaatatatatgacaaaggattaatgttgtaacataaactgtgctgttagaaatcagtaagagaaaggcaaacaattctataagcaaacgggcaaagcacagaaacaaacatcacacaaaaagaatgatgaaaaggaagaagaaaggtaataagaaagaaatcacaaaagcaagagggagaacacaaattcaagcggccaatcaataacctaaaatattctcaattcattcatcattaaaaaatccatggacccggtgtggtggctcacgcctgtaatcccagc

SEQ ID NO: 99778 - DNA, 173 bp, Homo sapiens
aaagtgtctgtaccattttacattcccatcaacaatagataagggttaccctctggagagctttttaaaaattgtcatttctgtgccctacccacctgaggtctggcatggggcccaggaatctgcattttatgagctccccaggtaattcagatacatctggttcgtggata

SEQ ID NO: 99779 - DNA, 139 bp, Homo sapiens
taggaagcaacgcgaggtaggtgggcagctaaagcaagtacaatcaggaaagcaacgttttgaactgagactgcattactaaaaggaaccagccacatgaagatcgaaagtgcgttgtcagtatagggaacagctatag

SEQ ID NO: 99780 - DNA, 325 bp, Homo sapiens
cgcaggaaaattttacctttcctggaaaattggcaaatttcttctttcttttctcctcccccaactaacatttttcatcttcctctttgataacaatagctgcatcctgatccatctccttttggaattgactatggggacctggagaccttagtcccggtaattatgaggattttttttttttttttgagacatagtctcgctttgtcacccaggctggagtgcagtggtgcgatctcgtctcactgcaacctccacctccaggttcaagcaattctctagccttagcctcctgagtagctgggattacaggcacctgccacca

SEQ ID NO: 99781 - DNA, 726 bp, Homo sapiens
aataaataaatattagctgggcgtggtggtgcatgcctgtaatcccagctacttgggaggctgaggcaggagaatcacttgaacccgggaggtggaggttgcagtgagccgagatcgtgccattgcagtccagcctgggcaacaagagtgaaactccgtcttaaaaaagagtaccagtttcacatgttaatacaggcaaattctgtcaaactttgaagaaaaaactgtacccagagcattttaaaatggtaggtttatcaattttattatttgaagctacactgttaccaaaactgggtcagaaaactaccaaaaagaaaacttaccctcagagagaagcaaaaattctaaatgaaattattagccaatgagccaacctaatttagtaatacgttctaaaaataagtgatactgaatatatctgaaacacaaagattgtttatcattgggaaattgctgatgtatattacattgaaggattgaagaaaaaccatattatttctgtagatgggatgggagctaaaattcagtaatcattaattactgtttaatgtcctagcaagttacgtataggagaaaacttctttaatataatgtgtttaggctgggcatggtggctcacgcctgtaatcccagtactttgggaggttgaggtgggcagatcacctgaggtcaggagttgaccagtgtggccaacatggtgaaacaccatctgtactaaaaata

SEQ ID NO: 99782 - DNA, 370 bp, Homo sapiens
ggacatggtgatgacgttgacacagatgatgaaggtgatgaagaggtcgagatagtggctggtgcacagcgagtgaatggagcggcgcgtgggcgagtagtcggcatagtagggccggcgctgggcctctgcggggagggcggccatgagcgccgggcaggagggccgcccggcgctcctggctcctgcagactccattctcctcctaggtggccaagtgtagggtagaagttgggggcccacggctcatgtgaagatggggctggccctgcctcatggcagggctcacataagactggagaagggggactctctcaggaaaaggaccctgttctaggtgagatgcagctccctggggagctggctaggc

SEQ ID NO: 99783 - DNA, 859 bp, Homo sapiens
ggttccgctattgtttcctaatatggggaagaggaaaaagacttagtgctcaacagcgtgctgatggaagtggaagagcctgaagtcttacaggactcactggatggatgttattcgactcagtcaatgtactttgaactacctgactcattccagcactacagaagtgtgttttactcatttgaggaagagcatatcagcttcgccctttacttggacaataggttttttactttgacggtgacaagtctccatctggtgttccagatgttagtcatattcccacaataggcagcccttactaagccgagagatgtcattcctgcaggcaggacctataggcacgtgaagatttgaatgaaactacagttccatttggaagcccagacataggatgggtcagtgggcatggctcttttcctattctcaaaccatgccagtggcaacctgtgctcagtctgaagacaatggacccacgttaggtgtgacacgttcacataactgtgcagcacatgccgggagtgatcagtcggacattttaatttgaaccacgtatctttgggtagctacaaaattcctcagggatttcattttgcaggcatgtctctgagcttctatacctgctcaaggtcagtgtcatctttgtgtttagctcatccaaaggtgttaccctggtttcaatgaacctaacctcattctttgtgtcttcagtgttggcttgttttagctgatccatctgtaacacaggagggatccttggctgaggattgtatttcagaaccaccaactgctctttacaattgttaacccgctaggctcctttggttagagaagccacagtccttcagcctccaattgg

SEQ ID NO: 99784 - DNA, 200 bp, Homo sapiens
tagcacccacccctgcaggtggtgaggacagagcagtgaaccagatgtcactgcgacagcctcagctgcagccccgagtggccacaacagatgcaactgccagctcctgagcccatggtagagcgccagcaggtcttctggatcacaacagttagattgcaggcggcagggacccttggatggtgagatggggcctcctg

SEQ ID NO: 99785 - DNA, 341 bp, Homo sapiens
gatataccatccccactgccctttccagcatcctctacctgacccacacagagagctgcatatagaaaggagccattcacaagtttatgtgaaatttaaagattttgatttcttcttccaggagaatttttttctacaaggctaatctcttatcatacaatgaaagcctttgttcctctattattaaacgagtacgatggttcagagagcaagtgggagtgttttgggggatttgtcaggaaggtttatttccctccaactatgctatatgggcaagtgccagcataaacaagaatggatgagggaatggggggttcttgttaatgggcacatagtttcag

SEQ ID NO: 99786 - DNA, 403 bp, Homo sapiens
tggtcttgttaacatcctgtctccacatctcatgatttctactcgatagagaagtcattatcagttcacattatcattgaagaccttcccaacttaatacccagttttgccatctggctatatttcttcccccagaggagtgcaatgttgttagttggttcagggaccaatctgagagatggggtctattcccaactttataactgcacttcttttccaaccctgagatgcttatgcttcagcggcagcctggaagtcacccttatagagacggagatgtcccgcatgttcccagatgtgctgccagctggcttctctgcctcgttctattcctccagttcaggggctcttgctacgtagaatgaacctgctattactcggaagatgcatgtctgacaccaag

SEQ ID NO: 99787 - DNA, 141 bp, Homo sapiens
aacaactttcccaccgctttttgcaggcgtggtggtcaccaaggactgtaggaccttgccccgagggtcccaggaatgtggatggtgtggggtagatcgtcattgcaggccccaaatccgtgtcaggggctcgggagccag

SEQ ID NO: 99788 - DNA, 384 bp, Homo sapiens
  misc_feature (371)..(371): n is a, c, g, or t
ggacgggagctgaactagatcagtgtttatcaaacattagtcaaccttcacctgctaccttcatcactggcttaatttcacaaagcaagtgccttggtttttagcttaagcatgattgtaagaactatatatgcaatggcaaatttaataactatttttttctgatacatatacacatctatatgtagtttattactacattacctaaaatcacttcatgtactctcagcaatttaagtaccacactttgggacactgaactctactattaggagatgccatgtagaactgaaagaaagctcatgaaataaagctgtatctatccagtagagggtcacatcagaatggggtgaaaatgtcgacgcggccgnaatttagtagtag

SEQ ID NO: 99789 - DNA, 122 bp, Homo sapiens
caatgtaggggaaaacatgtatgaccaaaagacgccttcttgaatgtgagagtggatatgacatactgggacactcagttttcccgtagtaatagggcagggatgcaggtgggtgtagggcc

SEQ ID NO: 99790 - DNA, 2334 bp, Homo sapiens
  misc_feature (1095)..(1095): n is a, c, g, or t
tttcctaaaattctagaatcccttaaaaaaaaaaaaactcatgtaatagtactcataaagtctactcatgattctccaacctccaggctggactggacttagcccagcctaaaagatgaaagtgtgtgtgtgtgttacatatagataacatatgtgttatatataggtattacacataacatctatataaaagtatactttttttggtccacattaaaaggattcaacaatctttttttactaaccccagacatcatacttccaaaagcacatctttaagatcctgctactgaaatttgaatttgttgtctaagctcattagagatgaaaaacaactgctcgtcatttacaattcatcagctggttcggagtaagaaaatctctctctctttctctctgtctctctgtctgtctgtccgtctctctctctctctctcacacacacacacacagagagagagagagagagagagagagtgcgagagagaccattataccccagccttatttctaacttaaattctaacattagatttgatgcagatattttagctgctaacaggaagtgttatctccttttctatgagatgcctgggcttccctaaagtggtgctcatctttttttttttttttttttggctataaatatatgaaagagtctgtcaagagtgcctgcagggaatgaaagtgaaagtgcagtaaagagcaagtttatgagttggcagcttgagtgactggctcctaaacagggacccatctgttctggggttgccttgtgattctctctcgtggatgccgtgcctgcctggagtcctcacatgcaggtggccagctgacaagggatgacactggtgagcctgccggtgtgtccagaccctcttaggtgggtttctgtgcagaatttcccccagatccggctcttcagaaattgtcagtagtaaattatccttagtaaatgtggacatgccactttagaaatcatgtgactccaaaacccatgactatttccaactccagcttttgagaaccaaatgccttctcaagtctcttcaagcccagaaggcaggctttacctcatctctaaagaatctacanagttggagctaaaaaaaaaaagattttttcacaggttgctttattttattttctatttaccctcccacaagcaatgacatgcttgacatgtccgttacatgtcaagcactggcagaaagactggggagatggaggtgagtaagatgcagcctaatcctcaagaagctcacagcccagtgaggaaagcaaatcaagaaattgtaattctgtgtgtcaaaagcaatcatgggtgaatattcataactcatcctgaagccagtgcaggggcaggggcagggacggccttgcagagaagaaactgggctgagtttgaaggctgattaagaggtaatcaattattaattctcagagaaggtgatgatttaaaaaaaccaaaaaagtaaaagaagaggtaatcaactaaaagaggggctgaagcagggcagcagcaggaggaagacaggcaggagtgtgtgtttctaatagacggaaaagcatgttcaaagggccagaggcagatcctgtaagggagagggcatctcagagttaaccatacattcagtatggctggactattatgtgcaagaaccacagagttcagagggaggtaggcaagggccagatgctgaacggcttgcaagtggggcccagagaaaagaggcaacagcccgagccacaccatgacaagaggtggccacaggagattccctgtgtgaggctgtgccggcattgcacaaggcttcttaattattgcatttgccattaggaggacaatatttttgtcattgaacatgtcctacaccttgtaggaaatccagcaatcctggcccctggcatcaatgccagtaacaccctctgcaggccctgtagcagcatcagcccccagacattcccagaagttccccctaagaaccactgcccaggagaaggggacagagaaaggggagcctcctatgagaattcccctagtgattccctgtggaggtggttcccacatcatcactgccaggggctaccaggctcatctgcccgaggagagaaggagaaagaggagattggcacagtggggtggccctttgacctctggtggaaaatcagcatctagtcatggagctccataaatcaatctgtctttctcactgtctctctctcatggtccttcccaaagcccctccctaccaagactttcttttttggttttgttttccaaagcaacatggcattcacgcagggcctggtaatgaaatgagattaaaaaaa

SEQ ID NO: 99791 - DNA, 342 bp, Homo sapiens
attgtaaactttgaaaccttaacaactgtagacttttctcctttacttatatctgtcatacatatctgacttccttgcagcttcttcgcaagggaacctctttccctttcttgaggcagaggctcgctcggtcgcccaggttggagtgcagtggatcaatctcagctcaatgcaacctttgcctcccaggttcaagcgattcttgtgtctcagcctcccaagtagatggaattacaggtgtgcgccaccacacccagctaatttttgtatttttagtagagactaggtttcaccatattggccaggctggtcttgaactcctgaccttaagtgatctgcctg

SEQ ID NO: 99792 - DNA, 848 bp, Homo sapiens
aaacgttcagttttcacatgattttgctgtagcaccataatgaatgtatttctttgatggaagaaagaagcttcatgaaataaactgcttaaggatttgaagttggagctgaaaacatgggctgctttgttcttaatgacaactgctttgccatctaaaacatttctcctttttgaaggatctgtcttttctcttccagccacaaccctcgagctacaataacaggctcatgatttttttagatgccaaggttatgaatactcttttatgaatattttcctttgaactcatttctcttgaagaagaaaaatagccctacatattgcaggattgacaataacagacaaaacgtacaaattgttctcttaggggcagtaaaatgctccaaaatgcacatagaaaaattccaaatgcaacctgatgtttatggagcactgcctttgcagctataatttttagaaagtaatatttctgactgacatgaattatacagagcatatttcagagactaatatcaggttaatgccttaaaatgtctccgtttatgacatcatggctgcttttcctatatcagtgcaaactcttagtgagtagaatttgaggatatgtcttttcaaaggaagaaaaccttcactgaattaagctgcttatggttttattttttcttttatcccatttcaacatatccaccaacctcctctaaaaataattcaactaatgtgaactcaacagattatagtagatctcttattaatttcattttgcctccaaaggagcttatcatttaggcttataattatgtatgcagtactgtcgactaatgtttaggttcctcattaaaacttcat

SEQ ID NO: 99793 - DNA, 379 bp, Homo sapiens
agttcttcctccatttttgacccttcagcattcccttactttcttgcaggtgcagctaggcatttattagactggattcagcacttctagaaatttgcaacagctgtttttcatattacatggaaacctatgttgttgaaaaacagaagtatccaatctgctgctcaataacctaaaagcttgccatcacaggaaccccttcttaacccacagagttgaacgccaaggtgtattttcacacgtagcatattcttcctcatgtcctcatactgagtatgaagagatctctgatgaaggccattcctgaggaagcattttcaggctaactacagctaccttatcataaaaaaccagacagtatttcgcagcgtgtgtctgg

SEQ ID NO: 99794 - DNA, 338 bp, Homo sapiens
taaatgcccatcagtgatgcaactaagagattttacgaaggcatagcaggagaaaagcaagtaataaaagtaaacaaagtgaggccaggcacggtggctcatgcctgtaatcccagcactttgggaggccgaggcacatggatcactttaggtcaggagtgcaagaccagcctggccaacatggtgaaaccccctctctgcttaaggaggtcgcctgtagtcccagctactcaggagactgaggcagcagaatcgcttgaacccgggaggcagaggttgcagtgagccgtgatggccccagtgcactctagcctgggcgatagagtgagactccatct

SEQ ID NO: 99795 - DNA, 382 bp, Homo sapiens
tgacaaaattgcataacgatacaattctcatgcatttccctgtcattaagcaatgtgtgattaattggtttactgatgaatgtaattccaagaatagagctaagggaagaattaaagagtcaactatgatttagaatcgtatatcattagattgtgagttctctgactttggcaattcaaaagctccaccattggtaagtgagaaaggataccttaaatggaatttttagcatcttttgagggacctcgggggaaattaaatgacatgaattagttttttacatcgagatgttttaagaccttaattttttatttgttgcattacatcactcatacattgaaaggaaacaattttgattataaaagtgctttatagagagaa

SEQ ID NO: 99796 - DNA, 772 bp, Homo sapiens
ttgcaggtacttactaaatgtttgtcaaatggatttgaatattttgtgaattttatattcacataaaggattcagaagaaagcgcaactgagaaatgtccaaatatggtgaagacacttcttctagagtgaaagacataaagaaaataggctaactcctctggggagaggaggaaaaacataatttatatctctatgtataatgaactaaaactttattgccaaaactttaaaaatgtttgtttagatggaactcagcatctaaacttttctaaaaacccatgatacgtgagagaaacaaaatcagtcctaaaattacggtctgtaagcaaggagactttttttctagaatactatgaaacaatttttttaatggatcatctgttctcatgatatttctattactccttccagaatgggtttacatattaaataacaaagcagaagctaccatttccagggaagagaatgcatcaaattatttatgattttatcaatcctgattaactgcacagccacaaaatcaacaccatccttgtcactcctacaggcgcttgatgcctgagttctacatttcctgttttattcctgtgcactcagcacatccatccactttagtgaattgatttcattgaatactgttatgggttgaattgtgtacccctaaaattctaatccccagtacctgagaatatgcttgtatttggagacagggcccttaaagatataattcagttaaaatgaggccattaggatggccagtctgactagtt

SEQ ID NO: 99797 - DNA, 429 bp, Homo sapiens
aggtaggtgccatgtgtgggtacagagacttcagaaggtaggtgccatgtgtgggtactatttgccataattctagcttcttataagttttcattgaaagcctagcatttgaaatcagctgctccaagagggcagtaatggagtgtatcactgtgtcctaaagaattcagaacaattttgttttggtctggttagttaggcctttaatttgcaacaggttacctcagctgtgatttatatgggttcatacctttttatttggctctctgagtcccagaattgctctgctggcactcttgtgttagcatatatgggttcgcttttcagcttgctttttcagttcaccactcacaatatcttcatcaaagcagaccaattgtacatgatagttaccctaaatctctgttactttccataattaagaaagtt

SEQ ID NO: 99798 - DNA, 438 bp, Homo sapiens
actgacggcatgcatgtgtgtataaaatccaattataagtgtttcccttctctacacctgggcagaacactgtactgaggaaccaataaaaggagatggtctccaaacacaggtgggcctgcaccactgctcagccatgtttacaggccccactcccaaggctgtctttacaagcttcctaccttattcctgataaatctgtttgtttcacaaaggaaaggagacaatcaggctggaaactcctttccgtgcccgtgactcctgtcctgtctctcaaaaattcttccctaacctctaagagtctctccatcccatcaatgctctgaaaatccattccttcccatgtcctcatttttgagacaaagtctcgctctgacacccaggctggagtgcagttgtgcgatgatggctcactgcaaccttcgcctccaggactca

SEQ ID NO: 99799 - DNA, 532 bp, Homo sapiens
tggggaggagtccctggcagccacagccaggcactggtgccttatcttgttcagcacacactgggtctctctccctagttccaggccccttgccctcgcttctctactcatctgggatagaaatgcacctccaggcctctgaagagaaactaccttttccctctttcagccaaaagggctcaagccagcactcgctttgtatgtcctagaagatgagcatgcttccctctggctctctatagcagtgctctaatgggacaaagtcactgtgtgctcttgctttctctcctggtctttgtgcgtgatagtccctctctctagaaccctcttcctcctcctcattcctctgagctaatgtattcgttcttctgttcagccttgacatcactccctcagtaaatttctgaccattcccaagcctggattagctgtgtcttctgcatgcaccctgtaatctggaatgatcattggtggcactgattacactgctttatcattgcttgctgtttgtaccacctgctcaaaaaagaaa

SEQ ID NO: 99800 - DNA, 540 bp, Homo sapiens
taaattcttcccaccccagacccctctcctgagttctagtcctgtacatacaactacctaaagggcatctccactggctgtcccacaggtgtctacaagggaaataatttcctcccataatctggtcatttctactattaatatatcccattcctccaaaggacaccatctacccactaactggtgccaggatcctgggactcatttcaggttcctctctcatataaccacctaagaagactttagtttgccatttcaggagcatctctcaaatcagtaacatcctctcatgtgcaccattattctgtttcaggcccaccttccttactgcatggatcactacaatcacctcctgatatggtttggctgtgaccccacgcaaatctcatcttgaattgtagctcccataattcccacatgacgtgggagagacccagtgggaggtaaatgaatcatgggggtgggtctttcctgtgctgttctcgtgataattaataagtctcacgagatctgatggttttataaaggggagttcccttg

SEQ ID NO: 99801 - DNA, 271 bp, Homo sapiens
ctgaagggagcatgggagggtcgggaacggggcagaagccttgtgtgcagagggaaatggccctctaggaaccagagcccagggggctttgcttatagtcagatgctgacccttggggacgggcagcagagagcagctcccagccctgcctgctaagacatcaggagcaggaattccacaaaccagagtcctgtggtccagtgaattgagagaggctgccaactatagcgcccccttctcggagaaccacagatactttggagttccaaag

SEQ ID NO: 99802 - DNA, 322 bp, Homo sapiens
agatgcttaagtgccttatataaaatggtctgggctgggcgcatggtttgtgcctataatcccagcactttgagatggtgaggtggccggattgcttgactctaggagttggagaccatcctgggcaatgtggcaaaaccccacctttacaaaaaataaaaaataaaaaaattagccaggtgtggtggcacatgcctgtagtcccagctactcaggaggctgaggtaggagggtcacttgaaccttgaggttgagtctgcagtgagccacgaatgtgccactgcacttgggtgacagaacaagaccccgtctcaaaaaaaaa

SEQ ID NO: 99803 - DNA, 287 bp, Homo sapiens
ggtcagaagatttatttaggaacaagtaggttttaaaccatatctgtataattgtgtgaagctgaagccacatgcggtaatcgcctttaaccaagtcatgtgactgctatagacccgtagaatctagcacaacatggtattctaatgcaaaaattggaaatgtagaggagccaaacgttacatcatcaaagtgtcacataaagttattatggtctgattctctgtatttgaagaaaaggtataaagaaaattaaaaaatagctgaagaaaagtggcattgcagagac

SEQ ID NO: 99804 - DNA, 215 bp, Homo sapiens
atatgacttttctaggaaaacttttgaataacacttacatatgggaaaaatgttttaaaaactgggtacatattgggatagaaagaatattcaggtacgcattaaggatatttctagatctcttgtctcctctgggtacaactaggtgtacagagaaaaatattttaggagttttcatttcaaaataaacagaacaggaaaataaagaattcatt

SEQ ID NO: 99805 - DNA, 164 bp, Homo sapiens
cagatgatccatgaaataatgctacacccttaaattccagaagatggcatggtttttccaacctcctgtggatatggggcatgatcaatctattatatatgattaatacaagttcatgcttcttgttttatggtgaacaacattaaagaatccaatttagattg

SEQ ID NO: 99806 - DNA, 306 bp, Homo sapiens
atggtcattcataattcaggtggagatggttcatacacacacccttccatttgttgggtaagacgtcaacaaatagtagcaaattatccacatgcttccttggattcctgagttcactctaggacataattatcaagttcacaaatgctctgaagtcccaggaagaaagagtccttcagctctcataaattatgattcaacaaggaaaaaaaaaaagactttgcaatggaaagaacctcacactctattataattgccacttacaataaacatttggagctgattattttctcagtgtattttgta

SEQ ID NO: 99807 - DNA, 348 bp, Homo sapiens
ctgaatatcgagagaactgcagcaaaacacaacacagacaaacctctaaaaaataaagaacatctcaaaacaaagattgaaagtcatgccagagacatgaagcacaccacgtacagggaacaagcttaaaaattatagcaggaccagcccatgctacatggtgagaccctgtctctacgaaaaaaaaagaaactacaaaattagccaggcatggtggcacgcacctgtagtcccagctactcgggaagctgaggcaggaggatcacctgagcccaggagtttgaggctgcaataaattgtgatcatgccactgtatcccagcaaagtgtacagttctctctccctgca

SEQ ID NO: 99808 - DNA, 370 bp, Homo sapiens
gtttttcagagacgggatcatgctatgttgcccaagctggacttgaattcctgggctcccaggaattgaattgaactcctcagcctgccaaatagctgagactgcaggtgtgtgccaccacacccagctagtcttaaggcttttaaaacgccatctattcccatgtttcacaatcttggctgctagttaaaagtttaaagtttccccactagaattactggggaaactttaaatcaaaatctctctcttcttttttttttttttttgagactgagtcacccaggctggagtgcagtggggtgatctcagctcactgcaacctctgcctctcaggttcaagcaattctcctgcctcagcctctggagtagc

SEQ ID NO: 99809 - DNA, 191 bp, Homo sapiens
aaaaaatagcaacgattaagaattctgcatttctttctcatattaagaatactttagaagtagtggtacttggatttctacagtgattactattattccagcagaaaattcatcagttggtatcaatgaaatgcaagccttgacaaatattttattttggggtcttcgtataacaccatttctaaatccta

SEQ ID NO: 99810 - DNA, 815 bp, Homo sapiens
gtaccatggaattctgggtcatcagtttttatcatttactcttgccttcaagacttgcttgagcctgatgccaaagataccactttcataatatgatggatttctgccacgctctgccttatgatgtggatgcaaccatgatgcccatgatggacatctcaggttgcatggtcccttggtgtcccatagtgaggagctcaacttctgaggagacccagtagcattctgagagctatttttcagacagagagtcaaggagaacataagtttgatttagattctgagaggtatgtgctgtaatcatcctatagggtcttgttagcatctccattcagcatccacatctgccgtgaatatctccacggtaatcagatatggcctcagaggcagagcagctagaaccacagcctagacctgctgcagagcatttgtctctaggttcactcaaactggcatactccagagtcacctgataacaaattggaagcagtagtccacattttctttgtccaagatccaaaaagactcatcggcttctatgtctcttttttagtaaaagaaaatgtaagatgcaggctgggtgtggtggctcatgcctgtaatcccagcactttgggaggctgaggcaggtgaatcacttgaggtcagtagttcgagatcagcctgatcaatatggtgaaatcccatctctactaaaaaatacaaaaattagctaggtgtggtggtgcacaactgtagtcccagctactcaggaagctgagttgggaggatcacttgaacccaagaggcggaggttgtggtgagctgagatcatg

SEQ ID NO: 99811 - DNA, 213 bp, Homo sapiens
atctgtagggtgagagaacgaacaaacaacaggtgagatgcacatgtgggtgccagagtggacccaccaagcaggcgtgtgggcctacagctcgaaggagagcctgaggccaggctggagcagctccctggagctgagacacacattagcggctgtgcctggagcctgcaacgcaatgccaccagctccagggccactgcctgtcccacctga

SEQ ID NO: 99812 - DNA, 373 bp, Homo sapiens
cagctgtcctttattcctgcccccagccagagtgcggagcaaagatctgagggccatctttgtccagtgagaaacgagcccctgtggagctgctggtcccaggttccgagtgactggggctgtgaaccttcccttccagacctgggcccctcctcaggaactccactgccttctgcagaatcaattattgatgaggtccctgcagtcaggagaatcccagcggagtctcctggccaccattggcagccttcacaggaggcgaaattgctgggacaagatgagctcgttcccgaagacagggccagtgagttgtgccaggctgtggcttccagtgagcagaggcctagtgtaccctcaggctaggggtgccaac

SEQ ID NO: 99813 - DNA, 362 bp, Homo sapiens
ccatcctgtaggttgtcttttcactctgccaattgtttcctttgcaataacgttaattttttaaagaaaagtaacttaaatgcttgacaatatggaatttaaaatatggtacattcaagctgggtgcggtggtgcatgcttatagttgcagctatctgaaggctgaggtggaagaagatcgcataagcccagaagtttgagaccagcctgggcaacataatagcaagacttagtctcttttttaaaaaatggtatattcaatttagggaacaccatacagcagttaaagacaatgacctagatgaacaatggttctcaaacttcaatgtgcatcacaatcacctgaaggacttaataaaaat

SEQ ID NO: 99814 - DNA, 552 bp, Homo sapiens
agggtctcactctgctgtccagcctggagtgtagtggcgtgatcgtggctccctgcagtcttgacctccggggctcaagtcattctcctgcctcagcctcccaagtagctggggctacaggtgcacaccaccatgcctggctaactttttattttttgtagagatgagatcttgctatgttgcctaggctggtgtggaattcttgggctcaagtgatcctcccaccttggcctctcaacttaaatactaaaaagtaaatgtcacatcattttcatgtgtcacaaaatattcttcgtttttatttttctcaaccgttctttgtttaggggtcacatgaaaacaggcagtgggcgggacttggcccactggccttagtttgcccagccatggtctcagcttttagatggataggaatgccttatcctacctcaggccaagtacattgaaaacttggagagtagagccctggcaaacgtggttttcaaagcttccctgatacccagcaattcatgtgtatacccgagagaaataaaaacacatgtccaccaaaaa

SEQ ID NO: 99815 - DNA, 2030 bp, Homo sapiens
acctgaagaaaaatgaggacgaaagagcaggttgagagaaaaaatacccggactcgtggaggagatagataattcaggacagaggaaattctgtattctatgtagtatcctcagggagacaaagtcgagagaaagcatttttagtgctaaattagattgctaagaaagaacaactaaaacgaaataaatagttattagaatgataatgttattgttaaagttagaaattcaagggaagacctagcagaaaatagaagccgccacagatgcgaatgacgcctgaacgttcagtgtgctccctgtccacacacagccgtgggccaaggaagccttactgtgctcgaggtatttgagcccagcgtttttccagtgctggctaattgctaagctgtgcagacacggtggtgacccctaggaagccaaggttgaaaattaaaataggcatgtgggaaggaacggggtggccacgagctatgagggagatggatttcacggacaaccagacaggcctcggtggtaacaacgaaagggaaaacttagaatccagaattgctacaaatgtattatctaaaatacaaagaagtatgacagtgtgacccgtactgaggaagaacatcatcagtagaaactgtctgagtgtccagatgttgaatttagtaaaggcttggaaacaacttgtggatggagcagtagaaattatccattctgaagaacagagagaaaaaaacaagaaaaatgcacagagcctcagaaacccgtggtacaacatctgctgtaccaaagcacgtcgaatgggggttccaggagagaggaaagatatttgttacaataatggttaaaaactttccaaattttaattaaaaaatatgcacattcaagagcacaggaagtttgaactagaataaatgcaaagtcacatcatagtcaaactggcaaaggccaaagagaaaatgttgaaaggcctcagagaagaatgacccatcccatgaaaggggagcttcaataccgccagccactgacttcttagaaacaatggaggccagaaggcagtggagtggcatactcaagctgctcagagagaagaaccatcagccaggaatcaaaaccgttctacacaagtgaaagggaacgaacgacattccctgagaagcagagactggtgggattcattgttggcgaaacctgccttaaaggaaatactaaaggaagaccttcaagttgaatagaaatgacaccagacggtaacttgaatcctcaggaaggaaggacaggcactgcagatagcaagtgtaggttgacgtcaatatcctgtaaatatctctcctcacatcttaggttttactggaactacgattgtataaaataattacactgttgtcatggtatgtggcataaatggactgcacaaagaagacagggaataaagctgtgttacaacagttttatattgtactggacttgagctagtatcatgaggcatacggtgatccctagagcaaccactaagaaagttgttttcttagtgttctaaaaagtacaaataaattaaaatggtatgctaaacatatgtaatttaaaatcaaaaagggaagaataaaaaagacacaacaaagcaaggaaagtaaatccaactgtacgtgtaattatatgacatgtgaaaggtctctgtgccccaaacagacagggcagattatcagatagaaaaacaagatctaactgtatgctgtctgctagagaacaggaaaagacgcagcgtacaaacatcagctgtcataggagagcttgaatggctgtactcataccagacaaaacagatgttaagaaatattagaaaccagcctggccaacatggtgaaaccctgtctctaacaaaaatcacctgggtgtggtggcgcacacctgtaatcccagctactcgggaggctcaggtatgagaatcacttgaactcgtgagatggaggttgcagtgagccgagattgcgccactgcactccagcctgggtgacaaaccaagaccctgtctcaaaaaa

SEQ ID NO: 99816 - DNA, 533 bp, Homo sapiens
caatttgtacttgttaaacttaaatataaatgattcctcacccccataaaaaaccccagctgttctggatttttgccaataatatagaataccttgtttctaaaaagtgtggtccttggcttaacatcataagcagcacctagaaatttgttaaaatgcagattctcgggtcctaacacaggactagtgaatcaggagctgcattttaacaagatattcaggggattcataggcatgccataatttgagaagcacagtgttactggtgtctctgaggacgttagtagtatatctgctgtttctctttgaaatatagtgaaatactgatactgtagtatacacattggaagagagtacttagagcaggggttcccaagtgctggactgtttgcatcagattgacttggaagctattttacgtacgtaatactgtactgtttctcttggaaccagctgtagagtttccaattcagttatcttggtgtctcagttatcttagtgggatgtgagaaactggatatcgttaaaaaaga

SEQ ID NO: 99817 - DNA, 243 bp, Homo sapiens
agccaagatcgcaccactgcactctagcctgggtgacaaagtgagactctgtctcgaaaaaagaaaagaaatacctgagactgggtaatttataagaaaagttcaattgacttatggttctgcaagctatacaggaagcatggcagcatctacttttggagaggcctcaaggaacttttactcatgccagtaggtaaaggaggggcagccgtcttacaaggcagaagcaggagagggaagggt

SEQ ID NO: 99818 - DNA, 309 bp, Homo sapiens
ccagtaatatcagtatcactgagaacttgttggaaatacaaattctgaggtgcttcttccaaaattctagggatgaaacccactcatctgtgttttcgcaagccctctaagtaattctgatgcacgctaaagttaggaaccactactcacgtctttcacaccctggcttgtcggtcgggcagtaatttaaaatgtattttcaaacatccctaactaccttataggaactgatgaaatctcttcacttacaataacactctttacaataacgtcttgttgtaatcttagaaatactttatgaaattaggt

SEQ ID NO: 99819 - DNA, 821 bp, Homo sapiens
atttttattaaaaattattagcctactgaaatcagaaggatctttagaaattgtctagtacagcaatactcacctctttgttactttaattttaaataagatcctctgtataataaatacccacatttatcagtacctacataccagtggttatattgataattataacaggaagttactgaatttttttaaaaattccagatatcggccgggcgcggtggctcacgcctgtaatcccagcactttgggaggccgaggcgggcggatcacgaggtcaggagatcgagaccatcctggctaacacggtgaaaccccgtctctactaaaaatacaaaaaattagccgggcgtggtagcgggcgcctgtagtcccagctactcgggaggctgaggcaggagaatggcgtgaacccgggaggcggagcttgcagtgagccgagatggcgccactgcactccagcctgggcgacagagcgagactccgtctcaaaaaaaaaaaaaaaaaaaaaaaaaaaaaaaaaaaaaaaaaggggggggggcaaaaaaatacccggggggggccccaatttagggtgtacacccagggttttgttttacaacggggtccccaataagtaggatggctttaacaaagtaaagaagtgggcgagataaacaaggacggtgcacagggaaaactgcatgtggacttttgtgaagagcctatcatggtggaggacaattatggacaccacctcaaaatagaagcctagggaaattaatttaaggggtaatgtggtacacgatattatgggcaagaatggacaaagtatagaattacgg

SEQ ID NO: 99820 - DNA, 446 bp, Homo sapiens
gagggaacgactgctgttgctgatctgaagaagagtcacactcacgacagatgtcttgcggagggcagacccaccaacgccactacttggaaagactcagaggctaaagccatgaactctggcacaccacagcctctcgccaaagaatgcttcatgagacatttttaaatacccaccatcccataaagaacaggaaaggaaatcccactgtcagccccaccctgatcccactgtcagccccaccctgggccagtctcctaccacgggtcttccgggagaagggccaaagcactgctctctccaactgggcatctggtgatgtggcctggcttcctggctgggccacttcctccactgtctcaaagtggcactgcccttactcaacaagttcctccacagccagaaatgaatgcccagactgtaaggaaaggtcacccgcaaccctg

SEQ ID NO: 99821 - DNA, 138 bp, Homo sapiens
ccaccagcccaacttgtcccatctcatccatatcaatttatcccatccatctcttctattcatccatcccaatccatccatctttattctgtgtcatcccatcccatcccatcccatcccatccatctttattctatg

SEQ ID NO: 99822 - DNA, 464 bp, Homo sapiens
gtatctcacctgccctcactcaaggtcagccacagtggcctttgtttaggaaactgcacacccgctcatacctcagagcccctgcacttgcttctctctcctttgttcttttcaaaaagctctttgaagcttctactcaagtgttactgctcagcaaggcctcctaactatggtcattagaatcccccaactcaactccccagtgcccttcacatgttttattttttaccataacatttgccacttttccagaataatgtctttatttcgtttattatttcgccctacctctagcaggagataaccccatgtgggctgttgtacccctgctcctagaatattgtacatgctcagtaaacgttggttggttgagtaaatgatataagcaagccacatgttcactgggagccacagtgaaggcaatactagttaagtaccaaagtaaccgtaacagaggggtagtt

SEQ ID NO: 99823 - DNA, 304 bp, Homo sapiens
gctcatggcgagtctagagtagagcccacagcaccgacagcagaggaggcaaaaactgacctgcttagaggaacatatacagtcttatatgcaatctttagaaaagaaaagctgaaaaacaagttaggtatccacttatagctgcactgctcaaaacacacactagactatgaaggcgtataggaaaaaaattctcattaatttattgattacatgttaaaatgacaatatttttgatatagtggattacttaaaatatatcaattttcatgtttccttttttaaaaactaccctactgtgggt

SEQ ID NO: 99824 - DNA, 551 bp, Homo sapiens
agtctttcaccattgagcacgatattcgctgtgggctttccacataaggctttattatgttgaggtagtttcctcctattcctagtttactgagtgcttgcatcatgaaatagcattgaagtttgtcaaatccttctctgtacccattgcagtgatcaggttgcctttttcccttcattctgttaatgtgatgtattacactgatccattttcgaatgctgaaccatcttgcactgttttggtttgctatttgtttgtgtgttcgtttttcattgaagccaaaaagccatcataatttcagagtttcacgaagtatggagtggtgtttttgttgatgttgggactggggactggctagcaccatctcgttgaaggagaggggtcatctctttgcttctttttcaagtctcctgaagagttgaggagaaagcctcacccctgttgttatcctgtcttcagcaaccctcttgcctactaatcttcctaaagaaagagagaagggctgcaggctcaggtcctcggcaggcgctagtataaagcaagacttttca

SEQ ID NO: 99825 - DNA, 228 bp, Homo sapiens
tgctgggattacaggtgtgagccaccatgcccggccaacttctttccctttctaagtacttttgtctctgacttcctttcacaaagggaaagacgaaaaccttctgaacaaattctaagagacgtatcagaggagatgctatggcatgtcactctgccatcataacacaatgtggttatgctgaacagcaccatgctgggtctcgctctgtcgcattttgctggtcag

SEQ ID NO: 99826 - DNA, 270 bp, Homo sapiens
atttttaccttatagtatagtgttttcacgagtttttttttttaatactttaagttctggaatagttttcacgagttttaagagactcttcttggcaaacagttcaactcagagaaaatacttttaccagcaaggaggtataccttgttatatcggtctggggatgtgacttgacagttcaccttgccaggaatatctctgtgattttttgtttgtttgtttgttttgagacaagagtctcgctctgtccctgaggccagagtgcagtgg

SEQ ID NO: 99827 - DNA, 184 bp, Homo sapiens
tgatactagaaaaggaaagtcaaactaagaagacagtacttttgtgacaggaaagaatttagaagaaaattcatttaacaataaaagtttgttactgattatcaattcttttccgaccatgtcttcaaaggatgaatctggtatttcagattggaaaaaaagttgagcttctggttgcttctct

SEQ ID NO: 99828 - DNA, 524 bp, Homo sapiens
caataataaatctagataataacaactgctggcaagaatagggagaaactggaaacctcctacaatgctagtggggatgtaaaataatgcaggtatactggaaaacagtttgacagctccaatgaaagttaaaggtaaactaatcatataagcaacaattctaatcctaagtatctaccatgaaaaatgaaaacatatgatcacaaaaggactttacataaatgtttataatggcattatttatattaatcaaaaagtagaaacaggcggggcgcggtggctcacgcctgtaatcccagcactttgggaggccaaggcaggcggatcacgaggtcaggagatcgagtccatcctggctaacacagtgaaaccccgtctctactaaaaatacaaaaaattagccggaagtggtggcgggtgcctgtagtcccagctactcgggaggctgaagcaggagaatggcgtgaatctgggaggcggagcttgcagtgagccaagatcgcgccactgcactccagcctggg

SEQ ID NO: 99829 - DNA, 627 bp, Homo sapiens
acttcttcaccctactccctacagtgcagacccccaaggggcacagtggcctgccgcctcacccacagaagccaggcactcgggctcaggagacaagcaggtccaggtgtaactccctcccccccgcctggtaaaggtgcgatagaagcccatggtacaagcatctgggtcctcatccataagatggggatggctccatccactccagggatgtcagctaaaatgaaacacagcatccgaccacagggagccgggaataaacgaccgcagcctcacttccttttctggccctgtggagatgctgctctgcccacctgagtcggcttctgtcttcttgccaggccctcgaaagtgtacctcctttccagatcctgctaaagctccattcaccccaagaagcctcccttccccagcgttcgggagagatcatgcggacagggaacccagctcagatgccacatgatgccctggaaaaatggcagccactgttatccatgcagttcggtgcttggatttagactcacttaatgcatttctgaatgctccctggatcactgtgatcagagagtaagcacacgaagggcagggacccttttttcctggtatccctgacagagctcgggccca

SEQ ID NO: 99830 - DNA, 584 bp, Homo sapiens
cgctaccctactccagcctgggtgacagagcaagactctgtctcaaataaataaataaataagaatcagggagagacagaaggtcacatgacaacgaaggctgagatcgaagtcatgcagctgcaagccaaggaaagccagattgccagtgacaccagaagctgggggaaaggcccaggtctcccctagagccttggagagagcatggccctactgacacctggattttggacctccagcctccaaaacacagcagagcagattcctctggctgctgtgccccattaccacaaactgggtggtttaaagcaacaaatgttttctttcagctgcggaatccagaagccccacatcaagatgtcggcagagttagttccttctggagactctgcaggggtgtcacacgcctctctcccagcttctggggctgccagcaatccttggcactcctcggcttctagatgtgtcatttccatctcagcgtccatcttcacatggcctccttccctgtgtggctctgtgcatcctctcttcttctcctgaggactccaatcattgcattagaatccaacctactccaatat

SEQ ID NO: 99831 - DNA, 434 bp, Homo sapiens
acttttcttatataccatctccctttcatcacagcctgcattttagactttatatctgttccaaagtcttcttataattattattaacaataatactttgacaaacaaaaacaatgttaacagataataaatatttggtgctttctacacgccagtcacggtgctaagcacatcttcattccactctcacaagaaccttataaaggttattctaatgattacaatcccattttacagatgagaaaatggaggctaagggagcttggtgggtttgtcttaagtcacaacgctagacagacagggagctgatgttctgaagcaggtgggcctccaaagcctgagaccagtgtgccgaatgccctttgaagcaggcgtcttagaggccagccacactttaagcccatctcagtttgctgctggcaaatgtacctagg

SEQ ID NO: 99832 - DNA, 211 bp, Homo sapiens
tcccttattaatagcacctgacccaatttaggataagcctaaaaaagggctattccccataggggcttataggactagtttcatgctcagacaggaactttcagatccacctgtgcagaaatggactaaatacataggtggggttcactctgcaaaagacttagagaagaggaggaaagagttttaagtaccagtaactatgcatttaaag

SEQ ID NO: 99833 - DNA, 514 bp, Homo sapiens
ctaggaaatgaatgacgttggctttcgtataaggaatttagaaaaagaataaccaattattccaaatgaaggtgtaagaaagggaataagaagaagaagagttgctcatgaggaaaaaccaaaacttgaaaattcaacaaagccaatgaagctcattcttgaaaatattaattacagtcataaatcctaactacattgagcaagagaaagaaagagcaggcacgcatttccatatgggagtgagccagcagacagcccagcagatcctacacacattttcacaaactaaccccagaacaggctgcaaacctataccaatatactagaaaatgcagattaaatggatgaaatattcaaaactggagtttacataatgaacgtaagagtaatcagagaatctgactcattttaaatgtgtgtgtatgtgtgtgtatatatatgtgtgtgtgtgtgtgtgtgtgtgtgtgtgaaaaacattgactgtaataaaaatgttcccatcgtatcaactcca

SEQ ID NO: 99834 - DNA, 296 bp, Homo sapiens
tttctgccatgaactaattgcaatccctcatctcattcccagagacactgccaaacaaaagtactgctagaaagagacccagaaaaagatctcagaatttgatatcaaaaataaaaaggtacagacattttccagtagcagttgaactatctcaatcttacttctttttaattcaaaatggcttgtgatttcattgtacataatttttaaataaactttaaaatctgaatggctcatgaactgtgaaatatttctgtcaggccaggcacggtggctcacacctgtaatcccagcac

SEQ ID NO: 99835 - DNA, 187 bp, Homo sapiens
attttcaatggcaaccttgagcacccttctcttggcaaagtgattttagcagtgtcctggttaaacatcattccattgaaatgaagtagcagttcttaggggatttgacctatgtgacgtttagaccaaaaatgctacaaagggtagaattgttgaatgaccattgtggtacaaatgcatacattga

SEQ ID NO: 99836 - DNA, 506 bp, Homo sapiens
tatactggtaatgattatgatcctgtgtatctatataaagtcctttggttcacaaatgcttttatatcttttatttcatattagttgtatcctgtcaataatcctgtggagtagaaatcacagcaaaattaccgtcagttctgactatcactagatggtatctttattttctttgatttgtgcttctacatgtttggaagttgattcgtcacagctcacaattgttagtatacatattttaaacttggtatgttaatattgaccctggttgggaggaggattggaatgatgctaataaacttagcagtcttggtatattttacttgtggtgatgtgacataaccccctaccccagaacccaactcaccctgctctctattcactgagtccccttccttctgtaactacccagcccaaaccagtatctcatctctttcctcactcccattctcgttagatattttattatttccataaattcaactgtgataaatacccatggtacc

SEQ ID NO: 99837 - DNA, 376 bp, Homo sapiens
gctcttgtcgcccaggctggagtgcagtggcatgacctcggctcactgcaacctccgcctcccggattcaagcgattctcctgcctcagcctcccaagtagctgggattacaggaactatgtactgaagatttgggggcaaaagaggaccacatctgcaactaactggagatggttcagaagatgatgcacacacactcaagcatatcgagagagaaaggggcagaggacacagaaggccctgagtttaatgtgcatgttttggggaatttggaagaagagcccctgataattcatccttcattattcttgcaacttttctctaaatctgaaattatattaaaatataaagttagaagaaaacatgaagagtaaaa

SEQ ID NO: 99838 - DNA, 327 bp, Homo sapiens
  misc_feature (19)..(19): n is a, c, g, or t
  misc_feature (23)..(23): n is a, c, g, or t
  misc_feature (58)..(58): n is a, c, g, or t
agagaagaaagtaaaaganatanaaaaaaagatgatttaaaaataagtatataaagangcttgagaactatgtactgaagatttgggggcaaaagaggaccacatctgcaactaactggagatggttcagaagatgatgcacacacactcaagcatatcgagagagaaaggggcagaggacacagaaggccctgagtttaatgtgcatgttttggggaatttggaagaagagcccctgataattcatccttcattattcttgcaacttttctctaaatctgaaattatattaaaatataaagttagaagaaaacatgaagagtaaaa

SEQ ID NO: 99839 - DNA, 817 bp, Homo sapiens
gacaatggcgtgaacccgggaggtggagcttgcagtgagccgagatcacgccactgcactccagcctgggcaacagagcaagactccgtctcaaaaaaaaaaaaaaggtttatttggctcataattctggatgaccagaaagttgaagattgggtatctgcatctggtgagagcctcacgctgcttccactcatggtagaaggggaagaggcactatgtgtgtagagatcacatggccagagagtgagggtggaagtgccaggctttttttttttttttaaactagctttggtgggaactccctcacccctgctccccacaggaaggcattaatctatttatgagggatctacctgctataacccaaacaccccaccagcccccatctcccaacaccaccacactggggattaaatttcaatgtgggatttggagaggacaaatatccaaaccatagcagtcttaaagtatttaaattagaatttaaattaaaatttaaattacagtatttaaattagaatcatttgtggagtttctaaaaggtatgcattcctaggcccctctcaagttagatttatgaacactgatccccagtctgaattttaaaacagcaaaatctcatactggttctacagattattctgatgcacaatctgggttaagaaccactgtcctgtagtcgtgaagtctatatattttggtattttctttacctcttctctaattaaccagtctgaaggagtttgaattttggggatcgtacattgtctgcaagagaaacacattaacatccgtgcacatagagtcctttgtaata

SEQ ID NO: 99840 - DNA, 377 bp, Homo sapiens
gctctgtcatttccgaagagtgaccttcctggcctcctcactgtccaatctgcccctactcttctctgtcataacactgtctcgttttcctctgtagccctttttatgatttgtaactggacatttgttgatgttcacatttgttcaatacatcctcccagctaaattctgaacgtcaggaagatattccatgtctgcttcatcctggcagataggaaggactccagaatcatttaagtaatcttttataaaaagaggattatttttccagtttcttctttgactcagtacaaacagaatttttttaaattattttgctgcttcactccccatcttaactacaaaagtttaacctcaaaaaatgtttaacaagttca

SEQ ID NO: 99841 - DNA, 208 bp, Homo sapiens
ccaggtggagagatcctcctggagaaccaagccagaagggaggagaacagagtcaagagctagagatcaagttttgttggccatctgggggtacctgcattcaactgtggttgaagaaaagtgcaaatcctgggttatcttctaacataaacctagaccaaaccagaaggaaaccacaacagaacaaataaacagaacattcttactc

SEQ ID NO: 99842 - DNA, 582 bp, Homo sapiens
cagtctccaatgtaatgccctgtaatagaagctgtccttaaccctcaatcatctgtattcagctagtataaaaatgcaaatctgctcttatgcctaaacagttaggagtagaggagacttggcttcctttggaaagtcaggatgatagcttcatcccattctggtttttgtgattaattgtgacctacaaaggggtttactactctagcaggaactttgaatttcctatatacatctctttctggttagcaggcagaggaaatatcgttgacttttggcttcctggcaaatgtctcatttgccttgtcatttgttgattccttttccctgatctctgtttggtgtgataatgtacagcaaagctgaaaaccgcagggctacatgtacacttgtaggtacctatgttgtgattgccaaaaggctcagaaagccagttttctagtgaaaatggctaacattctaagaaatgctttcactgagaaagagaacgggtcaggggaaggtggaacttaaaggaagatggagtgttcctgaattcagattcctgaattagccatttatagtttcatgggaagacaatga

SEQ ID NO: 99843 - DNA, 204 bp, Homo sapiens
atgggggtgtcctggaagtgcatgtttctctttgctttgctttgcttttttgagacagaatgtccctctggtctcagctcactgccatttccacttcccgggttcaagtgattctcttgcctcagcctcccaagctgggattacaggtgtgtgccaccatgcctggccaatttttttatttttagtagagatggggttttgctg

SEQ ID NO: 99844 - DNA, 430 bp, Homo sapiens
gattcttcctaaaggtttcagccacagcccaggccctgagacgcctcacctgatcttctctgatggccaggcctgcattatgcatcccctctaggagtgggaatcgggtcaacccacataagtcatatgaaccaaggatggggaaaatgtaggctgggagcagtggctcatgcctgtaatcccagcactttgggaagccgaggcggtagaattgcctgaggtcagcagtttgagaccaggctggccaagatggcagaaaccccctctctactaaaatacaaaaattagccgggcctggtggcgggcgcctgtagtctgacttactcagaggctgaggcagaagaattgcttgaaaccaggagatggaggttgcagtgatccaagatcgtgccactgcactccagcctgggtgtcaaagtgactctgtctc

SEQ ID NO: 99845 - DNA, 986 bp, Homo sapiens
taacatttaggttcgggggtacatgtgaaggtttgttacacaggtaaactggtgtcacggtggggggtttgttgtatagattacttgactagctcaagggtagagcatttgacacctttattgttattgttcgtttgttctgcaacccaattcagctgccattacaccactaattgaaaccacccttgttaaaatcactggtgacttcatgaatgtcaaatccagtatttacatttttttctgcatttatgctgaaatataaagtatatagtaatgtgcattaaacttatatgtgcaatttaacaaatagctatcaagtgaacactcacattattaccacttagatcaagaaatagaacattttcttggcccagatgcagcccgcaccacagctgcattcctcacccagggggagtaatcactattgggtggcagtgctgattatttacttgctttgctttacggtcatgttttgttttgtcatcaccagggtcaaggtaatgaacatattcaccaccccaaaggtttccttctgcctcttatatcctactcaccactccctaccccagccccaaccaaacaaccactgatctgctttctgtcactacagattagcccatattttctagagtattatattaacaaaatcatatggtcttttcttttggtctggcttctttcactcagcacaattatttgaagattcatttatgctgtagcatatatcaataattcatcagtttttattgctgagaagtgtagcattgtgtggatatatcacaatttctttatccttcaccagttgatggacattagggttgtttccagtgtgggactattacaaataaagctattgtgaacgtttgaaaatatgtctttggatatacacattcatttctcttgagtaaataccggtaaaaacatttagaagctgagtaaggcctgcagtctagttcacagtagtgtaccaatgtcagtttcctggt

SEQ ID NO: 99846 - DNA, 256 bp, Homo sapiens
gctttcccattagtttctcgtttggttgaataaatgaatatatgtatgaatccatctatctaaccaataattacctggtgtgcattatgggtcaggcactatactagaggtagatgcaaggaatacaaaggtgaagaagaaaagcacggtctgtgtactcacacacaatttataatctagtgagttaacaatccattataatacaatgtgacaagacttacgaaaaaggatgccaaaaaaggctctatgagcacta

SEQ ID NO: 99847 - DNA, 394 bp, Homo sapiens
tttggtctgagataggctaggtgtggccaggagcatgtggggtagggacccagaagtggagaaggggtgctggggtcccactgtccctgcaaacctgcagccagtgaggctatcttcaggcaaaggtattttgaccctagaaaagccagtccctttcctgaagccaaagacttttctgagagttcagttaaagagtgttaaatgttttgatactgtttttatcaggtactgtgacctcattagttggagtcagttttagtattctcaagatttggtgttttaaaaaaggaaaataaaagacagaaaatgcccccaaaatgatcaaagggaacaaggttgaaggagccatcttcttgaagaacagcctgctcccgaaatacagccgccactggcc

SEQ ID NO: 99848 - DNA, 628 bp, Homo sapiens
atagcataattattcatacgcattctccttttttcaaaatggtcctagattaaatgaaaatgacatggtcactgggcctggtccccagataccctgaatcttaatttatctcccattattttagagttcttattagggagaccctaagttcatatgcaggctcaacctgcatataagaagttgtttttgttgttattattgtttttaattttctgattaaggaaaatataggggtataattacactacccatttcttatatgtcttataagctactcaatggtaaggaaaatatttctatagtctagtaacccttattgtccttctttcaaagaagaaaacatctcttgtcccattctgccaaagccagtgtgtgtgtttgtgtgtgtgtgtgtgtgtgtttaatgctgagtttttcacacataatcatagtgttatgaaatttggctctgccgagtaatggctgagttaaggtgtagccaaggcagagggtcgtttcagtaaatggaagagcaggtcactgaagaagatcctaagtgttgaatagacaagggactgtcttgggatgatgaagaacttcaggatagaggaaaatcagaagtctggtatcaacatctttaggaaatgag

SEQ ID NO: 99849 - DNA, 1050 bp, Homo sapiens
  misc_feature (942)..(942): n is a, c, g, or t
  misc_feature (964)..(964): n is a, c, g, or t
  misc_feature (988)..(988): n is a, c, g, or t
  misc_feature (1012)..(1012): n is a, c, g, or t
  misc_feature (1019)..(1019): n is a, c, g, or t
  misc_feature (1025)..(1025): n is a, c, g, or t
  misc_feature (1035)..(1035): n is a, c, g, or t
gcaccggttccccctgtttctttgaaatgcacttaagctgactttatttcccaatgccccttcttattgctatcacatactgaggcccagcccacccagttcctctccctcatgcagtaataactttaatagcttgtttattgtttttatttctaattcagtgtctgtcaccatcttggagatttaaacacccagtgacaccttcaacactttggcctttcagttggctgacccccttagctacaaaaatctcttcctctatattcccttggtcctattctagatattatcactataggttgaacaaccaacattcaaaaatctgaacttcacaatatgaaagttcatattttgaacttcacccttcaaaatatgaaactttttgagtgcctacgtgcagcctaaatcagatttgggattttcagatttgggatgctcagccagtaaggttaatgcaaatattccataatttcttttaaaaattcaaactctgaaacacttctagttccatgaataagggatactcaacctgtaccaacaactatactttcttcaaaacctaagcttcaaactgtcttttcttacatttattctattggcagaactttacttctaaacacactccagctctatcggtaatatttctctccacctccactactgtcaccctggcatgactcacttcctcctgcggtacttcaggggtctctttccagtctccctgctgtagtccacttggaaaccctgcatggcataggacaagagttcaacagagagttgtggaattaatgagtgatttacgcacgttgagaagatagggagtttgggatctgtgcatttaatacagatgttcatgggaatgtccaaggagtaaaaatttgaggaagggaaatttgaaagagttttcaggccagatatatctataggaaattcattagcatnaaatatggatagttgaggacanaagaatggggtaagggtcatttantggaaaaagtttaaggaccaggangcctganaactcntattggaggnctaagtaagggctaa

SEQ ID NO: 99850 - DNA, 456 bp, Homo sapiens
gtagcaggatcagtatgaagataatacagtatctcttaaaacaggcagccagcaaatgaactttctgcattggtcagaatttccatcatttcactgttaatgaggaaagtacagttctttagctaccatgaaagtcaaacatatcctaagccttttggaaaaagacatacatgttagaaaatctcaaatggatgagtcagcctgactgaccccacattgactccattttatatgctggccaaatcctgtttctgactttcctggcacagccctggacatgcttctgtatcataggacttgttccccagcgcctttgctacttccttcaggcacattcctaggaaagattggcagtggggtttgctctttgccagcactcctgccggtttgggggttatggatgccaggttgggctccaggcactctgctctccatttgtggaggcagggacggtaa

SEQ ID NO: 99851 - DNA, 430 bp, Homo sapiens
tttctctaatggatttaaatgtcatatttatgccgatggccctccaatttatatctctgtggcccaaacctcttctctgagtataccagacttgaagagtcaattatctccttttggttgccatacagagttctcaaacttagtgtgtctgaaatggaatttcattttgcctctccagcctttattctcctttttagtaaataacatcatcatctatctagatgctcaggccagaaacataggagtcagccaggattcattccttgaataaagaataaccaaaccataaacaagtcctttgatttaatctctaatatgtctccatttgacctctctcggcgccttctgctgccatccttctccacacacagctgtgaactatctagacactgcactggcgttctgactggttgtgtctgactatgtctca

SEQ ID NO: 99852 - DNA, 419 bp, Homo sapiens
agacatttgtcaaggcattgagggtacagtagcaaataagagaaattccttttcttcaaaacattcacagtccagtgggagaaacagacaagtaagtggaaataacaatgcaatgtgaggatgataataatattatcattttaaggtgctatcaattgtagcatgcactgttatgtactatcaagaaaaaatatactgccattaaactgaattataatgccttaacgatagtctcacgtgacacatgaaccagatacaccaacctctgcttactttgaaatcgtttattagctattccaagggatttcacaatttctctggcccttggttgctttgcttggtatgtgacaggccatcttttcagacatatctcagtaacaaaacatagcacaacttcatctgtttatatcttcgtttcc

SEQ ID NO: 99853 - DNA, 658 bp, Homo sapiens
agcagttactaaaatagtaggccagtgtaaggatatgttgactcttggatactgctacaccctatggctgacttgcatttgctatttacacctgtggttctcaggctgaaagccaggactcttgtaataaactgccacttctgaagagggagactaagatgtctgttaagataggaaaagagaaagaaaataacatttgtactctgcacagttttatctaataaattggcataagttggtcagtctgttattcactgtgaattccttaactgcccttgatgtaatttaattctaatcagttataacacaccaggaaagaaattgcttagacatgcaatctttcttagagcaacatattatcttcaaaaggagaattcctctttgaattttgaagcacctgtggcctcagggcaaagtgatgactacttaacccaaggaaaagtgtccctctgggactttgacatgtttctctggagcgcaaggtcattttcaaacatcctaccagaaattgcagaggaagacacttacattttgaaggcgtagagtctcatttaggccagtgttattctattttgattaatgaagcagtgagctatttcctaaagaatatggcaacaattgtgaagaattcatttaccatcagaaggtgaaggaattg

SEQ ID NO: 99854 - DNA, 689 bp, Homo sapiens
tgagacctcatctctacaaaataaaaataagaaaaattagttgggcatgatggcgtgcacctgtagtcctagctactcaggagtctgaggtgggaggctcgcttgagcccaggaatttgaggacatatataggggggattggaggaaactttgggtggtgatggatatttctgtggccttcatggtggtgatggattcatggctgtaaacttactcctaaactcatcaagtgtatacatgtatgtgcagctttttacatgttagtcatacccctaataagagtggctttatatctatgtctatctatctagtctctctgagaacttattatagtcagcatttttagacttacccaggtattgtcaccttctctgcccttactccttcttgtgtttctggtcttttatcaagagtcactctccctgaatttaattaattactttttttgtacaattgccttccccaaagtgtcactttctttctgcctgaagaatacccttagaatttgaatgtgtatttgaagatggtattctgtcagtttttgcttgtctgagaatcagttgtttttgcctcagttcttgaagaatatccccacaggacagagttctaggttgacagttattttcttgagcacagtgaagattctactccattgtttcctggcttccatctttgctgttgagaagtca

SEQ ID NO: 99855 - DNA, 699 bp, Homo sapiens
cacttaggaatttttctgattcggtctaggtgtatagaagtgaagatgtagcttatttcccaatatctgttcattgaaataatgtctcagtgtaaattttattgtgtagaactaacagttgtggggattaaattgcccttgtcccttaaagttattcatagtatcaaataattgggaaatgtttttggaaggaaagaaataggggaatagccaaaaaacagttcccaggacccttttaccataaggctacagcttcttgctggaacattaacctgcgtaattatgaagtagtagtagaatacagatcgctttattgatagaaaaagtgaattataaaaattccctggaagtttgtttaaaagactttattttttagccttacacttgaaatgtggtttcttttaaaactaggctgttggccagtataggacaaaaaacagactcctacttcaatattcagataggaagtgaaatttaaaattaattgacattttgtttaatgttagttagctcatataactcacggtacattaatgcacttcactctaattgttaagacttcacttttgttttgtaacaagtgattgctccgatttgtgtactttattccattccagtagaggtcactgtgcctctttaatcatctaagatgaaatttgatataaagatagatgaaaccgtgaggaaagaatgctagaa

SEQ ID NO: 99856 - DNA, 722 bp, Homo sapiens
gtcggcgcgggaggctcaaatggctggaggcggcgggcacgcacactgcgggctccgaggggcacaggtccaggctcctgcgtgaagtgatgctcctctttgccttactcctagccatggagctcccattggtggcagccagtgccaccatgcgcgctcagtggacttacagtttgagatgccatgactgtgcggtcataaatgacttcaactgtcccaacattagagtatgtccgtatcatattaggcgctgtatgacaatctccattcgcataaattctcgtgaactacttgtttataagaactgtacaaacaactgcacatttgtatatgcagctgaacagcctcctgaagccccaggaaaaatcttcaaaactaatagcttctactgggtttgttgttgtaatagcatggtttgcaatgcaggaggacctactaatcttgaaagggacatgttacccgatgaagtaactgaggaggagcttccagaaggaactgtgaggctgggggtatcaaaactgttgctgagttttgcctctatcatagtcagcaatatattgccatgaggaccccaccttggagggtctgaccatcttcacctgttccgcagagaaatgttgctctccattattcccttctaagccagagacccttatccactgctcctctaggtggcccatttatggtttgttgtaagagaaaaattaaaaaaatattgttta

SEQ ID NO: 99857 - DNA, 312 bp, Homo sapiens
ctgtggtttgggagaactgtgggaaaaagccagaatgatagaagttggtaggtagaaacaggaatgttataatttatcttttcaaaggccaggtgcggtggctcacgcctgtaatcccagcactttcggagaccgaggcaggcagatcatgaggtcaagagatcaagaccatcctggctaacagggtgaaaccccgtctctactaaaaatacaaaaaaaatagctgggcgtggtggcgggtacctgtagtcccagctactcgggaggccgaggcaggagaatggcgtgaacccgggaggcaaagcttgcagc

SEQ ID NO: 99858 - DNA, 385 bp, Homo sapiens
tcacttgtttgtttggttcccccatgagatcagaaattcagtaagaataggcattgctgtgtctccagcataaaacagaacctggacttgcaagcactaaataaaggttaggggaatgaatcaagaaccccggggtgtgtgtgctgtttttcccctttgcagatgaggagagacagctcagagtgcttaagtaccttgctcaggaaacacagctggtaggtgacatttaacagagacctgagtgaaggtcagaagtgagcattccagccagaagaaactgtatgtgcaaaggtcctggggccagagaatgtctgatgtgttcaatgagcaggaaggagccagaatcagtgaaaaaggtggacaagggggcagtgatgggttgcag

SEQ ID NO: 99859 - DNA, 452 bp, Homo sapiens
  misc_feature (280)..(280): n is a, c, g, or t
tctcttttactacatgtatccgaacaatttcctgttaactaatgttttgacttttggttttagtatattttagtacaaaagtccaggaacaagttcttcagttggatctatctgagatgctgattgttcaactgatgaacaaaaccaccatgtgctctactaaaatatgagtgtctgtttcttgtagtccttgtaatttagttttatcctatctgtgcatatataaaattagtttcatttatcactatgagacaaatgataaaaatattttcccggccgngcgtgctggtgtgcacctgtattcccagctactccagaggccaaggtgggaggatcacttgagcccaggaggtcgaggctgcagtgaggcgagattgtgccactgcactacagcctgagcgacagagtgagaccctgtctcaaaaaaaaaatcggttttcataaaaaaaaaa

SEQ ID NO: 99860 - DNA, 230 bp, Homo sapiens
tagaaattgacttaaagacaatcaattctgtttgtattttctgccctttgatcatttggaatggtctcttataggaggaagggggcagattgaaaaacaaatataaaaacacagtcactgaagatgtggccagtggaagaccttgcagagctgtgttgttacagaacacactccttcaacctagcatggttcttttccagtagctcttaaccatgatttccaagttgtag

SEQ ID NO: 99861 - DNA, 460 bp, Homo sapiens
  misc_feature (288)..(288): n is a, c, g, or t
gaagctggttcccaggcctgcctctaccctaccccagcactggttggaggctgggtctgttccagggctagggggtataggaggcctattagtccaccttctctggcagctttgacaaatagtcacttctataccttggaatggaggaagaaggcccaagtggtggtgagccagggcagggtaaagaatttgcttgtttctgccaggcacggtggtcacacctgtaatcccagcactttgggaggtcaaggcgggtggatcacctgaggccaggagttcgagaccagncctggccaacatggcgaaaccccgtctctactaaaaatacaaaaataaattagccaggggtgatggcgggcgcctgtaatcccagctactcaggaggctgaggcaggagaatctcttgaacccgggaggcggaggttgcagtgagctgagattgtgccactgcaggccagcc

SEQ ID NO: 99862 - DNA, 314 bp, Homo sapiens
atgaggggtctgttatcagctgaccggtgtccctaaaaggatactgtgaagtcctgagccccgcaacctgggaatgggactctgattggacacgagtttcttgcagatgtgattatactcaagaggaagccattagggtgagccctgatttgatgacaagcatcctcataagaagaggaaaacacggacacagagacacaagcagatggttccaggacagatgcagaggccagagggacgtggtcacagccacggatagcaggagcccccagaagctgggagaggcaggaagggtcctcccctggagcctcgag

SEQ ID NO: 99863 - DNA, 962 bp, Homo sapiens
aaagtactaaagactaaaatgcaaaaagcaatacttaataatataacagttttataagaagatgtttttaaaaccttagggcaggaaagaacttctaaaacattccagaatacccggtagttccactcttgagtatggtagtcccctattttctgcaagagatggactctaagacccccagtggatacctaaaacccagataggaccaaactctatgtctatgtttttttcttatatatacatacctatgataaaatttagtttacagattagacacagcaagagatttaaaacaataataaacataatatggaacaattataacaatatactgtaatcataaaagttatgtgaatatgatctttctctcagaataccttattgtactgttctcaactatttatgaactgtggtgactacaggtaactgaaaccatggaaagcaaagctgtggataagggggaactactatatatatgcatctacccaagaaacatgaacacagggagtcatgtactggtctatagctgtatagttcattgcaccatgagttatagtagccagaagttgggaaacaaatgctgtctcttgtgaaatagatgaataaaatgtgatagtaacatagtagagtactctctagcagttaagtgacaaattaagtctatatattaacagaaatattttaaaaaaattagagtgaagaaaaatgatgaacatattgtaatgatgcttctgtgaatttgaataaaaacactaaccagccctagtactaagaattggttatggataaattatgtaaaactaaagaatggattgaaaggatatgtatatactcagttcccaaaagtggagtggttacctctaggaagaaaggaggtggaagggaaatgttaccaagcatggtagttaaaggatacttcaattttgtatctatttcttattaaaaagaaacattctaagtaa

SEQ ID NO: 99864 - DNA, 550 bp, Homo sapiens
aaagtactaaagactaaaatgcaaaaagcaatacttaataatataacagttttataagaagatgtttttaaaaccttagggcaggaaagaacttctaaaacattccagaatacccggtagttccactcttgagtatggtagtcccctattttctgcaagagatggactctaagacccccagtggatacctaaaacccagataggaccaaactctatgtctatgtttttttcttatatatacatacctatgataaaatttagtttacagattagacacagcaagagatttaaaacaataataaacataatatggaacaattataacaatatactgtaatcataaaagttatgtgaatatgatctttctctcagaataccttattgtactgttctcaactatttatgaactgtggtggcgggtgcctgtagtcccaggtacttgggaggctgaggcaggagaatggcgtgaacccaggaggcggagcttgcagtgagccgagatcatgcgactgcactcgagcctgggtgacagtgcgagactctgtctcaa

SEQ ID NO: 99865 - DNA, 301 bp, Homo sapiens
acgaatcgagctcggacgggattcgctagagtcgagagcaggctctgcagcgtagggactggccgtcgtagatatcgtatgtgtggggtttttcttattatgataaatatctgtttacaagcattttaatatttaccaaattacttttttcaagacacatttcttaaaatggaaatcttccgtggccgggcgcagtggctcatgcctgtaatcccagcactttgggaggccgaggcgggtggatcacgaggttaggagatcaagatcatcctggctaacacggtgaaaccccatctctact

SEQ ID NO: 99866 - DNA, 946 bp, Homo sapiens
cttcccagttcatgattctctaaatttttgctcccatggagcacatatctctaacaattcaacatttattgagctagaaattgtgtgctaagttctaggaatatagaaataataatcagaatccctgacctcaagattatggaaaagaaaagaaaataatcttgtaattataacaaagagaaagaactgcttgcaattgcatgtataactgcaatagtgatacgagggcaatgcagaggcaagccttacactagctcaatgcccaacccaccacatcagaactaactactcatttacctgtcaggctcctctatcagatgatggacccagaggactgacagtatcttatattcccagtttccagtctagaaactggtacataaaacagacctaataaatatgccatggttcctaaggttttactaattgaattagcatggaagttagcaaatattagaatatttgaacaccagaatgaataaacaaacaaacaaataaataaatttctgtgcttgtctttgcagattggctctgttttggggcactcctttaatgcctagacaggctaccactctgccttagccttgactttcttcttgtaagcagcataaatagccatagataaaatcttgttacataaactaattatttcaatctataaaatcaatggaacttaaacaagcgttccaggcaagggaagaacagctcctggtgagtccttaggccactgagtaagcccagactccctaccaaaaggaactgagctttaacattctagacagaaaacctccaagagaagggatggagatatgtccattcactcagtaaatattcatgggatgcttactatgtgccaggtgctgttcaagaatgttcacaatagtagacaaaacagacaaaaatctttgtctccatggagattacattctagtggagaggtgagaaa

SEQ ID NO: 99867 - DNA, 1352 bp, Homo sapiens
ggcagggccctatgatttatgcaggagcagaggcagcacgcaatcgagctgtcaagagagcgtcacttattaggcaaatgctgcgtggtttttgaagagggtcgacactataaaatcccactccaggctctggagtggagaaactcagagaccaagtccattgagagactgaggggaaagagaggagagaaagaaaaagagagtgggaacagtaaagagaaaggaagacaacctccagagaaagcccccggagacgtctctctgcagagaggcggcagcacccggctcacctgcgaagcgcctgggaagcgagtgcccctaacatgcggctgccgctgcttgtgtccgcgggagtcctgctggtggctctcctgccctgcccgccatgcagggcgctcctgagccgcgggccggtcccgggagctcggcaggcgccgcagcaccctcagcccttggatttcttccagccgccgccgcagtccgagcagccccagcagccgcaggctcggccggtcctgctccgcatgggagaggagtacttcctccgcctggggaacctcaacaagagcccggccgctcccctttcgcccgcctcctcgctcctcgccggaggcagcggcagccgcccttcgccggaacaggcgaccgccaactttttccgcgtgttgctgcagcagctgctgctgcctcggcgctcgctcgacagccccgcggctctcgcggagcgcggcgctaggaatgccctcggcggccaccaggaggcaccggagagagaaaggcggtccgaggagcctcccatctccctggatctcaccttccacctcctccgggaagtcttggaaatggccagggccgagcagttagcacagcaagctcacagcaacaggaaactcatggagattattgggaaataaaacggtgcgtttggccaaaaagaatctgcatttagcacaaaaaaaatttaaaaaaatacagtattctgtaccatagcgctgctcttatgccatttgtttatttttatatagcttgaaacatagagggagagagggagagagcctataccccttacttagcatgcacaaagtgtattcacgtgcagcagcaacacaatgttattcgttttgtctacgtttagtttccgtttccaggtgtttatagtggtgttttaaagagaatgtagacctgtgagaaaacgttttgtttgaaaaagcagacagaagtcactcaattgtttttgttgtggtctgagccaaagagaatgccattctcttgggtgggtaagactaaatctgtaagctctttgaaacaactttctcttgtaaacgtttcagtaataaaacatctttccagtc

SEQ ID NO: 99868 - DNA, 928 bp, Homo sapiens
aaaaatcggcacgagggggatagatgaacttgatttagagagcctataccccttacttagcatgcacaaagtgtattcacgtgcagcagcaacacaatgttattcgttttgtctacgtttagtttccgtttccaggtgtttatagtggtgttttaaagagaatgtagacctgtgagaaaacgttttgtttgaaaaagcagacagaagtcactcaattgtttttgttgtggtctgagccaaagagaatgccattctcttgggtgggtaagactaaatctgtaagctctttgaaacaactttctcttgtaaacgtttcagtaataaaacatctttccagtccttggtcagtttggttgtgtaagagaatgttgaatacttatatttttaataaaagttgcaaagggttaaaacaacaacaacacaacacaacaacaaacaaacacaacaaacacaacacacacaacaagaacagaacaacaacaacaaacaacaaaaaagacaaaacaacaacacacgaagcgacgaccgacgcaaccaagaggaccaccgcgacacaacaaccaccacccaccgcgcgcgcgcgacaagtctggggacagcgagacggcggggacaccacaacgagggagaacacagcggagctgccgtgcgggcgacaagaggggcggagcacaaccgcaagcaacacccgccgccgtgagagacgaaaaggcacagacagcggggggggagcgcgacaccctacaccagacaggaccgagatggacaaaaaaacaacccccgcgcggggggggcaagcaccgaacggagcgagcggctcccaaagagaggacgaagaccaacccctcacagagggggggcaggcctacgaacacgaggaggaacagcacgagggagagcgatcacaacaacacgaaccggcggcagc

SEQ ID NO: 99869 - DNA, 1941 bp, Homo sapiens
ggcagggccctatgatttatgcaggagcagaggcagcacgcaatcgagctgtcaagagagcgtcacttattaggcaaatgctgcgtggtttttgaagagggtcgacactataaaatcccactccaggctctggagtggagaaactcagagaccaagtccattgagagactgaggggaaagagaggagagaaagaaaaagagagtgggaacagtaaagagaaaggaagacaacctccagagaaagcccccggagacgtctctctgcagagaggcggcagcacccggctcacctgcgaagcgcctgggaagcgagtgcccctaacatgcggctgccgctgcttgtgtccgcgggagtcctgctggtggctctcctgccctgcccgccatgcagggcgctcctgagccgcgggccggtcccgggagctcggcaggcgccgcagcaccctcagcccttggatttcttccagccgccgccgcagtccgagcagccccagcagccgcaggctcggccggtcctgctccgcatgggagaggagtacttcctccgcctggggaacctcaacaagagcccggccgctcccctttcgcccgcctcctcgctcctcgccggaggcagcggcagccgcccttcgccggaacaggcgaccgccaactttttccgcgtgttgctgcagcagctgctgctgcctcggcgctcgctcgacagccccgcggctctcgcggagcgcggcgctaggaatgccctcggcggccaccaggaggcaccggagagagaaaggcggtccgaggagcctcccatctccctggatctcaccttccacctcctccgggaagtcttggaaatggccagggccgagcagttagcacagcaagctcacagcaacaggaaactcatggagattattgggaaataaaacggtgcgtttggccaaaaagaatctgcatttagcacaaaaaaaatttaaaaaaatacagtattctgtaccatagcgctgctcttatgccatttgtttatttttatatagcttgaaacatagagggagagagggagagagcctataccccttacttagcatgcacaaagtgtattcacgtgcagcagcaacacaatgttattcgttttgtctacgtttagtttccgtttccaggtgtttatagtggtgttttaaagagaatgtagacctgtgagaaaacgttttgtttgaaaaagcagacagaagtcactcaattgtttttgttgtggtctgagccaaagagaatgccattctcttgggtgggtaagactaaatctgtaagctctttgaaacaactttctcttgtaaacgtttcagtaataaaacatctttccagtccttggtcagtttggttgtgtaagagaatgttgaatacttatatttttaataaaagttgcaaagggttaaaacaacaacaacacaacacaacaacaaacaaacacaacaaacacaacacacacaacaagaacagaacaacaacaacaaacaacaaaaaagacaaaacaacaacacacgaagcgacgaccgacgcaaccaagaggaccaccgcgacacaacaaccaccacccaccgcgcgcgcgcgacaagtctggggacagcgagacggcggggacaccacaacgagggagaacacagcggagctgccgtgcgggcgacaagaggggcggagcacaaccgcaagcaacacccgccgccgtgagagacgaaaaggcacagacagcggggggggagcgcgacaccctacaccagacaggaccgagatggacaaaaaaacaacccccgcgcggggggggcaagcaccgaacggagcgagcggctcccaaagagaggacgaagaccaacccctcacagagggggggcaggcctacgaacacgaggaggaacagcacgagggagagcgatcacaacaacacgaaccggcggcagc

SEQ ID NO: 99870 - DNA, 289 bp, Homo sapiens
attgcgtatgtgtgtaaaagaacatataacttcctcacagactcagctgtacactctacaggggcatcattgtatcttaggggtctagcctaatggctggtgggcactaggtgcttagcaataactattgaatgaatgaatgaaaaaatgaataagtgaattcaacacaacttttatttatttatttttattattatactttaagttctagggtacatgtgcacaacgtgcaggtttgttacataggtatacatgtgccatgttggtttgctgcacccatcaactcgtc

SEQ ID NO: 99871 - DNA, 99 bp, Homo sapiens
aaggaaagaagtaaaactgtctttattcttcatgacatgattatccatgtggaaaataggatggattctacaaaaaggctactgtaatgatataagatc

SEQ ID NO: 99872 - DNA, 866 bp, Homo sapiens
accccctcaacgctttatattccaccctcgtgtgtgaagtggaggtgcaggtggcattaggaatgaggatgtgacactgtaaagttaggagatgatttcttcccccccccccttttttttttttgagaccagggtcttgctctgtcacccaggctggaatgcagtggcacagtcaaagcttactgcagcctcaacttattgggctcacatgagcctcccacctcaccctcctgagtagctgggactacaggtgtgtgccaccacgcccagctaattttttattttttgtggagacaaggtcttgctttgttgccctggctgttctcaaactcctgggctcaagcagtcctcctgccctggcctctcaaagtgctgggattacaggcatgagccattgtgcccagtggagatgatttctcccgtaagttttttagttaaggaaaggagagtgctctgctcacttgaattttgtgggcctttttttgttacgatactcaaggataaaccatatttagttcctgctatgtttaggttattaaaataacccatttcttcttcatgtgtttagtaggagaagacatggaatgaagatagaattaatacaattgtggtttcttttctagggtttatctcctttacctgggccatttccgagatctctttcatttcctgctcccattgcctgcaatctgcagaacatttaaataaagggctctgatttcctcagttagtaattattggtaaaggaatttgagttccttttaatataaatagagggataactttcctgaataatcactaatatatggtgtcccaaaagtcttagtgtagttttaagctataatttctgaagtatatatgctaca

SEQ ID NO: 99873 - DNA, 495 bp, Homo sapiens
gtgaattcctgtgatagtgtgttattaggattatatatatatttttaagatggctgccacgaagtgaaagtcaaagaaatatcaaaagtacgcctggtacctcttgagtgtttttgcattgtaggtggaataggaacattgttatgatacacatggacaatgttccctagtcatttctattccagtggcaactatgtttgtaacaccattgactataagggtaccagagctggacccaaaaaatgtgagctgaaagggtggggtcaaagacaaggaacatgaaagaaagaagttagaagctagaggagaatgggaaaattgtgtgcagtctgacgtaacagtggtcactctgttaaaataagcttatttccttgataaagtcattggcaacacctggaattatgcaattttatttgcagggtgatttccaaatagttggtgccctacccaaataaatgtctcttggaaactcgagttagaatgagggctgagcta

SEQ ID NO: 99874 - DNA, 485 bp, Homo sapiens
tctctgaggttcatagggctctgaggacagtagttatcttgagtgaagcacaggctccttagagcaacagggtccttttaagtattagtactctgccatcaaaggtcatctgtgtgaaagaatgccaaatgcacaagataccctcccctcagggctgtctttccagaaatcaaagcaggatgttacaatctgagggccacacaacctcttctgtaagtggcttgctgtagtctctttctattattttattctctctcctttcaggagggcccttcaaaatcccacagtgcttaatctaactatctccctctgagggctctttttgcagtggaaaagcatctgaggtcattggagtgaagccttgctcttggagggaaaggaaccatgcctttgggagggatgtgtctgtttcctgccaagacttgtaggaaagcctgtcaatagagagacaccagaggagaaaaaaactgcaaactgtctgttac

SEQ ID NO: 99875 - DNA, 203 bp, Homo sapiens
gaacgggtgatgcggttgggggaggaggcggagccggctgaccgcagccaggagtcagcaccctggagggcggcccctcggccgcaggcagcggtggcagcgggacctcaacccagaacctgagccagaatcggaagagccagacggaggctttaggacgctgtatgcagagctgcgcagggagaacgagcggcttcgcgagg

SEQ ID NO: 99876 - DNA, 733 bp, Homo sapiens
ggccagtcacagggctcaccagtccctttggcggagtctctgcctcaattcttgacttgtaataatgtaatgatggctatcagggttggaacagcaagcacgataccagcactttaggaagattagtttcctctatttaatgctcatgactacctgcaagggaactccagtaccattgtgggaggaagattcacacagacggaagttaatgaataatgtgaagaaatgtcacacatgtccagtgagaagaaatgatgtgtgctacaggacttcaactgaggaagggatgcctgcgtggtcagaggaggctcatggaaaaggtcagaaatcacagagaccttcaacaggaaattttccactttccaactctgttaaagaaagctccagttgcctttcatcctctcatcctcgatcaagaagtgcagctgctcaatcatcatctagagctgcttctgaaatttcagaaattgaatatattgatattactgaccagaatgagctttccttagatgacactactgatcaacatactttagacaatttggaaaaagaattacaagtgctgagatctcttgcagatacttcagaaaagctttacagcttaacctcagaagagttcccagatttcagcagccaatcactgaatataagtcagatttccacagatttccttaagacctcacatgtgaggggtccctgtggagttgaggaattgagctgttctggaagagag

SEQ ID NO: 99877 - DNA, 271 bp, Homo sapiens
tggaagataatgttttctaggttaaagcctttcctgctcctctctaggcaaatagattttggtttcttctgcccacgagagggttgcagaaactcatattcctgggcaatgaggccaggtgacccctaggaacacagtcttcattgcctcaaactggccttcctccctagtctagctgtcagccgtcatcacgctaccaccatgccacagtgggatcagcattattctcattggtcttctacccaggctgacattgttgaaagaaaccttg

SEQ ID NO: 99878 - DNA, 762 bp, Homo sapiens
caggctggagtgcaatggtgtgatctctgctcactgcaacctccacccccaggattcaagcgattctcctgcctcagcctccagagtagctgggattacatgcgtgcgccactacgctcagctaatttttgtatttttagtatagacggggtttcaccatgttggtcaggctggtctcgaacttctgacttcatgatccgcccgccttggcctcgcaaagtgctgggataacaggtgtgagccaccgcgcccagcccaactgttaatgattattttgggggagtaggtcagcaataataaaatcattatgatccacatctaacccacttaaaaaatttctagattctcagtttctgtttaattgcctatcttctggccagttcaacctgcattaattactacagcaatacagtatgtcttgacagctaacagaactagtttcttcactttatttttcatcttaaaaattatcttgcttatcctttcatccttaatttccatatgaattttaaaaccaggttgctgcaatccacacaagtaaaaacacttggcattttttggaattttgttaaaattacagactaatttgaggagaatgtcaactttaaaagagggtatctcaacagcagcgttactgatattttgggctaatttttttttgtcatgaggggggctgtcctgtgcactgtaggatgctcagcagcaccctgatttctaattaatagacactaatataaacaaccttcctctctgtgtgatgac

SEQ ID NO: 99879 - DNA, 206 bp, Homo sapiens
gtcagtgaaagggaaatgcaaaataaaggaaagcaactggtcatctttgaattcccatataagctttaaatctcattctggtcagtaaaaatatcattagttgttttaccctaaaaatttttattttttttattttttagacatagtctccctctgtcacctaggctggagtgacctggccggaaagaggaattttaattgctaca

SEQ ID NO: 99880 - DNA, 145 bp, Homo sapiens
atcttttactctagggcacagcaggcaaactatgtacctgtgggtaaaatctggcctgctgcctagttttccaaggtctatgagctaagaatggttttcatgtaaatggctaaaagaaattcaaaataagaatattttgtgacaa

SEQ ID NO: 99881 - DNA, 175 bp, Homo sapiens
taattgtaggacaattgtgtcattatttgaaagcttcaggacacagaattttcagtgcatcagaagcacttttttgttagaggaataagcattgttagcatatgcagtaccagtttgccttttcttattctgattcaatttagggcatttaatttattagcacctgccagagtag

SEQ ID NO: 99882 - DNA, 424 bp, Homo sapiens
cccctgccttggatatataatgatgaactccaactttaaaagtccaaatttgatgccctgggtttacccactgatgcctgtttccccccaagccttccccaccccagtcatggacactccaagctctggtggctcagcccaaaagcctagagtcaccctgggctcctcctcctctcacatccacatctgatccatcaggaaatcctgactcctctatctttaaaatattttcagtttccaaattcctcttatgccatccactgctactgccctggtccaagccaccaactctcacctgaactgttgcagtagctccctaagtgtctccctggtcccacccctgccccctgtagtccaccctcagatcctttcagcaaccaaggcaggtgagtgtcctctgctccagacctccagtagcctccca

SEQ ID NO: 99883 - DNA, 450 bp, Homo sapiens
agccaatggaaaacagaagaaatcaggtgttacactcccagtttcgacaaaacgtatataccaataaagataaaaaaagacagagaaggacattacaaaggtggtcctgacctttgataaatctcgttattgattgataccaacctgggctatctttattgcccaaaccaacaggataatttgctgaggttgtggagcttctcccctgcaaagagtccctgatctcccaaaatctggttgagatctaagtttgattttgctgtacaactccttttctgaagttttactcatttccaacaaggaaggcaagttttcctgcttctgtggtgatggagagcaggcacctcctttcctgagtttcagcttgcctctgacagggaaggtgagtgtaagttgtttccagcttctaagatggcagagaacgatccccagcctgagccttgtttccag

SEQ ID NO: 99884 - DNA, 782 bp, Homo sapiens
ggaagggagagggagagggagagggagagggagagacagagagagagagagaggaaagagttgcctgtgtcttcttattcactttcttaatcatgtcttattataaatagatgttcttaattttaatgaaggcccatctacttaggtatgtccacaataaatgggctgggttatgaaatttataagagggcttaagaaatttggctcaggatcacagctagcttctgtgtgttgtgcaacacattctgatcttccagtgtttcaggccataacctacacaacttcactagtgcctgggaatgttcaaggccttggcttgggttcaaacctgcagggaaaacatgcagctgaacaggtcacagagagatcaaggcgctctgtgaaacatagagagcgagggaaacttggggaacctacaaacctatcatcatgagaatgaataaaaaattgtggtgtggtcatataaaggaagattatataacaattgaaaaaaagccctgttgatttccaaaacaacatgggtgaattccagaagtaccagtttggatgaaaaaagagagatacaagagattccatttatatgaagttcaagaacacgcaaatcttatcttgagtgacaggagtcagaatagcacttactccttatgggagaacagtggattctaactaggacaggacacagaaaaatcctctaaagcagggcacagaaatcttctgtgtcttcatctggctggtgagtacactgatcctttcaaatacaaaaattcattggattatatata

SEQ ID NO: 99885 - DNA, 839 bp, Homo sapiens
  misc_feature (32)..(32): n is a, c, g, or t
cggccgcctactactactaaattcgcggccgngcgacggagggaggtggctattgctataaatgggttttagaagagatcattatgaaggaaccattctgtatcttggctggtggtagtcacactgatctacacctatgataaaatttcagagctaagtacacattacatgtaaaatgagtgaaatctgggtgttggtagattgtatcaattgtgtcagttttctgtctgtgatactgtactacagttatgcaaagtgttaaccattggagggaaactgggtgaagggtatatggggtctctccttttttcatacaactccatgtgaatttacaattatctcaaaagtgaaagttaaatattttttaattgctgacagctttcataaaactatagaattatatgtaggaatattaatgttaaattttagtgtaaaattttaacatatagtgtctgcgagcactttgaataatggactatgcacaagagagggtcgtattggaagtataaagatggttcaaaatgaggaaatctgttaattcaatactaccatattaaaaaaagaacatatgatcctttccataaatactgaaagggatattaacttcaacatccatttctagcatttaaaaaagaaatcttagcatgggcatcatagtgagacccagtctgtatcagaaattaagaagttatctgggcatgttggcatgtgccagctacttgcaaggctgatctgggaggattgcttgagcccaggaggtcgacgcttcagtgaactgtgatcgtgctactgtaccccagcctatgcaacagagtgagaccttgtctcaaaaaaaaaaa

SEQ ID NO: 99886 - DNA, 1454 bp, Homo sapiens
cttataagccccccctttggggcgccctttggaaaaaaaaagggggtgacggaaaatggggcccccccgggggatatttcttgggcgccccccccttgtttgttttgtagttttgtaattggttgttttttatattccagtaaaactttatttagataaataaggagctagacagattttgcccatggaccatagtttgatcatggccaacctatgatctaaaccaaagtccctaggcaagttgcaatagaaaagttgtgtgagacagtgagattttgcctttgttattcaatggcaagctagcccatgctgacacagaaattggtcccttgttttttaaaatgctaaaatactgaacactggcttaatggttagctggcaggcattcaggaaattgctatcagaagatggaagaaataacttacacaagggtaatttatattatggaaaggtgaaactgccccttgagataacctgaaaggcagatcatctaccctttactaaagaaaaagacagaaaaacaaaatattttgtagttgctgttcactgcacttgacaaaacgtacagaagagatgaactcagaaaagactggtcagtttgcaggcaaaaatgaaaaggaagagaattcaaattcaagtacttactgggtaggatgaggcaacattttaatatcaaaaagaaagataaaaatgggaaatccttttaaaaataaataaaaagagaaatcctttagccaaaaggttgattaaaagccagttttgccgccgggtgcagaggctcacacgtataacaccaacattttgggagcccgaggcgggcggactgcttgagtccaggagttcgagactagcctggggaatacagcaagaccctgtctccacataaaaatacaaaaattagctgggtgtactcgtgtatacctgtattcccagctacttaggaggctgcagtgggagaattgcttgagccaggaaggcagagattgcattgagctgagattgtacctctgcactccagcctgggtgacaaagtgagaccccgcctcaaaaaaaaaaaaaaaaaaaaaagccagttttgcagcaagcaccaaatcactggatgactatgacacctactgttaagatctctgaatgacttaatatgcctcagactaaaactccaactaagattatactagttaatcccataaattggtcaaaatggcttaaggaaacagactaagggtgtggctttcccacctaagcctgaaaagcctcagttacccagaaattaagttcagagaggcatgggaacaagaaggcaaaggaatacagcaaactttagaagtatacattaactagatgtcacttttgggtcatctccctttgggtgataaggacattctgcaggtgtaaaaacaagtgaactgaatatatagtgaccagaagggctgagtcagtcttctactttgtta

SEQ ID NO: 99887 - DNA, 264 bp, Homo sapiens
agacgtctcaaagtcaactgctcttcatttcaccaatatcatattagtccatgtcactggcctacctccttctaatatgctttccaaatgcatccaatacagtcttttaaaaatataaattatgccaggcacaatggctcaagcctgtaatcctagcactttgggaggccagggcaggaggattgcttgagcccagaagtttgagatcagcctgagcaacatagcaagaccctgtctctgcaaaaaataaaaaacgggttgggt

SEQ ID NO: 99888 - DNA, 209 bp, Homo sapiens
cggaaccccacttcgccccatgcccccccccagcagcctagtgcaagtgctgggcagtcaggacggtgcctaagtggacctcagacatggctcagccataggacctgccacacaagcagccgtggacacaacgcccactaccacctcccacatggaaatgtatcctcaaaccgtttaatcaataaagcctcttccgcagctcaggctcc

SEQ ID NO: 99889 - DNA, 703 bp, Homo sapiens
gctcaagtattccacctgcctcagcctcccagagtgctgggatgacacgtgtgagccatcataccaggcccctgtgttgatgtcctaacttccaatgtgataggattaggaggtggggcttttaggggggttcttaggtcatgagggtagagtcctcatgaatgggattagggcccttctaagggggccccacagagctgcctcaccctctttccgccatatgagaatgcaatgagaagacagcagtctgcaaccggaaagaggggccccactagaacccaaccatgctggcactgtgatttcgaacttcagtctctggaactgggagaaatcaatttctgctgttttgaagctgcccggtctacggtatattgttagagcagccggaacacaccaatacgggcatatccttccagcggagaaatggaactcttctctggtgataacaaaccaagaatacagagagtcataggaccgtggatgcttcttttttttttttttagacaaggtctcgctctgtcgcccaggctggagtgcagtggtgcaatcacagctcactgcggcctcagccttatgggctcaagcaaccctcccacctcagcctcctgagtagctgggactactcagcctggctaattttttttgtatatcttgtagagacggggtttcaccatgttgcccaggctggtctcaaactcctgag

SEQ ID NO: 99890 - DNA, 393 bp, Homo sapiens
cacctcctgggttcaagcgattcttgtgcctcagccacccaagtagccgggattacaggtgtgcgccagtacgccctgctaatttttgtatttttagtagagacggtgtttcaccatcttggccaggctggtctcaaatgcctgacctcaagtgatccacccgcctcagcccctcaaagtgttgggattacaggcgtgagccaccacacccggtctaattttgttgagttttaaaataatttttatttagaattttatgtaggtgtttttaaacatatgacattatatttgaaatttgttggtatggtaagtcgtaaacatactaaggaatttaattatatactgtggccttggcatttcctctgaaattgtgcgttatttgttctatcatta

SEQ ID NO: 99891 - DNA, 373 bp, Homo sapiens
ctcctagcttcttaaaggcagggaccctggaaactaataagaggccatatttattgagcacttgctatgtgccacctactgtgctaaccattatttccgcgagtcctcaacagcacaggaatggaagctccctgagggttgagtctttggtttgccaatgttctctaggtctaggacaaggatctaatagcatgtagtaggtgcccaagaaatactgaatgaacttcctttgagctaggtactcatgggcccccacttttcaatggaagaagctggggcctggagaggttaagcagcctgcgtacccaattgcatggcaggaggcagcagaggcaggattcaaactcaattctcaccaactcgacttttgtat

SEQ ID NO: 99892 - DNA, 757 bp, Homo sapiens
agctgatggtatggtaggaggagtggagtggagctcttgccttgttactgaggaaatctatttgtttctagtattactggatttttggggaaaaatttgtagtcctccccttgaaaggcaaaggggctagttgtgccatttgcctgcacaggaaccatgaggagacatatggtaacttatgcctggcagctcctgaagaaggaactgggactgtaccagctcgccatggatatcatcataatgatccgagtgtgtaaaatgttccgccaaggcctcaggggattccgggaatatcaaatcattgagactgctcactggaagcaccctatcttctccttctgggatgtaagcagttgggctcagcaggattatgagggctcaaagaagcccaataaattgcatcccacttcctggcctaagctcagaactgagaaagaagacaaaaggaaaagcagatgagagacccaatggtcacttttattaatggccatacttctgttggagagggtgacttacatcatcaaccaagaggtttacctaatactgaaccccagatttagacagccttacatgcctagccacaggcaacgctggaccaaggcaggctccactgcaacagcaggcctgctgccaaaactcatggcagggaaaggtggagcaaaatatgggctgagagggaaggagacaatcatgcctagtttttctctttccaaattcatcaaagagtttaagtcactcctcaatgtaaaaggagaga

SEQ ID NO: 99893 - DNA, 229 bp, Homo sapiens
atcctgagctgttacactataaacacagtggcgctctctgtcattcttggaaaaactcctaaattcttaaagccttcctttgcaaacggtaatggggtttgctctttgtattatgtggtggtggttgtttgttgctgtgtagttttctgcttttttgactgactcccacctccatcctagttttggttggtggtcaagttgggagtttttcattgtatccttaattcac

SEQ ID NO: 99894 - DNA, 377 bp, Homo sapiens
tcagtctagctcagcattgccaaagagaaacataacgtaagccccttaagctctggattcggtttttccactgtgacttcagtgtggctggattgttggactgttctctctcagagagtccagtgtggccggataacttggactgttctctctcagaggctctgatcacatgactcctaggagtcctaaagcatcatctcctccccatgttagaggatctaacttgtgaacattgaaagtggctagaaagttgggacgctttgctccgtgtggtatgatggaggctgagcttccctctggggcttttcgatgataaaggggatatgcagcatggtttacaatcttattaatggtctggtctgtggtgctggctttct

SEQ ID NO: 99895 - DNA, 489 bp, Homo sapiens
gacgaagatgaggatgaagatgttcaagttgaggaggctgagaaagtactggaatcatctgcccccagggaggtgcagaaggctgaagagagcaaagtccctgaggactcactggaggaatgtgccatcacttgttcaaatagccacggcccttgtgactccaaccagcctcacaagaacatcaaaatcacatttgaggaagacgaagtcaactcaactctggttgtagacagagaatcctctcatgatgaatgtcaggatgctctaaacattctcccagtccctggccccacctcttctgccacaaacgtcagcatggtggtatcagccggccctttgtccagcgagaaggcagagatgaacattctagaaatcaatgagaaattgcgcccccagctggcagagaagaaacagcagttcagaaacctcaaagagaaatgttttctaactcaactgtccggcttcctggccaaccaacagaagaaatac

SEQ ID NO: 99896 - DNA, 284 bp, Homo sapiens
cctctggtccatgcttttcttgggggaaccagagatgcagtggctgcatgggaactggagcttccggtaggcatttgggaaatcttttctgagaatttagatgggacgatttaaattagggaactcctgatttgggtttgcatggccccaactttttgtgtgactccaaaggggagtaaagagaaaaactgcaggatacttcaggggaaagtggatgagactctctggacaccattcccccactttttcttttccttcttcctttctttcttctttttttttag

SEQ ID NO: 99897 - DNA, 111 bp, Homo sapiens
cagccaggccggcatggatttctgtagcttggtctctgtgctgcctcagtacacagtctcgcgggcctcctgcagactgtggggagctctgggtaaggtctgtgtggagac

SEQ ID NO: 99898 - DNA, 451 bp, Homo sapiens
tttctaattcttatatgaccaatggctcaagcaaatttcaaaagaaatgtcttaatctcaatgtctactttcatgtgaactgggaattactctgaaaatagtgtttcgtagccatgggttgtccatcattgttttgaagtaattttttaagcttatgtgtatatggatgagagaataagaaaagaggaagcagactgggcatggtggctcatgcctttaatcacagcactttgggtggctgaggcgggtggatcgcttgaggtcaggagttcaagaccagcctgaccaacatggtgaaacaccacctctactaaaaatacaaaattagccaggcatggtggcgcatgcctgtaatcccagctacttgggaagctgaggcaggagaatctgcttgaaccaggaggcagagtttgcagtgacccgactgcgccattgcactccagtctaggca

SEQ ID NO: 99899 - DNA, 144 bp, Homo sapiens
aaaattcaaaggcagctacatatatgggggaatttagaaagtcactatgcatgcccagaggaaaaggcaggctgagaaaaagagaaaggccttaagtttatacctcaggcttatttcttacacagaacactttataacaattta

SEQ ID NO: 99900 - DNA, 613 bp, Homo sapiens
taccgagacattccattgcccagggacgagcaggagacggatgccttcctcttgtctcaactgcaaagagccgttccttcctcttttaccaatcctcctcagcacagaccctttacgggtgtcaggctgggggacggtcaggtctttccctttccacaaggccatatttcagactgtcacatggggagaaaccttggacgatacctggctttcctaagcagaggtccctgcggccttcagcagtgttttgtgtccctgggtacttgagattagggagtggtgatgacttttaaggagcatgctgccttcaagcatttgtttaacaaagcacatcctgcatagccctaaatccattaaaccttgagtcgacacagcacgtgtttctacgagcacagggttgggggtaaggttacagattaacagcatctcaaggcagaggaatttttcttagtacagaacaaaatggagtctcttgtgtctacttctttctacacagacatattaacagtctgatctctctttcctttccccacaccttaccaaccgatctggatcccagctccctctctgactttgggtgatattcaaaatgctaaacagcacaaaatggtat

SEQ ID NO: 99901 - DNA, 712 bp, Homo sapiens
  misc_feature (685)..(685): n is a, c, g, or t
attcggcacaggagatgataaactgaagttcagaaaggttgtacagttttccccaacttcaccaggtttctaaatgtgttttagaaccaaaatactttggctctaaagtccacaacaaagtatgtctttctttgtatattctcttattctcactgctttccagtagaacaatccccttcaatatgagatgatccttttagaattaactgtctgggccagagtgcattatctgaaaaccaagaaatatagggatccacctgttaaaggcagacacagctacatacacatgtctccctaatccaagatggtacacctatccttgtctagggatttgctagatctgtaatatactacctatctcccctaatcagtcctagtaacaatacttgggatgacagattagaatattagcctaaggtataactagtctactaacaaaatactctagcagtttgggaaggtgttgagtagattttctttccaaagctgatttgttgtattactaccataattttggaagtattttatgaactaaaagttagcaagcccccataaagtttaactctctagaagcaacttctacacatgaagaatctagctggttagtgcctgagccccaactgattttattcttttagcctctacatgtcaagcacagctcattaactccaactctgtactttcnttaagtggtggcctcacatttgctctt

SEQ ID NO: 99902 - DNA, 505 bp, Homo sapiens
ggaggggcgggggaaaggaggcggcagccaggctgtgtcccctgaccgttggagcgtctgcgacccccgcatccccgcaccctcaaggcacctccaaagatgatgatgggttgtggggagtcagagctgaagtcggcggacggggaagaagccgcggcggtcccggggccacccccggagccccaagtcccgcaactccgagccccagtgcccgagcccggcctggacttgagcctgagcccgcggcccgacagccctcagccgcggcacggcagccccgggcggcggaaggggcgggcggagcggcggggcgcggctcggcagcggcggcagtcaactccggccccgcccttcagaggacaccttcctcatgcaccggacactgaggcgatgggaagcgtagaccccaaagatccctggagggctagttcgtatttttgtgttaaactatttgttagaataaagtaattttgctaataaaaaagaaacttcttggaggcctaaa

SEQ ID NO: 99903 - DNA, 382 bp, Homo sapiens
ggaggggcgggggaaaggaggcggcagccaggctgtgtcccctgaccgttggagcgtctgcgacccccgcatccccgcaccctcaaggcacctccaaagatgatgatgggttgtggggagtcagagctgaagtcggcggacggggaagaagccgcggcggtcccggggccacccccggagccccaagtcccgcaactccgagccccagtgtcaactccggccccgcccttcagaggacaccttcctcatgcaccggacactgaggcgatgggaagcgtagaccccaaagatccctggagggctagttcgtatttttgtgttaaactatttgttagaataaagtaattttgctaataaaaaagaaacttcttggaggcctaaa

SEQ ID NO: 99904 - DNA, 167 bp, Homo sapiens
tcgaattcaagcttctaacgatgtacggggacatgcaccggacactgaggcgatgggaagcgtagaccccaaagatccctggagggctagttcgtatttttgtgttaaactatttgttagaataaagtaattttgctaataaaaaagaaacttcttggaggcctaaa

SEQ ID NO: 99905 - DNA, 963 bp, Homo sapiens
ggaggggcgggggaaaggaggcggcagccaggctgtgtcccctgaccgttggagcgtctgcgacccccgcatccccgcaccctcaaggcacctccaaagatgatgatgggttgtggggagtcagagctgaagtcggcggacggggaagaagccgcggcggtcccggggccacccccggagccccaagtcccgcaactccgagccccagtgcccgagcccggcctggacttgagcctgagcccgcggcccgacagccctcagccgcggcacggcagccccgggcggcggaaggggcgggcggagcggcggggcgcggctcggcagcggcggcaggtccgcttccgcctgacgccgccctccccggtgcggtccgagccgcagcctgcggtgccgcaggagctggagatgcccgtgctgaagagcagcctggccttgggcctggagctgcgggccgcagccgggagccactttgatgctgcgaaggccgtggaggaacagctgagaaagtcgttccagatccgctgcggcctggaggagagcgtgtccgaggggctgaacgtgccgcgctccaagcggctcttccgggacctggtgagcctgcaggtgccggaggaacaggttctgaatgccgcgctcagggagaaattggctctcctgccgccacaggctcgagccccgcacccaaaggagccacctgggcctgggccagacatgaccatcttgtgtgacccagaaacgctattttatgaatctccacacctgaccctggacggtctgccccctctccgacttcaactccggccccgcccttcagaggacaccttcctcatgcaccggacactgaggcgatgggaagcgtagaccccaaagatccctggagggctagttcgtatttttgtgttaaactatttgttagaataaagtaattttgctaataaaaaagaaacttcttggaggcctaaa

SEQ ID NO: 99906 - DNA, 1043 bp, Homo sapiens
ggaggggcgggggaaaggaggcggcagccaggctgtgtcccctgaccgttggagcgtctgcgacccccgcatccccgcaccctcaaggcacctccaaagatgatgatgggttgtggggagtcagagctgaagtcggcggacggggaagaagccgcggcggtcccggggccacccccggagccccaagtcccgcaactccgagccccagtgcccgagcccggcctggacttgagcctgagcccgcggcccgacagccctcagccgcggcacggcagccccgggcggcggaaggggcgggcggagcggcggggcgcggctcggcagcggcggcaggtccgcttccgcctgacgccgccctccccggtgcggtccgagccgcagcctgcggtgccgcaggagctggagatgcccgtgctgaagagcagcctggccttgggcctggagctgcgggccgcagccgggagccactttgatgctgcgaaggccgtggaggaacagctgagaaagtcgttccagatccgctgcggcctggaggagagcgtgtccgagggtgaggggggcgggcggccggccgcgtgcgggagtcggggtgaggcgcgccactcacctccgtccccgctgcgctctcagggctgaacgtgccgcgctccaagcggctcttccgggacctggtgagcctgcaggtgccggaggaacaggttctgaatgccgcgctcagggagaaattggctctcctgccgccacaggctcgagccccgcacccaaaggagccacctgggcctgggccagacatgaccatcttgtgtgacccagaaacgctattttatgaatctccacacctgaccctggacggtctgccccctctccgacttcaactccggccccgcccttcagaggacaccttcctcatgcaccggacactgaggcgatgggaagcgtagaccccaaagatccctggagggctagttcgtatttttgtgttaaactatttgttagaataaagtaattttgctaataaaaaagaaacttcttggaggcctaaa

SEQ ID NO: 99907 - DNA, 1039 bp, Homo sapiens
ggaggggcgggggaaaggaggcggcagccaggctgtgtcccctgaccgttggagcgtctgcgacccccgcatccccgcaccctcaaggcacctccaaagatgatgatgggttgtggggagtcagagctgaagtcggcggacggggaagaagccgcggcggtcccggggccacccccggagccccaagtcccgcaactccgagccccagtgcccgagcccggcctggacttgagcctgagcccgcggcccgacagccctcagccgcggcacggcagccccgggcggcggaaggggcgggcggagcggcggggcgcggctcggcagcggcggcaggtgagcgggggaggctggcccccggcccgcgacggcctcgcgcccacctggtcactgccctgccctctgctcccaggtccgcttccgcctgacgccgccctccccggtgcggtccgagccgcagcctgcggtgccgcaggagctggagatgcccgtgctgaagagcagcctggccttgggcctggagctgcgggccgcagccgggagccactttgatgctgcgaaggccgtggaggaacagctgagaaagtcgttccagatccgctgcggcctggaggagagcgtgtccgaggggctgaacgtgccgcgctccaagcggctcttccgggacctggtgagcctgcaggtgccggaggaacaggttctgaatgccgcgctcagggagaaattggctctcctgccgccacaggctcgagccccgcacccaaaggagccacctgggcctgggccagacatgaccatcttgtgtgacccagaaacgctattttatgaatctccacacctgaccctggacggtctgccccctctccgacttcaactccggccccgcccttcagaggacaccttcctcatgcaccggacactgaggcgatgggaagcgtagaccccaaagatccctggagggctagttcgtatttttgtgttaaactatttgttagaataaagtaattttgctaataaaaaagaaacttcttggaggcctaaa

SEQ ID NO: 99908 - DNA, 1140 bp, Homo sapiens
ggaggggcgggggaaaggaggcggcagccaggctgtgtcccctgaccgttggagcgtctgcgacccccgcatccccgcaccctcaaggcacctccaaagatgatgatgggttgtggggagtcagagctgaagtcggcggacggggaagaagccgcggcggtcccggggccacccccggagccccaagtcccgcaactccgagccccagtgcccgagcccggcctggacttgagcctgagcccgcggcccgacagccctcagccgcggcacggcagccccgggcggcggaaggggcgggcggagcggcggggcgcggctcggcagcggcggcaggtccgcttccgcctgacgccgccctccccggtgcggtccgagccgcagcctgcggtgccgcaggagctggagatgcccgtgctgaagagcagcctggccttgggcctggagctgcgggccgcagccgggagccactttgatgctgcgaaggccgtggaggaacagctgagaaagtcgttccagatccgctgcggcctggaggagagcgtgtccgagggtgaggggggcgggcggccggccgcgtgcgggagtcggggtgaggcgcgccactcacctccgtccccgctgcgctctcagggctgaacgtgccgcgctccaagcggctcttccgggacctggtgagcctgcaggtgccggaggaacaggttctgaatgccgcgctcagggagaaattggctctcctgccgccacaggctcgagccccgcacccaaaggtgatggggtctgggcgtggggcttcctccatgtacccccttacccggatccttcctcccaaagtgtaaccttgctttgggcccaacctcccaacaggagccacctgggcctgggccagacatgaccatcttgtgtgacccagaaacgctattttatgaatctccacacctgaccctggacggtctgccccctctccgacttcaactccggccccgcccttcagaggacaccttcctcatgcaccggacactgaggcgatgggaagcgtagaccccaaagatccctggagggctagttcgtatttttgtgttaaactatttgttagaataaagtaattttgctaataaaaaagaaacttcttggaggcctaaa

SEQ ID NO: 99909 - DNA, 826 bp, Homo sapiens
ggaggggcgggggaaaggaggcggcagccaggctgtgtcccctgaccgttggagcgtctgcgacccccgcatccccgcaccctcaaggcacctccaaagatgatgatgggttgtggggagtcagagctgaagtcggcggacggggaagaagccgcggcggtcccggggccacccccggagccccaagtcccgcaactccgagccccagtgcccgagcccggcctggacttgagcctgagcccgcggcccgacagccctcagccgcggcacggcagccccgggcggcggaaggggcgggcggagcggcggggcgcggctcggcagcggcggcaggtccgcttccgcctgacgccgccctccccggtgcggtccgagccgcagcctgcggtgccgcaggagctggagatgcccgtgctgaagagcagcctggccttgggcctggagctgcgggccgcagccgggagccactttgatgctgcgaaggccgtggaggaacagctgagaaagtcgttccagatccgctgcggcctggaggagagcgtgtccgagggagccacctgggcctgggccagacatgaccatcttgtgtgacccagaaacgctattttatgaatctccacacctgaccctggacggtctgccccctctccgacttcaactccggccccgcccttcagaggacaccttcctcatgcaccggacactgaggcgatgggaagcgtagaccccaaagatccctggagggctagttcgtatttttgtgttaaactatttgttagaataaagtaattttgctaataaaaaagaaacttcttggaggcctaaa

SEQ ID NO: 99910 - DNA, 1003 bp, Homo sapiens
ggaggggcgggggaaaggaggcggcagccaggctgtgtcccctgaccgttggagcgtctgcgacccccgcatccccgcaccctcaaggcacctccaaagatgatgatgggttgtggggagtcagagctgaagtcggcggacggggaagaagccgcggcggtcccggggccacccccggagccccaagtcccgcaactccgagccccagtgcccgagcccggcctggacttgagcctgagcccgcggcccgacagccctcagccgcggcacggcagccccgggcggcggaaggggcgggcggagcggcggggcgcggctcggcagcggcggcaggtccgcttccgcctgacgccgccctccccggtgcggtccgagccgcagcctgcggtgccgcaggagctggagatgcccgtgctgaagagcagcctggccttgggcctggagctgcgggccgcagccgggagccactttgatgctgcgaaggccgtggaggaacagctgagaaagtcgttccagatccgctgcggcctggaggagagcgtgtccgagggtgaggggggcgggcggccggccgcgtgcgggagtcggggtgaggcgcgccactcacctccgtccccgctgcgctctcagggctgaacgtgccgcgctccaagcggctcttccgggacctggtgagcctgcaggtgccggaggaacaggttctgaatgccgcgctcagggagaaattggctctcctgccgccacaggctcgagccccgcacccaaaggagccacctgggcctgggccagacatgaccatcttgtgtgacccagaaacgctattttatgaattcaactccggccccgcccttcagaggacaccttcctcatgcaccggacactgaggcgatgggaagcgtagaccccaaagatccctggagggctagttcgtatttttgtgttaaactatttgttagaataaagtaattttgctaataaaaaagaaacttcttggaggcctaaa

SEQ ID NO: 99911 - DNA, 860 bp, Homo sapiens
ggaggggcgggggaaaggaggcggcagccaggctgtgtcccctgaccgttggagcgtctgcgacccccgcatccccgcaccctcaaggcacctccaaagatgatgatgggttgtggggagtcagagctgaagtcggcggacggggaagaagccgcggcggtcccggggccacccccggagccccaagtcccgcaactccgagccccagtgcccgagcccggcctggacttgagcctgagcccgcggcccgacagccctcagccgcggcacggcagccccgggcggcggaaggggcgggcggagcggcggggcgcggctcggcagcggcggcaggtgagcgggggaggctggcccccggcccgcgacggcctcgcgcccacctggtcactgccctgccctctgctcccaggtccgcttccgcctgacgccgccctccccggtgcggtccgagccgcagcctgcggtgccgcaggagctggagatgcccgtgctgaagagcagcctggccttgggcctggagctgcgggccgcagccgggagccactttgatcctgccgccacaggctcgagccccgcacccaaaggagccacctgggcctgggccagacatgaccatcttgtgtgacccagaaacgctattttatgaatctccacacctgaccctggacggtctgccccctctccgacttcaactccggccccgcccttcagaggacaccttcctcatgcaccggacactgaggcgatgggaagcgtagaccccaaagatccctggagggctagttcgtatttttgtgttaaactatttgttagaataaagtaattttgctaataaaaaagaaacttcttggaggcctaaa

SEQ ID NO: 99912 - DNA, 215 bp, Homo sapiens
aaattactgacaatctgttgaaacatattttgtgtcattcttatatagaagtattgtcagagaactgatgtagtgtctagtaagttgttccaaattggttggaaaacatgttgtagctgacccacctggacagcatgcatcaaagatctgctgccctttccccacttctgagctggcccaattctattctattgtgtttcctctgtgcaaaacca

SEQ ID NO: 99913 - DNA, 1045 bp, Homo sapiens
caggttggagtgcagtggcatgatcatagctcactgcagcctcaaactcctgggctcccaagcaagcctcctgcctcagcctcccaagtagcagggattataggtatgtgccaccacggttgcccaagctgaactcctgggctgaagcagtcgccctgtctcggcctcccaaagtgctgggactataggtgtgagccaccacacccagtctcattagcatttttacttgcccctctcactagacctcctgcgtgttgagagtttgagatctagaaaggtgatgagtagcaaaataagtttgctggatgattatgacgatgatgatggcagtgaatttagctcttaaataacaatgatgaaatggtctgtaaaatgtctggaatgtgtgtgttcctgatttagttttctgcatgtactgtaaattaaaatggaaaatattaagattttcaaatgttaaaaatcaacttgataaaagctgaaaaaaatcatggtccaatatctctaaatgatacagtatttgtgattaatggggcctaattcttgttccaccttgctgatttttctagttatttcctggtaagagttatttttttttccccgaagttgctagaattgcttttaaatatgtcagatgtcaaactgaataatgtcaccaactgtctgtaaaacaattagtacattggtggattgattatactgtttttgtttgtttgttttttgttttgttttgagacaggccttgctctgtctaccaggctggagcgtagccttagctcactcaaagtctggggtccaagtgatcctcccacctcagcgtcctaagtagctagtactacaggtgcatgccaccatgatggcttatttttaaattttttgtagagatagggtcttgctatgttgtccaggctggtgtcgaactcctagcatcaagtgattctcctatcttagcctcccagagtgctggaattacagatgtgagacactgcacctggtttctcttcttaacttaatgatatattattgattcaatagaagtcatttatct

SEQ ID NO: 99914 - DNA, 202 bp, Homo sapiens
taatatgaattggcaaggaaatcttcagagcctggtaaactgttttctctacttttaacatatgtaatggattcatgatcaaaatttgatgtgactgattgaattgtcttttattattatttacctcttctggtgttcagtatttgttatatactctaccctttttcttgacaaaaaatgaaaccagaatgttatgtattca

SEQ ID NO: 99915 - DNA, 412 bp, Homo sapiens
gctagtatggtgctgtgcacaacaggagctcagaacatgttttaaacagctggaagcatggattctgacattgtcaagtcacttggttaaacttgttccttctctccagtttaacagtctaagcctgtttattgtggaatccaatagaagaacaagatcacatggctttgggggggtcttggagatagaaagatgccactggcagcaagtgtggaggaaagagtgctccttaaactagaatatgatagttaatcccagctcctgagtaaagcctaaggtggaatcaattatgttgacaaccacctagatttctcttacagaacagtgccagtgctgtcttgttcttcaggtctcaaacacatggcaactggctctttcctagagttctctcaaactgaagaacaaaaaggta

SEQ ID NO: 99916 - DNA, 660 bp, Homo sapiens
actattgccaacatggctgctgcagcacagattcacagtccactctccagagctggtacctctgttataaaggagcggatcccagagagtccttctcctgctccttctctagaagagaatcatcgtcctgggagccagacctcttcccacaccagcagcagtgtgtccagctctccctctcagatggatcatcatttggaaagaatggaagaggtaccagttcaaattccaataatgaagtcacccttggacaagatacagctgactcctgggcaggcattgcccgctggattccctggaccattcatttttgctgatagtctgtcctccgtggagactctgttgaccaacattcagggtctgctgaaagttgctttggataatgctcgcatccaggagaagcagattcaacaagaaaagaaggagctgcgactggagctctatagagagagagaaattagagaaaaccttgaaagacaacttgcagttgagcttcaaagcagaactactatgcaaaagcgcctgaagaaggagaaaaaaaccaagagaaaattgcaggaagccttggaatttgaatcaaagcgccgggagcaagtggagcaggcacttaagcaagccaccactagtgacagtggcctgaggatgttaaaaggtaatgtc

SEQ ID NO: 99917 - DNA, 467 bp, Homo sapiens
gctgcccctccggtgaaaacagaggaagtgggagcggcaggaagcgctttgggaccagggcgacccctgaagcgtagaggaaccaggtcacaagcatacgtgaatgctcacattccatagttatcaaatgtattcaggtttaaattttacttttctagaaaaaatgtaaataatccgttgagaatatttaatgaaaaatgttggtcgtatctttatctggtctgcggctctgtccctgtttcctggataggagactacgtctgtatcttgtatcacaggaggcaccttcttcctgtttcctggcacagactttaaatcttagtgctcctcactctttgcgtctacgctgcttttatgaactgttaacactcactgtgaaggtctgcagcttcactccttaagccagcgagaccacaaacccactgggagggataaacaactccagacgggaggaacaaacaacttcg

SEQ ID NO: 99918 - DNA, 235 bp, Homo sapiens
tgctgccttgctttcgtgcagttaagtagaacatggtatatccacagaatggcttactgtgcagccataaaaaggaggtagaggtgtatatttgtgttctgacctgtaaagatgctccacatatctgtctaaatgtgtacaggtatgtgtgtataatgcatgtacgtgtggatatgtgtcatgtgtgcatatgtcctttgaaatcagggctgttcagccttgggttgacatttgg

SEQ ID NO: 99919 - DNA, 277 bp, Homo sapiens
cagcttgactgctcctgtggacagtatcaatggatacctgctcaccatcccttgctaacttctcttattcatggtcagaaaagagtttgatatgattcaactcttttgaaaagaatatgattttcccttgatttcaatattcaaggtaattcgtgggcttcacataacaggaagaatagtgctggctacctcttactgcacataaatatataccagcccctgaactcaacagcagagccagaatttaagccagggctgtctggtgtttctacagcct

SEQ ID NO: 99920 - DNA, 390 bp, Homo sapiens
ttcccttggatgactggtctctgtgttcctacttttccttctcctcctccctcccaactccaagacctaaacagggcttggaatttctgcacactggtcaaaaagcaaattctatcgaaagcaaacagaagcctaggcaatcctagacgagttagacccggctggtatttgtcttcctgttagagagctcagggatccaggtgaaactgatatcaccaaggagaatgaagtctcctgtgacatccccatagaaagcaaaaacacatttcacagtcaagatcaagcaatgatgtagcaaaaactctactctgccagacttgcagaggcccagatttcccctgattgtctgtgggcataataattcagaggaagatcatctaaaccaatgtc

SEQ ID NO: 99921 - DNA, 350 bp, Homo sapiens
caactttgggaaagtgaacattttaacagaattgagtctttcccttcattgcataagttcttctacagttactttcaacattgttttgtatattcagtatagaggacttacacattgttcaatttatttctagacatttaatgtttttttgatgctgttgtaagtggtggagttttttttttcccccagttttattttccaaacatcttgcctagtgtatggaaacaaaatttatttttatatattgatcttgtattttgtgcgcttgctaaattcacttatagttttggcagtatgcagatttgtttttgtttttgtttttgtttttaatgtgctgtcatgccatctgg

SEQ ID NO: 99922 - DNA, 670 bp, Homo sapiens
ctgctctcaacatggctcacacgtgactgttggcaggaggcttctgttccttgctggctattgataggggaccttggttactctccatgtaggcctctccatagagctgcttgggtgtcctcacaacatggctgctggtttcccccagagcaagtgatctgagagggagagcaaggagaaagccacaatgcctattatgacctagtctcagaagtcacactatcagttccaccacttttactcatagaactgagtcactaagtctagctcacactggaagggaagggatttaggcttcacttcttgaagggagggttaccaaagaatttgtggacatattttaacagaaaattttctaattcaaataattacaagacctctatcaagacaactctggccaggcgtggtggctcctctggccggagtgcaatggctcatgcctgtaatcccagcactttgggaggccgaggtgggtggatcacttgaggtcagaagtttgagaccagcctggccaacatggtgaaacctcgtctctactaaaaatacaaaaattaaccaggtgtggtggtgcgcttctgtaatcccagctacttgggaggctgaggcaggagaatcgcttgaacccaggaggcggaggttgcagtgagccgagattgtaccactgtactcc

SEQ ID NO: 99923 - DNA, 514 bp, Homo sapiens
tgaggaagagaaagagctggagtcctttaaaattaactgcctgtttttccctctgtggctagtgagccttatctctccacttcccaggcattgtgaagaccctgtttctctagctgtgcagctgcaaggtcactagacagataatctcaagtcgtaaaacatgttgttccttaaaaagtaagaaatgatgtaatgcatgtcttaactgaataactgtctttgtttcttgcttctgtaatacgcttccccctgcacagatctacccccaccccacgaaatgcttaaaaggtagcttgactttttgttcaaggctcagtcctttggatgttaatctgactgggttgatgcacctaaacaattaaataattcctcctcaacccctccggtctctctgattccttaattatcccgctgcagtgtctctactaaaaatgcaaaaaattagccaggcatggtggcacgtgctgtagtcctagctacttgggaggctgaggcaggggaatagtttgaaccc

SEQ ID NO: 99924 - DNA, 517 bp, Homo sapiens
gagcggggttattgtaggcacccccatactgttctccccacttttatccttgtccctctttagtctgtgtttagtccctcaacacatcagtcaaagtgatcccattaatgtaagtcagggaatttcatatctttgctcaaaatcttctgatgtcttccaatttcaacaagagtgaaagccaaaggcatgcccccaaggctctttcccgaaatcatcatctttctctccctctctttcactctgctgtagccctacccatttccttttctttttttcttttcttttttttttttttttttggagacagagtcacccgggcgtggagtacaatggcatgatcttggctcactgcaacatccacctcccgggttcaagcaattcttctgcctcagcctcccgagtagctgggattacaggcacacgccatcacacctggctaatttctgtatttttagtagagacagggtttcaccatgttggccaggtgggtcttgaactcctgacctcaggtgatcca

SEQ ID NO: 99925 - DNA, 225 bp, Homo sapiens
atcacacaatctcatctcggctccaagtggaagcttgctcagcaccacggccaacctgatcccactgcagatgttccaacagcctggcacgcagatggcccagggcaaaagcctcatcgaatgctgaatacctgtgagatcatttcttacaaagccaaatgaacaacactatgttaattttcaaattttggcatggaaatcacattctaagacgcttcccaagct

SEQ ID NO: 99926 - DNA, 425 bp, Homo sapiens
tcactcctttagccaatatcatgaaactctgaaactttatagcaggatgaaaacttaagcctgtagtctaaagacccagaattatgagtgaggaaactgaggccaggagagccatgaatgatagtgtttacttgattgctgtttcagatttcaccagcttttattgatacttcagcattttacttagtcgatatatctcttcgtgtgactcaaagtatcccagtggagcacagttaactgccctggatccgaattgccactggaggccgtggcagtgtcggcatcaatagggatcacccatgaccttttatttgggatgtagtagggggtctgaagttgggaaagtctgaggtggtactcagttctgggttgaatgtcttgtgaaaatcctgtgaatacatcttgcggagaaacacagaggggaa

SEQ ID NO: 99927 - DNA, 764 bp, Homo sapiens
cgtcacctccatcatccgctcctcccagacgtctctggtcacctgtgtaaatggactccggagcccccctctgacgggagatctggggggcccttccaagcgggcccggcctggccctgcatcgacggacagccatgagggcagcttgcaacttgaagcctgccggaaggcgagcttcctgaagcaggaacccgcggatgagttttcagagctctttgggcctcaccagcagggcctgccgcccccctatcccctgtctcagttgccgcctggcccaagccttggaggcctggggctgggcctggcaggcagggtggtggccgggcggcaggcgtgccgctgggtggactgctgtgcagcctatgagcagcaggaggagctggtgcggcacatcgagaagagccacatcgaccagcgcaagggcgaggacttcacctgcttctgggctggctgcgtgcgccgctacaagcccttcaacgcccgctacaagctgctcatccacatgcgagtgcactcgggcgagaagcccaacaagtgcatgtttgaaggctgcagcaaggccttctcacggctggagaacctcaagatccacctgaggagccacacgggcgagaagccgtacctgtgccagcacccgggttgccagaaggccttcagcaactccagcgaccgcgccaagcaccagcgcacccacctagacacgaagccgtacgcctgtcagatccctggctgctccaagcgctacacagaccccagctccctcc

SEQ ID NO: 99928 - DNA, 561 bp, Homo sapiens
aaaccccttctctggtatttaagaatctctgaccaatcccctactatgaatcagggatagtgctgggcactttcacatgcatttatatcatttactccacaccacatcttcatacacaaataaggcctccatagacccctgggcatgtaagaaaactgatgttcataagttcacatccatggcaaatgccttgttaggaaatgaaatgtagttttatcaacttttgtatctgcggctatttccatcaatattacagcagcacccacttcatcttattattatttgtgtggttatcttactttctctattacaatgacattttaaaacaagaattgaatcttatacagtctaacataagtttcaacactcgctatagaaatgcctggtttatagcagctactcaaagaatgtttcataagaaagttgtgttccaagtattctggtgaatgccaatgctggttcacaatgatgggggtctgagaaccaactgacctccctgacattgtgtgaagcaggaacataccgaacctttactggaagttggaagaggaagatgagagc

SEQ ID NO: 99929 - DNA, 300 bp, Homo sapiens
atttaggctaaattgtgggagctaataacataaagtacattgatttatttatcacggctagcagatatttgagaatgttagcatagctctgacactgtctacccagagacagtcccagatcccacagattgaatggttcagtccccaacactgcccccacaccattcccaagtccagacctccagaacttctgactgactggcttcaagttggggaccctatgaccacctctttgggtttgattaatttgctgtagcagctcacagaactcagagagacactgacgtttcctggttgaat

SEQ ID NO: 99930 - DNA, 285 bp, Homo sapiens
aggaaaacaccaaccaatctgaggtttaatgggtttaataagtttacctctcagttcctacttgtagcacccaatattcctttgaaaatatgaaacagacctgtcagtggccagcagtgaatttctgccccgccaacagagttgaaaagttcaggtactctgagcattgtgttgcagtggcacttgtccagaattggtacctccccatagttgggggctttaaatgtaccagtgaaaatagctttttcctcttcaagcggaagaaagaaaatcactcctcaaaac

SEQ ID NO: 99931 - DNA, 607 bp, Homo sapiens
actgctggtgaccaaatcctaaaaggagccagctcatctgagggcagagctggaactcagcatatcaatgaaaaagtgtgagaataccttctcctccaacatcaaatggtccaatctccacctagtcaaagtgactaaatttgtctcaagttgtaaagttatttgaagaatttttaaaaatcattctttttatttttattttttagtagagatagggtctccttatgttgcccaggctggtctcaaactccttgggctcaagcaatcctcctgccttggcctcccaaagtgttgggattacaggcggcagccactgtgccaacccagcctttagtagagacagggtcttgctatgttgcccagactggtctcaaactcctagcctctggcaatcctcccatcttagccttccaaagtgctgggattataggcatgagccactgcgctcagccccatttaaagacctttgaaggatatactagtacttgtaatgatgacgtggcactaatataacacataattgtattcctccaaaattacttgcaagggttgctactgaagttcagaaaagtctaataatacatggcatgccccaccaatagtgcag

SEQ ID NO: 99932 - DNA, 382 bp, Homo sapiens
agagatctttgcctattttgttcattgatctgtcccaagaactaaaacagtgcctggaacattgtggatgctcaatacatatttgttgattgattgattaatagtagctaatatttattgagcactaatgtgccaagggtactagtaagtgctttatatatattattattgttattattattattattactctccccattttatagatgagaacattgaggcacagaaaggttaagtagcttgcctaagttcatgggactagcaagttgtagagccaaagttcaaacacactctagctctggtttggttctggagcctctgtattcttaaattccaaattacctcaccttttcatggttggtggatgtacagaacaatctca

SEQ ID NO: 99933 - DNA, 460 bp, Homo sapiens
tgctggtaggccctggagcagatgcatttcatctggtttgcaggtcactgaactcatccctgaggattggaggaggaggtaatgcccctaatgcctcgcagttcttaaaaggattggctaaattgatagctcctcatgccgtttgtcactgggtgggcaggaaaggatactgagaaggctgggatggctccactgattgtctctagcctgtgggtgctctccaatgtcagccttaccttttcctccagacctcctgcctctgaaggtcagactcaaagtcagacttggccaggggttagagggagagactggcaaccgaccatctcaggctgccccacggtgttcacagaaaccccttccagaacactagtttcctaaggaagctacagagtgctgggctgagagcagcaagggatggggaggaaggggaggaaggcgaaggggagtttgtttgcgtcta

SEQ ID NO: 99934 - DNA, 96 bp, Homo sapiens
tgccaggatacaatggtaaagggagcacaggccctgccttgactgaagagatggataataaccaacatctgtgtgcctcaggaacaaatgaagatg

SEQ ID NO: 99935 - DNA, 516 bp, Homo sapiens
attatatatcataccttatactatactctagcggtgatgcgatacatggccgcagccttttgttatttggaaacaagatatgaaacaatcaacttggttgtaagggaggagaccacccctcatattgtcttatgcccaatttctgcttccaaagaaagaagaagtaaaaactaaaggcagaaatggaatccacaggcagatagcccagcactgtgccctgggcctggtagttaaaaatcaacccctgacctaactgcttgtgttatctatagattgcagacattgtatggaaaagcatcgtgaaaatcccttcctgttctgttcagttctgattactggtgcatgcagcccccagtcacatatccccacttgctcaatcaattacgaccctttcatactgaccctcttagaattgtaagcccttaaaagggacaggaactgctcactcagagagctcagtttttggagacatgagtctgccggtgctcccagctgaataaagccctttccttctac

SEQ ID NO: 99936 - DNA, 393 bp, Homo sapiens
catttcttcttggtcctgcgtctcctctatgtaacattgttcctaatgtttttgacctttgtttctattgatcaaggctgtgcttgaacattttacctagaatcattgatcctagtcttactaatcccccaacccctaagaatcttccaggtggaacatttctatgcatcagttcctgggatccctgacatgggagcactgtataactaaaatagtggatcagaaggtatcttagaggaactccatgacaaagcaagagaatgagacagttggggcatcctttacatgtctgatccctgccacagaggcatggttttcaccccattctgattgtgaagggtctggggtaggcactctgtgtcaaactgcagaacaccacggtgctaaactcag

SEQ ID NO: 99937 - DNA, 600 bp, Homo sapiens
acttggatataaaaattgtgcaggtgtgaatggctgcaatttggaactaccctatcccacaacgccacctctgtttctgagggacaccgtaacttaggacgctggcaggaggtggtatatgagaccctttgtgcatgtatgtctgtatgtgtaggtgtgtatgcgtgtgcatgtggatgagtgtttggacgtgtagataaagtgagtattcttctggttatctttgtatctttgtaaaatgaatccccctcttataaccaccatagggcttcataaatgccatgtcctacagtattcttctgtagttggattctaggacgtttgcatgactgttctaaaaagcttggtcatatttgaagaggaggacagtccactaacacgcacagctgggaatgagatccagttttgcaaagggatttgtgttttaatgacacaaatgtgagtcctcatctgcttcttaaactgtcagcaagatcaccaaggctgttactaatgtaagtgtgtatgggggtaagcggctgggtgagggactgctaggtaaatgctctcggccttgtacctgtgcaaagcccatgcttgacgggggatgcccgagaggga

SEQ ID NO: 99938 - DNA, 752 bp, Homo sapiens
cgcgctgtcgcccggccggtagctaaggaggcccagctgtgatcccgaggctttgtaggcgccgcagccctggccctctagaggccgacggaggagtgcgggggaagttagcttgcgcctgtctcgtcagccgtgcacgagaaaaaaaaggaccttcgagaagaacaagggagggcaagagttaccgagtacagggacatctatgtggccgctctgctttcccgccgtcacctgctgttgaactccggccgcatcgcggtgtccggagccgcctggcctggagtatgcgctgagcgtcacctaggcaaccacccctgcacctgtggatcaggtgggggaaagggaccgaccgcgttcttgtcctgctagagttcgactccgcctggggcttggtctctgcttcttgaaaacattgtttttttattttgtttctgttttgttttgttttgagacagggtctcgctctgttgccaagggtagaatgcagtgtcgggatcatagctcactacagacttgacatcctggactcaagagatcctcctgtgtcagcctcccgagtagctgggaccactggcgcgcgacaaataatttgaaagtgggaggaggggaacagaaccacatcaaatggcagatatcatagaatgagaactgaatatacgcgttttgtgggaaacgcgttcttttcccctttctctaagattcgcttttaattcactagccactaaccagttacctatctcattacagatata

SEQ ID NO: 99939 - DNA, 628 bp, Homo sapiens
cgcgctgtcgcccggccggtagctaaggaggcccagctgtgatcccgaggctttgtaggcgccgcagccctggccctctagaggccgacggaggagtgcgggggaagttagcttgcgcctgtctcgtcagccgtgcacgagaaaaaaaaggaccttcgagaagaacaagggagggcaagagttaccgagtacagggacatctatgtggccgctctgctttcccgccgtcacctgctgttgaactccggccgcatcgcggtgtccggagccgcctggcctggagtatgcgctgagcgtcacctaggcaaccacccctgcacctgtggatcagggtctcgctctgttgccaagggtagaatgcagtgtcgggatcatagctcactacagacttgacatcctggactcaagagatcctcctgtgtcagcctcccgagtagctgggaccactggcgcgcgacaaataatttgaaagtgggaggaggggaacagaaccacatcaaatggcagatatcatagaatgagaactgaatatacgcgttttgtgggaaacgcgttcttttcccctttctctaagattcgcttttaattcactagccactaaccagttacctatctcattacagatata

SEQ ID NO: 99940 - DNA, 246 bp, Homo sapiens
tcttgttctcctcttacctactgtcaccgttctcagcaacagcaacatctatgtggccaaaaagccaacaacctagtccgtttttgccccactttccttcaattctacctcaaccaatcctttttaatatgatcacatactagactttgtcatcatcagaaagtgtgcgaccactgaaatcttgagacttccattctccatccaccatttctgattcatccatgtcatatgctctaacacagtcat

SEQ ID NO: 99941 - DNA, 243 bp, Homo sapiens
tccctaatggaatgctctgtcctgcttgccagttttggtgcagagaagccaacaaagatttataaatagggatgctcatgacatcatgatttatgacaggtaaaaacaggaagcattttagatttcaaacaaaaggtagttgatcaaatatatcactacacatccaagtaactaaatagcacatttattaaaaacgatgagtctaaagaataattaatatcatagggaaaacatttatgtaaa

SEQ ID NO: 99942 - DNA, 313 bp, Homo sapiens
  misc_feature (26)..(26): n is a, c, g, or t
  misc_feature (160)..(160): n is a, c, g, or t
gcctgtaatcccagcactttgggagnccgaggcgggcagatcacaaggtcaggagatcgagaccctcctgactaacacggtgaaaccccgtctctactaaaaatacaaaaaattagccaggtgtggtggcgggcacttgtagtcccagctacttgagagnctgaggcaggagaatggcttgaacctgggaggcagatcttgcagtgagcagagatcacgccactgcactccagcctgggcaacagagcgagactctgtctcaaaaaaagagaccagattctattgcccaaatagtatgacatggtgcagtttt

SEQ ID NO: 99943 - DNA, 708 bp, Homo sapiens
ctctgggttcctggagggcctctccgggactcgaggaaaacgaccttttcccttgcagcggcgggagagggcgaagtggaggactgctgctcggttccgtatccaaaagagacccaaggctccaggcaaaatagattggacattttcactttctcaagccagggccaccggtcgcccaaccagcagccactgagggtggtatcggggcgccccttcccctggcagcgtatttcagcccccagagacatcccccacctcggccatccccagcgcctttgcagggacagcagcacaaccatagcagaggtcctgggcatcctggaaataacgtgctggtgatctggctcagaagtgcacgttggcccgcgcgtgcggggagctgagaagcaagagattggaactttgcacgtgtcaagcaaggtttggcctgctttgaagacagtaatttcagagccactccggtctctgcgtcacaagcgggcatcagggcagtggtggggcggcaggggatcctgagacctcccatgccctctctttggccccggtgcttctgggcttcaaaatggttaactgaaaagaacggaggtcacatgacaacatgagtatatcccccaaggaagcctacctgtctatccccaggaatctgaaccagcagacaaagcactgtcgggtccttgctgcaacctcttccccccaccccctttgatg

SEQ ID NO: 99944 - DNA, 165 bp, Homo sapiens
tcacctctacaaaaaaatttaaaaatttcctgagcatggtggcatgtgtctgtgatcccagctactccataggctgaggcgggaagatcatttgggcccaagaagtcaaggctgcagtgagccatgatggcaccactgcactccagcttgggctaccttgcctca

SEQ ID NO: 99945 - DNA, 762 bp, Homo sapiens
aacatgagagagaaaatcaatgaaataaaagtagaatacagaaaaccaactaaatcaaaagcgagttgtttgagaagagcaattaaattagtagactcctagctaaactgatcaaaaaaataaagaagatccaaatgtactaacattagcagggaaagaggggacagacatcactacagattctaacatcgataaaatgataaaaacttaattattataggattaatggcaacacatttgaccatttagatgaaatgagataattctttgaaagatataaaactccctcaagaagacacaaataacctgaatagccttctgcctatgaaaggaattgaatttgtaattaaaaacctccttcccacatctaggatcaaatggccttgctggtaaatttaccaacttcccaagaaaaaaaggatgccaattctaaacagacttttcaggaaattggagggaacacctctcaactcattttacattttacatcagcacttccctgatcccaaaaccagacaaaagccagacaagaaaacgacagatctcatgaacatacatacacatacctccacgcataaaaacaatattcaatcagtgtagaagtactccacctaaagagcttctacagaacttgaatccattagttaaaaatactaaaatgccacactatttcattagtttgcaacaaccactgattagtatcacagaggactatatttattagctaaatttcaatttaaaccttaacctaactgatggatg

SEQ ID NO: 99946 - DNA, 100 bp, Homo sapiens
cagaatctccattatgtatgaatcaagatcctggctgacattttctgccttggctgttgtgagctttcccgtcagaaatatccttcccatggggcctgaa

SEQ ID NO: 99947 - DNA, 130 bp, Homo sapiens
gctcattatttgtactgtttgttttatttttgatgggtggtatattttgcatagtagtggatacatttcttcagtagattaacttgtactatgtgccatacactgtgtcagatgtggacagcagtgaaca

SEQ ID NO: 99948 - DNA, 233 bp, Homo sapiens
attttttccctctaaaaaaaaattaatttttctcttattatttcatgtatgtagttgtctgtctccaacttgattataaattcattatatttcatttcttaaggttagaaactttccatttttttttgttcccacctacagcttacagagatagacatatagtaggctgtcaataaagtttggtttattttttgctaactcagagcacacttataatctacttattcttcacc

SEQ ID NO: 99949 - DNA, 414 bp, Homo sapiens
ctccaccatccagaaccagcccaagatccccaggggttcctgaagcacacgctgtggtttctcaagccccaacacccttggcttgtgctgtgccctcagcccggtacactcttcccctgcctaatgagcaggtacccctcacagcctcgatgggacagcctccaggacagctctgtccctgcgttcccagcctgtactgttgctgtctgttactccccagtcacccgggtcctgcttcctgacacctagtattaatacaaggcccagcacgatgaggatttttcagatggaatgtttagggcttagggctctggggacactctgcatagggagaaacagccttccacgtcaggcattctgagagctcctctacgagggcgacagagcaaactgcaatgacagatgctggggtat

SEQ ID NO: 99950 - DNA, 430 bp, Homo sapiens
taaaagggggctcagctgtgacaagtaactctaggccgggaactggaggcaggagctccggttctcttcagcttttgtggtgctagctagatgagggatatttctaaaattctaagtctatgtgaatcaaatcatgaattgtttgaagagtaagttggggaagagaacatgagaataaaatttataacatgcattgttaatccttttaattgcattgggtagaacgattattaattcagtgcacctgtgctgtgggttgagtactgaaaatagaggggtgaagaagaccatttctgccctcagggagcttccttgcttgcattgttcgttcatggagcattcatagatgtgcccttgccctggcactgtgtcaggagtcagaaatgaggcgttctacaggcctcctgtttactcttctaggcctggtggc

SEQ ID NO: 99951 - DNA, 591 bp, Homo sapiens
tagtgagtcttgagctggcttgaggtgtgttggacctggtggttgctaaaagcaattaagcgggcatctgggtcagctagtagctgttaaaaagattaaagggaggtgaagacgtgtagcactgaaggctgcactggctcactgatacctttattttctcagaattgaaaagtttttcatagttgtaaagatagtcaataccataggtttcacttttactgcaggaactttccaacgagaggtttctctcgttctttctttaattttatctttctctcactaggcaatgctgcacttaacagtatattgtaaagcttgaagtactgtattacgttgcctggctgttactccagtgctaggaaagtggttggaaggatgaggaagacaatgaacaaaaggaggcatttggaaggatttgttttacttcaaaaacaagaatactaagcttccatcctgctgcttaatctgtttcaaacccattacatgtagtataaagtgtttgggtacttcgttaaatccaacagaatagagatggtcttaaaaggaatttccctgccctaaagctctaagggtggctaaagatagggtgtt

SEQ ID NO: 99952 - DNA, 694 bp, Homo sapiens
cttgcacgttaatgtcagagaaaatggtcataaattttaaagggtgatttcctttccacccactccctctaccttcacttcaataaatcaccctcctaaaacggcagggtggcaaagcccaagggcaaaggtcaagggggcccctcctgacctgatccctcattaacatttagcagctcccaagtggaatgttctcaagggtttccagaaatgctggggtggttaggagggggcagacaccttgctcagagaggcagcaatcaggaagcagaatattcgctcattcaccactcactcactcacatctccccatagaaagggggatttacacagggcattcattctctgggttgtggaggatgcccctgaaccctgatcaatactcacaggcacactggtacaaacacagccaggaggaaacagtcgactcacatgagcatgtgagtgtgtgtcaggggtttttttgagtgacagagggtgccagatgagtggtgctcttggatcaccctgtcacaaatttcctgaaccacaaaaagggccatcagtttaagcactgatttgaaattcactatgccaactgattcatttctgtaagcacagaaaggccccttggcactgtgatatgcacctgggtctggagtcagtggccctggggtctggctacaacctctttaagccaatgtccctgagtctg

SEQ ID NO: 99953 - DNA, 110 bp, Homo sapiens
gaaacaccactgcctgaaagcactcgtgcccacaaccaaccaaacaggatctggggaagcctctaaatccgtgcaccgattggcagaagttcagaggaaaacgttaacag

SEQ ID NO: 99954 - DNA, 532 bp, Homo sapiens
cccattttttttcttagaggaaatgtttgatagtttctcctaaaaaattaataattggcacaaaagactagttttgtgtcaaaagtagttttgagttttatctaaagactgacattggcttgaagttgggctttccagattcaaaaatctgccccagatgagatttagatgcagagggttagtgtccttttccccagggggatggccgtgatgatttgttcaagattgtgttatagtagctgccccttttaagccagctgtgtgtgtgtggtggggggtgggcagtgtgtattccacatcaacatcctagaaagaacgaataaacatttagtgatctcactgtttctacttacatttggtataatgtactgtttttattggtgctattacctatgttaatagggcactttacaaaattttcaagaacgtttttattaaaattatttcaaagacttctttcttaaaatatgattttaccatgtaaaaaattatactaaggtagaagaatattcgttttctcattttctgaaaa

SEQ ID NO: 99955 - DNA, 673 bp, Homo sapiens
caaggaattaacatctaatattttccttgactcataagagccttcattcttctggagggatagcaacaacttaacagatcacggaaatgccatctaataaatactgtaataaggttatacaaacagtgtttgggagctcattaagggaacacgtgaatttgacataagcctggggaaaatatctcagaaaacaaagtatctgagattcaggtagtgaataaaacttgtaagacaaataaaggggaacagaaaagggcattcttggtagaatataactttatattctcagtaggaacagtaggaagcaccatccagaggtagaagactttcaatagatttattcactcaacatatatttatggcatgtctcctatgtttcagacaccatctgaggcattggttatagcatgaacatgatatacatgtctctgcctttatgtctagtctgttgttggagaaagaagcaataaactgtaaccagtgaatgaatgagttgaaagatgctttaggtcatttcctctgtatgagataaaggtgaaagaggttccaaatcctaatgtatatgttgaaatataaagaattctagaatgtaagctccatgtatacagaggtgtctgtaatttcattaatatacctttagcgcctaggacagtacttggcacgggagtactca

SEQ ID NO: 99956 - DNA, 170 bp, Homo sapiens
gctccacatcctcatcaacacttggttgccagccttttccattttaactattcttttcatattcctaaggaaaatactcataaaatgatttgtctgaactcttgagcaacaaaaaaaaatcaaactttcaacgaagactgaagtgaaactcattatacagaaattttaat

SEQ ID NO: 99957 - DNA, 252 bp, Homo sapiens
tgagacggagtcttgctctgtggcccaggctggagtgcagtggcatgatctcggctcactgcaagctccgcctcccaggttcacaccattctcctgcctcagcctcccaagtagctgggaacgaagggttcttcaatgggatgaccctagctagtaattcagattcttacatatgacagcaaaaataatctagaaatgtcttgtcaagtttgcttagaacaagaggaagaagacaaatccagtccaaaaatg

SEQ ID NO: 99958 - DNA, 175 bp, Homo sapiens
tgtgtacagaggtgagtaagatgtagctcccattctcaagtcgcttacattctaatgtaaaaggtagacaaagcattacagaagaagtaactctgctatagaaggttgcaatgaagagaacattggaaacactaattttaccttataaagaaggtttcataaaggaaggcaagtt

SEQ ID NO: 99959 - DNA, 833 bp, Homo sapiens
tcacacgtgccagccccttgctccctgcacatggcctccttgctgactcaggttcctactcccctgctcccccgactagcggggctctgactcagctcgcagccccacctgaccactgttcttcattcagattgtccaaggagaaccagatgatccctggccagcctagtgatgaggccctgtgagccaggggttaccttgtatagtcagcatttcagggaagaccaaaaggacaatgggaggcaaattcattgccacatgcccacacatacattatctcatttatttatgtaaaagcccgttttacagataaggaaatggaaagttaaagagtctaaagggtttattcagctataaaaaggaatgaagtgcagggactgacacgtggtgcagcatggaataacctggaaaacatgctaagtgaagggagctgatacaaaagaccacatatgctacagttccatttgaataaaatgtctagaataggcaaatccatagagacagaaagcagattggcgattgccaggggctgcatagaaagggggatggagagtgactgctaaataggcacgggctttcttttggggtgataaaaaatgccctaaaggccgggcgcagtggctcacgcctgtaatcccagaactgtgggaggccaaggcgggcggatcatgaggtcaggagttcaagattggcctggacaacatggtgaaaccccatctttactgaaaattcaaaaattagccaggcgtgatgtcacatgcctataatcccaacctcaggaggttgaggcaggagaatcacttgaactcgggaagtggagattgcagtgagcc

SEQ ID NO: 99960 - DNA, 554 bp, Homo sapiens
attcattttcatccacccctgagacattcttacactgaaattggagaccactggattactatgaacactggtctaaatctaaggtgatctttgggcttataattcaggaagtatggggcttgtccttaaatttggagccatgaacctttagcttcccagtgcatttctgtatcaccagcaatatactctcaggcctgagcaaggagactgcttccctggaccctcctcaatctttttcagctcagcttttttcaacatgctcctcctcatgggataagaagtcctcagggcccaggagcatgccacagtgtgccctccaccttctaagttccactgtgggtatccagaactctatcaaaagtaagccatcctacaaaagtcaaccaatatgtgcaattctagtccagagggatggctgttcgtggtgagctgtgaacaaataggcagtctggacatgcaggctgtggtatttcccatccacacacatgtgcaatgaggatactcagcacacaagagagggccagggctgcacagagaagggggatggtcaagaa

SEQ ID NO: 99961 - DNA, 322 bp, Homo sapiens
gattctcccaataaggcattgctattaagcttaatttaagtacagaaacttccctaggtttccccacctgcttgctagtggcagtgaaacctgcctcatactctaaccctataggacagtatgaggtatagaaaagcttcaaaagattgggggtaataaacaaaaatagtagaaaagggtttgggaaaatgaggagtgttacaatatggagtttgtaacttctttaccttctctgtgctttttttatttcccacccattcacctcactttggcattgggtagggaaagaagaaagcctgtcctatgataggtgctatgccat

SEQ ID NO: 99962 - DNA, 485 bp, Homo sapiens
ttgccacccaaccagtggggagtgggaagattactaaacttggagtcagctgacctgatttagaactcactccactactaattagctttgtgaccttacagagattgcatagcctctagcctcagttttcctctctataaaatgggtatagctcctgactgatctaccttactgggatgtaatgacaatgagaaaatgtgaagagcagaatgctttaaacatgtgggctttgataagtggaattatgaccacgtgaagtcattcccagaagcaagagtctctcccaaattctttagattttttttttagcatctttttcttccgtcttactaggactctaatgaggatgcctatgagtataatacatggaacagttcccagcttagaatatatctctgatttttacttaaattcgtcattgcccatattcaggtttctattcagtccaaattatatgctaatgaggatggcatatttatacattc

SEQ ID NO: 99963 - DNA, 278 bp, Homo sapiens
gacaaaacacaataatgtaattaacttgtttcgaattttgtaaaatgattttattgcaaagttagctaaaaataaaactctagtgtttaaacaaaacaaaaccaaaaaaccccactactgataaacaacctcagcaaagtctcaggatataaattcattgtacaaaaatcactagcattcctatacaccaacaacagtcaagtcaagagtcaaatcgggaaaacaatgtcattcacaaatgccacaaaaagaattaagtacttaggtaactagggagg

SEQ ID NO: 99964 - DNA, 351 bp, Homo sapiens
taaatttattcaattttattgtgttttttaaaaagcagcttatgccacaagcacaaatgagctttctcagttttcaactcaaaatattatatgaaaagatggatatgtgtgtctgtgtgggaggggtgtgaattggatgacggttcttagggtattacagaattcagccagtggtggaagtctaaggttcttattgaatggttcaacttctttatcaaagaagttccatgaagatctttgataacctgtttaaatgtacagaatttttcaaaagccactgtgaaaagcagtaccataagttattttttaactaaaatctgtagaaagtgtttccaaaagagttcctttttt

SEQ ID NO: 99965 - DNA, 482 bp, Homo sapiens
tggtggctcttttagctgggcctcaagagagatttgaggaaccgaacctttaacagcagcatcctttgcggcattatcagccaagactgtttcctctagcttccgcagaggttaaccttgaatgtccgggagtttccataatagccaaggcagctggcagctggatggcatccagtaagtcccgtacataggatccatttttaatttgacctccagtggacgtgagtaaaccccttcatttccatagcagtccaaaatcaggagcaaccccaaaggcatatctactatctgtatagagtaacagattgccctttcacgaggaggccagcaagggcagtgagtttagcttttcgtgcaaaagtagccacaggggccaggcgcagcagctcacacctgtaatcccagcactttgggaggccgaggtaggcagattacttgaggtcaggagttcaggaagactggccaacatgacgaaaccctgt

SEQ ID NO: 99966 - DNA, 739 bp, Homo sapiens
atcgtgaggggagcgcgtcgtgtggagggcgtcgtgacggggacgtcgtgaggggcgcgctgtgaggcgagtctctgccccctccccctggagctcccgctcctcagctgccccccgcagtcaggggctcttcctgtcagtgcctcatgggccctgcattcgcctcccccaggcagcgcggtcctcctgggggagtcagcctgtctcgcctgagcccgaaggccgcctccccttctgccacagccccctttggctcccggctctggagatctgccctccagtggatctgtctgaaaccgccctcccttagccgggcgggaggcagcaagcgcgcgcgctgcgggcaggagcggtttctgcaggagggaccctgcccgagctaaacaccgagaagacggcaggaggcagaaggcgagatgggggaaaggaagataatctggaaagttccactgcaggaaagacagtcccggtggccagctggcctctcagaggccccttagtaagccgaggacccgaacccttacggaaatgtaattgagacaagcccgaagcagagcggaacgaaacagaacagaggagacgcgggcacaggagagcgcagagggagctctgggcgcttaaggaatggagactgcagcgggccagcgggggctaagtcccggggtcgcagatgcctgtgtgcgggggcaggtgcttgcgtgcggggcctgccccagcccctgcctggcagaaagcccca

SEQ ID NO: 99967 - DNA, 481 bp, Homo sapiens
aattcggcaagaggactccaatgattttactttctttgcttggcttaatatccgtggatcttgctatcttctcttgagaagaacttggcctttcattctaatgactcacaaaagaaaaggcaatgacacctggggcacatatgtttttctggtcaattcaaaaattctctttgaccttttctttcaagtagatttttttaaatgcatgactggagaattatcttcaatgattcatgatgagaggcaggtaggaattggttaagaagtatgagcacggaaaaaattattgtttaatcacatgaaaggcaacatctgttccagttcataaagcacacagtctcgaatggaagaaaaaaaggtccttcgtaagaatactgatgcataagataaagacgaaataatgaaaaagaaaaatgtatattattattcccttgtccattctcaagtttaagctgcggttgtcagttgaatgtgaaatgat

SEQ ID NO: 99968 - DNA, 311 bp, Homo sapiens
ggaagagatggtttatcccagaccagaagaatgagtcgatttggtaaagacagtagaagaagaattcccaagaaagtgactagcatgtgaaaatcatgagaggatggtgtgaaagaagccaatgtggccagagcacagagagaggctactggagagataggcaggaggcaaacatgcatggttgtgggccacattcaaggtgttggccattatcccaataactatagatatctgctgaggattttaaacataaaatggcatgacttggttgaaatttgaatcagatcccttgagccatgatgagaaacaga

SEQ ID NO: 99969 - DNA, 352 bp, Homo sapiens
attcattatttcaccaattgtatcacattatttcagtgactatattttgtctgcctatttttacatcctacaccaggaccaaattttcctgttgttccaggaatttctgtctgtgtgtaaacacaaatcagtttttaaaatttaggtttgtattgtacatactgtctgacaacttactgttgttttctgtttttacatggcagctttatgaaatttattacaagtggagatagtttcaatatagttttaatatacgtctgtgtgtgtacgtgtgtgtgtatgtatatgtgtgtgtgtgattttatatcccttttatactgaagtgtactcataccattgcctcaccttctta

SEQ ID NO: 99970 - DNA, 1820 bp, Homo sapiens
gaattctttcttcagcccatgtaaacatgaaaataagggttaaaaatgacttcattatggggaaaagggacaggatgcaaattgttcaaattcgtttgtgggtcgggtggccgctgctccggcctccggggccttgcggagactcaccccttcagcgtcgctgcccccagctcagctcttactgcgggccgctccgacggcggtccatcctgtcagggactatgcggcgcaaacatctccttcgccaaaagcaggcgccgccaccgggcgcatcgtggcggtcattggcgcagtggtggacgtccagtttgatgagggactaccaccaattctaaatgccctggaagtgcaaggcagggagaccagactggttttggaggtggcccagcatttgggtgagagcacagtaaggactattgctatggatggtacagaaggcttggttagaggccagaaagtactggattctggtgcaccaatcaaaattcctgttggtcctgagactttgggcagaatcatgaatgtcattggagaacctattgatgaaagaggtcccatcaaaaccaaacaatttgctcccattcatgctgaggctccagagttcatggaaatgagtgttgagcaggaaattctggtgactggtatcaaggttgtcgatctgctagctccctatgccaagggtggcaaaattgggctttttggtggtgctggagttggcaagactgtactgatcatggagttaatcaacaatgtcgccaaagcccatggtggttactctgtgtttgctggtgttggtgagaggacccgtgaaggcaatgatttataccatgaaatgattgaatctggtgttatcaacttaaaagatgccacctctaaggtagcgctggtatatggtcaaatgaatgaaccacctggtgctcgtgcccgggtagctctgactgggctgactgtggctgaatacttcagagaccaagaaggtcaagatgtactgctatttattgataacatctttcgcttcacccaggctggttcagaggtgtctgcattattgggccgaatcccttctgctgtgggctatcagcctaccctggccactgacatgggtactatgcaggaaagaattaccactaccaagaagggatctatcacctctgtacaggctatctatgtgcctgctgatgacttgactgaccctgcccctgctactacgtttgcccatttggatgctaccactgtactgtcgcgtgccattgctgagctgggcatctatccagctgtggatcctctagactccacctctcgtatcatggatcccaacattgttggcagtgagcattacgatgttgcccgtggggtgcaaaagatcctgcaggactacaaatccctccaggatatcattgccatcctgggtatggatgaactttctgaggaagacaagttgaccgtgtcccgtgcacggaaaatacagcgtttcttgtctcagccattccaggttgctgaggtcttcacaggtcatatggggaagctggtacccctgaaggagaccatcaaaggattccagcagattttggcaggtgaatatgaccatctcccagaacaggccttctatatggtgggacccattgaagaagctgtggcaaaagctgataagctggctgaagagcattcatcgtgaggggtctttgtcctctgtactgtctctctccttgcccctaacccaaaaagcttcatttttctgtgtaggctgcacaagagccttgattgaagatatattctttctgaacagtatttaaggtttccaataaaatgtacacccctca

SEQ ID NO: 99971 - DNA, 769 bp, Homo sapiens
agagaatgatgagcagccagttcacccaatggacctgcctactgcagcgtaggcctcgcctcaacggcaggagagcaggcggctgcggttgctgcagccttcagtctccacccggactacgccatgttggggtttgtgggtcgggtggccgctgctccggcctccggggccttgcggagactcaccccttcagcgtcgctgcccccagctcagctcttactgcgggccgctccgacggcggtccatcctgtcagggactatgcggcgcaaacatctccttcgccaaaagcaggcgccgccaccgggcgcatcgtggcggtcattggcgcagtggtggacgtccagtttgatgagggactaccaccaattctaaatgccctggaagtgcaaggcagggagaccagactggttttggaggtggcccagcatttgggtgagagcacagtaaggactattgctatggatggtacagaaggcttggttagaggccagaaagtactggattctggtgcaccaatcaaaattcctgttggtcctgagactttgggcagaatcatgaatgtcattgccattgaagaagctgtggcaaaagctgataagctggctgaagagcattcatcgtgaggggtctttgtcctctgtactgtctctctccttgcccctaacccaaaaagcttcatttttctgtgtaggctgcacaagagccttgattgaagatatattctttctgaacagtatttaaggtttccaataaaatgtacacccctca

SEQ ID NO: 99972 - DNA, 538 bp, Homo sapiens
gagggatttgtagtcctgcagaaagttcatccatacccaggatggcaatgatatcctggagggatttgtagtcctgcaggatcttttgcaccccacgggcaacatcgtaatatcattgccatcctgggtatggatgaactttctgaggaagacaagttgaccgtgtcccgtgcacggaaaatacagcgtttcttgtctcagccattccaggttgctgaggtcttcacaggtcatatggggaagctggtacccctgaaggagaccatcaaaggattccagcagattttggcaggtgaatatgaccatctcccagaacaggccttctatatggtgggacccattgaagaagctgtggcaaaagctgataagctggctgaagagcattcatcgtgaggggtctttgtcctctgtactgtctctctccttgcccctaacccaaaaagcttcatttttctgtgtaggctgcacaagagccttgattgaagatatattctttctgaacagtatttaaggtttccaataaaatgtacacccctca

SEQ ID NO: 99973 - DNA, 487 bp, Homo sapiens
agcggtccggaattacgggatatcgaaaagatcctgcaggactacaaatccctccaggatatcattgccatcctgggtatggatgaactttctgaggaagacaagttgaccgtgtcccgtgcacggaaaatacagcgtttcttgtctcagccattccaggttgctgaggtcttcacaggtcatatggggaagctggtacccctgaaggagaccatcaaaggattccagcagattttggcaggtgaatatgaccatctcccagaacaggccttctatatggtgggacccattgaagaagctgtggcaaaagctgataagctggctgaagagcattcatcgtgaggggtctttgtcctctgtactgtctctctccttgcccctaacccaaaaagcttcatttttctgtgtaggctgcacaagagccttgattgaagatatattctttctgaacagtatttaaggtttccaataaaatgtacacccctca

SEQ ID NO: 99974 - DNA, 3201 bp, Homo sapiens
agagaatgatgagcagccagttcacccaatggacctgcctactgcagcgtaggcctcgcctcaacggcaggagagcaggcggctgcggttgctgcagccttcagtctccacccggactacgccatgttggggtttgtgggtcgggtggccgctgctccggcctccggggccttgcggagactcaccccttcagcgtcgctgcccccagctcagctcttactgcgggccgctccgacggcggtccatcctgtcagggactatgcggcgcaaacatctccttcgccaaaagcaggcgccgccaccgggcgcatcgtggcggtcattggcgcagtggtggacgtccagtttgatgagggactaccaccaattctaaatgccctggaagtgcaaggcagggagaccagactggttttggaggtggcccagcatttgggtgagagcacagtaaggactattgctatggatggtacagaaggcttggttagaggccagaaagtactggattctggtgcaccaatcaaaattcctgttggtcctgagactttgggcagaatcatgaatgtcattggagaacctattgatgaaagaggtcccatcaaaaccaaacaatttgctcccattcatgctgaggctccagagttcatggaaatgagtgttgagcaggaaattctggtgactggtatcaaggttgtcgatctgctagctccctatgccaagggtggcaaaattgggctttttggtggtgctggagttggcaagactgtactgatcatggagttaatcaacaatgtcgccaaagcccatggtggttactctgtgtttgctggtgttggtgagaggacccgtgaaggcaatgatttataccatgaaatgattgaatctggtgttatcaacttaaaagatgccacctctaaggtagcgctggtatatggtcaaatgaatgaaccacctggtgctcgtgcccgggtagctctgactgggctgactgtggctgaatacttcagagaccaagaaggtcaagatgtactgctatttattgataacatctttcgcttcacccaggctggttcagaggtgtctgcattattgggccgaatcccttctgctgtgggctatcagcctaccctggccactgacatgggtactatgcaggaaagaattaccactaccaagaagggatctatcacctctgtacaggctatctatgtgcctgctgatgacttgactgaccctgcccctgctactacgtttgcccatttggatgctaccactgtactgtcgcgtgccattgctgagctgggcatctatccagctgtggatcctctagactccacctctcgtatcatggatcccaacattgttggcagtgagcattacgatgttgcccgtggggtgcaaaagatcctgcaggactacaaatccctccaggatatcattgccatcctgggtatggatgaactttctgaggaagacaagttgaccgtgtcccgtgcacggaaaatacagcgtttcttgtctcagccattccaggttgctgaggtcttcacaggtcatatggggaagctggtacccctgaaggagaccatcaaaggattccagcagattttggcaggtgaatatgaccatctcccagaacaggccttctatatggtgggacccattgaagaagctgtggcaaaagctgataagctggctgaagagcattcatcgtgaggggtctttgtcctctgtactgtctctctccttgcccctaacccaaaaagcttcatttttctgtgtaggctgcacaagagccttgattgaagatatattctttctgaacagtatttaaggtttccaataaaatgtacacccctcaaaaaaaaacaaaaaaagaaaacaaaaaaaaaaaaaaaaaaactcgagactagttctctctcttgagaacctagatccccgaggaattcagctatcagctctcttcatgagtggagtagacatggccttgtttgcaaatgatgcatgcggacagccaatcccctgggaacactgttgtccttggatgtattttgatgggaagctcttccaatccaaactcctcaaagccagccgggaaaagaccccactcattgacctctgtgatggtcaggctgatcaggctgccaaggtagagaagatgcgccagagcgtcctcgaggggctcagcttctccaggcagagccacacgctccctttcccgccgccacctgccctgcccttctaccctgcctctgcgtacccccggcactttgggcctgtcccaccctctcagggcaggggcagaggctttgcaggcgtctgtggctttggaggcccctatggggaaacggtagcaacaggcccttaccgtgccttccgtgtggcggcagcatcgggacactgcggagccttctcaggcagtgacagcagcaggactagcaagtcccagggagtccaacctataccttctcagggaggcaaactagaaatagctggcactgtggttggccattgggctgggagcaggcggggccgtgggggccgggggcctttccccctgcaggtggtttctgtcggaggaccagctagagggcgtccaagaggagttatttccaccccagtgattagaacatttggaagaggtggaaggtactatggcagaggttacaaaaaccaggcagcaattcagggcagacctccttatgctgcttcagcagaagaagtggccaaagaacttaagtcaaaatctggggaatcgaagtcctctgctatgtcttcagacgggtccctggctgaaaacggagtgatggccgaggagaagccggctccccagatgaacgggagcacgggtgacgccagggcccccagccactctgaaagtgccttgaataatgactctaaaacgtgcaatacaaatcctcatttaaatgcactaagtacagacagcgcttgccgcagagaagctgctctggaggcagctgtcttaaataaagaagagtaaacttattttttatagagggtgaaggatgctggaagggtaaggatttaggaatatctggagagaaagagagcctgcagttatgtacattttgtcctttccgtaagagaaaaatgaggactttggaaattcagatccctctttgatatcagagatttaaacaacacatttttagttttaaccagttgtagtcaaaatgctacaat

SEQ ID NO: 99975 - DNA, 689 bp, Homo sapiens
cccacgcgtcgcccacgcgtcggtacaggctatctatgtgcctgctgatgacttgactgaccctgcccctgctactacgtttgcccatttggatgctaccactgtactgtcgcgtgccattgctgagctgggcatctatccagctgtggatcctctagactccacctctcgtatcatggatcccaacattgttggcagtgagcattacgatgttgcccgtggggtgcaaaagatcctgcaggactacaaatccctccaggatatcattgccatcctgggtatggatgaactttctgaggaagacaagttgaccgtgtcccgtgcacggaaaatacagcgtttcttgtctcagccattccaggttgctgaggtcttcacaggtcatatggggaagctggtacccctgaaggagaccatcaaaggattccagcagattttggcaggtgaatatgaccatctcccagaacaggccttctatatggtgggacccattgaagaagctgtggcaaaagctgataagctggctgaagagcattcatcgtgaggggtctttgtcctctgtactgtctctctccttgcccctaacccaaaaagcttcatttttctgtgtaggctgcacaagagccttgattgaagatatattctttctgaacagtatttaaggtttccaataaaatgtacacccctca

SEQ ID NO: 99976 - DNA, 399 bp, Homo sapiens
gaggggggtgcagatgactctgctgactgtctctgaagtattcagccacagtcagcccagtcagagctacccgggcacgagcaccaggtggttcattcatttgaccatataccagcgctaccttagaggtggcatcttttaagttgataacaccagattcaatcatttcatggtataaatcattgccttcacgggtcctctcaccaacaccagcaaacacagagtaaccaccatgggctttggcgacattgttgattaactccatgatcagtacagtcttgccaactccagcaccaccaaaaagcttcatttttctgtgtaggctgcacaagagccttgattgaagatatattctttctgaacagtatttaaggtttccaataaaatgtacacccctca

SEQ ID NO: 99977 - DNA, 964 bp, Homo sapiens
  misc_feature (860)..(860): n is a, c, g, or t
  misc_feature (870)..(870): n is a, c, g, or t
  misc_feature (899)..(899): n is a, c, g, or t
  misc_feature (907)..(907): n is a, c, g, or t
  misc_feature (921)..(921): n is a, c, g, or t
  misc_feature (931)..(931): n is a, c, g, or t
  misc_feature (937)..(938): n is a, c, g, or t
  misc_feature (944)..(944): n is a, c, g, or t
ctaggaaggccggtgttaatcggccgaggcagtttgtgggtcgggtggccgctgctccggcctccggggccttgcggagactcaccccttcagcgtcgctgcccccagctcagctcttactgcgggccgctccgacggcggtccatcctgtcagggactatgcggcgcaaacatctccttcgccaaaagcaggcgccgccaccgggcgcatcgtggcggtcattggcgcagtggtggacgtccagtttgatgagggactaccaccaattctaaatgccctggaagtgcaaggcagggagaccagactggttttggaggtggcccagcatttgggtgagagcacagtaaggactattgctatggatggtacagaaggcttggttagaggccagaaagtactggattctggtgcaccaatcaaaattcctgttggtcctgagactttgggcagaatcatgaatgtcattggagaacctattgatgaaagaggtcccatcaaaaccaaacaatttgctcccattcatgctgaggctccagagttcatggaaatgagtgttgagcaggaaattctggtgactggtatcaaggttgtcgatctgctagctccctatgccaagggtggcaaaattgggctttttggtggtgctggagttggcaagactgtactgatcatggagttaatcaacaatgtcgccaaagcccatggtggttactctgtgtttgctggtgttggtgagaggacccgtgaaggcaatgatttataccatgaaatgattgaatctggtgttatcaacttaaaagatgccacctctaaggcgcggtatttggtccaatgatgaccacctggggctcgtgccggntactctgacngggcggacgggggtgaaattcaagaacanaggcaagngcggcttttggacntcttcgtccnggcggnnaggggntttggcccccttggggatac

SEQ ID NO: 99978 - DNA, 908 bp, Homo sapiens
  misc_feature (13)..(13): n is a, c, g, or t
acgctacggctangtacgaggctggtgtgtaatcggacgagggtttgtgggtcgggtggccgctgctccggcctccggggccttgcggagactcaccccttcagcgtcgctgcccccagctcagctcttactgcgggccgctccgacggcggtccatcctgtcagggactatgcggcgcaaacatctccttcgccaaaagcaggcgccgccaccgggcgcatcgtggcggtcattggcgcagtggtggacgtccagtttgatgagggactaccaccaattctaaatgccctggaagtgcaaggcagggagaccagactggttttggaggtggcccagcatttgggtgagagcacagtaaggactattgctatggatggtacagaaggcttggttagaggccagaaagtactggattctggtgcaccaatcaaaattcctgttggtcctgagactttgggcagaatcatgaatgtcattggagaacctattgatgaaagaggtcccatcaaaaccaaacaatttgctcccattcatgctgaggctccagagttcatggaaatgagtgttgagcaggaaattctggtgactggtatcaaggttgtcgatctgctagctccctatgccaagggtggcaaaattgggctttttggtggtgctggagttggcaagactgtactgatcatggagttaatcaacaatgtcgccaaagcccatggtggttactctgtgtttgctggtgttggtgagaggacccgtgaaggcaatgatttataccatgaaatgattgaatctggtgttatcaacttaaaagatgccacctctaagctcctaggatcgcggctttggtcaatgatgacccccggcgccctcccggtactccatggccagcggggggcaacccaacaaa

SEQ ID NO: 99979 - DNA, 967 bp, Homo sapiens
  misc_feature (851)..(851): n is a, c, g, or t
ggcatgggactatgacagtggtacaaaaagcggctggtacggtcggaattcccgggatatccgtttgtgggtcgggtggccgctgctccggcctccggggccttgcggagactcaccccttcagcgtcgctgcccccagctcagctcttactgcgggccgctccgacggcggtccatcctgtcagggactatgcggcgcaaacatctccttcgccaaaagcaggcgccgccaccgggcgcatcgtggcggtcattggcgcagtggtggacgtccagtttgatgagggactaccaccaattctaaatgccctggaagtgcaaggcagggagaccagactggttttggaggtggcccagcatttgggtgagagcacagtaaggactattgctatggatggtacagaaggcttggttagaggccagaaagtactggattctggtgcaccaatcaaaattcctgttggtcctgagactttgggcagaatcatgaatgtcattggagaacctattgatgaaagaggtcccatcaaaaccaaacaatttgctcccattcatgctgaggctccagagttcatggaaatgagtgttgagcaggaaattctggtgactggtatcaaggttgtcgatctgctagctccctatgccaagggtggcaaaattgggctttttggtggtgctggagttggcaagactgtactgatcatggagttaatcaacaatgtcgccaaagcccatggtggttactctgtgtttgctggtgttggtgagaggacccgtgaaggcaatgatttataccatgaaatgattgaatctggtgttatcaacttaaaagatgccacctctaagaggcnggttatggtcaatgatgaacacctgggtctggccggtactgatggggaagggggaaatcgaaacagaaggaagtggtttggaattgtaccaggggaggtgggttggactcgggggc

SEQ ID NO: 99980 - DNA, 908 bp, Homo sapiens
  misc_feature (908)..(908): n is a, c, g, or t
aaattagggctaggtacgaggctgggtgtgggtttgtgggtcgggtggccgctgctccggcctccggggccttgcggagactcaccccttcagcgtcgctgcccccagctcagctcttactgcgggccgctccgacggcggtccatcctgtcagggactatgcggcgcaaacatctccttcgccaaaagcaggcgccgccaccgggcgcatcgtggcggtcattggcgcagtggtggacgtccagtttgatgagggactaccaccaattctaaatgccctggaagtgcaaggcagggagaccagactggttttggaggtggcccagcatttgggtgagagcacagtaaggactattgctatggatggtacagaaggcttggttagaggccagaaagtactggattctggtgcaccaatcaaaattcctgttggtcctgagactttgggcagaatcatgaatgtcattggagaacctattgatgaaagaggtcccatcaaaaccaaacaatttgctcccattcatgctgaggctccagagttcatggaaatgagtgttgagcaggaaattctggtgactggtatcaaggttgtcgatctgctagctccctatgccaagggtggcaaaattgggctttttggtggtgctggagttggcaagactgtactgatcatggagttaatcaacaatgtcgccaaagcccatggtggttactctgtgtttgctggtgttggtgagaggaccccgtaggcctggtttttcctgtactggttgatctggggtttccctttaagatgccccctaggaggcggggtatggcaagtttagccctgtgtgtgcccgttctcacgggtcgggggtttacaccagcccgctgttgtgtacactctcccgcagccttgacccagn

SEQ ID NO: 99981 - DNA, 2360 bp, Homo sapiens
gaattctttcttcagcccatgtaaacatgaaaataagggttaaaaatgacttcattatggggaaaagggacaggatgcaaattgttcaaattcgtttgtgggtcgggtggccgctgctccggcctccggggccttgcggagactcaccccttcagcgtcgctgcccccagctcagctcttactgcgggccgctccgacggcggtccatcctgtcagggactatgcggcgcaaacatctccttcgccaaaagcaggcgccgccaccgggcgcatcgtggcggtcattggcgcagtggtggacgtccagtttgatgagggactaccaccaattctaaatgccctggaagtgcaaggcagggagaccagactggttttggaggtggcccagcatttgggtgagagcacagtaaggactattgctatggatggtacagaaggcttggttagaggccagaaagtactggattctggtgcaccaatcaaaattcctgttggtcctgagactttgggcagaatcatgaatgtcattggagaacctattgatgaaagaggtcccatcaaaaccaaacaatttgctcccattcatgctgaggctccagagttcatggaaatgagtgttgagcaggaaattctggtgactggtatcaaggttgtcgatctgctagctccctatgccaagggtggcaaaattgggctttttggtggtgctggagttggcaagactgtactgatcatggagttaatcaacaatgtcgccaaagcccatggtggttactctgtgtttgctggtgttggtgagaggacccgtgaaggcaatgatttataccatgaaatgattgaatctggtgttatcaacttaaaagatgccacctctaaggtagcgctggtatatggtcaaatgaatgaaccacctggtgctcgtgcccgggtagctctgactgggctgactgtggctgaatacttcagagaccaagaaggtcaagatgtactgctatttattgataacatctttcgcttcacccaggctggttcagaggtgtctgcattattgggccgaatcccttctgctgtgggctatcagcctaccctggccactgacatgggtactatgcaggaaagaattaccactaccaagaagggatctatcacctctgtacaggctatctatgtgcctgctgatgacttgactgaccctgcccctgctactacgtttgcccatttggatgctaccactgtactgtcgcgtgccattgctgagctgggcatctatccagctgtggatcctctagactccacctctcgtatcatggatcccaacattgttggcagtgagcattacgatgttgcccgtggggtgcaaaagatcctgcaggactacaaatccctccaggatatcattgccatcctgggtatggatgaactttctgaggaagacaagttgaccgtgtcccgtgcacggaaaatacagcgtttcttgtctcagccattccaggttgctgaggtcttcacaggtcatatggggaagctggtacccctgaaggagaccatcaaaggattccagcagattttggcaggtgaatatgaccatctcccagaacaggccttctatatggtgggacccattgaagaagctgtggcaaaagctgataagctggctgaagagcattcatcgtgaggggtctttgtcctctgtactgtctctctccttgcccctaacccaaaaagcttcatttttctgtgtaggctgcacaagagccttgattgaagatatattctttctgaacagtatttaaggtttccaataaaatgtacacccctcaaaaaaaaacaaaaaaagaaaacaaaaaaaaaaaaaaaaaaagaaaaaagaagaggggggggggggggaagagaggaggttcccgggggggggccaagtgatagcgcgcgcgagaaccacgggattactgtgtggaacacaggggggcccaaaggagggggcgagcagaaataatacaacaaggcggaggggcgcgaggatcaaaaaaggagagagaagaacgggaacacacaccggcaacaaacggggagaaacataggggcaaaagagaccccctaaccgccggggggggagacacaaagtggggcacacaaataccccacgcagaatatttacagaggccccaaggagagggaatatttaataaaatgtatagaaagagagagtgatcagatgggggtgtgtgtaacaaacagataggtgacaaattataagtggtgaggtgtgtagagaaaaagtttctggagcaaacagaggagagattgatgagttgatggcgagaaatttattacagcgaggagctatatgatgatagatgtaa

SEQ ID NO: 99982 - DNA, 2091 bp, Homo sapiens
  misc_feature (1831)..(1832): n is a, c, g, or t
  misc_feature (1837)..(1837): n is a, c, g, or t
  misc_feature (1964)..(1964): n is a, c, g, or t
gaattctttcttcagcccatgtaaacatgaaaataagggttaaaaatgacttcattatggggaaaagggacaggatgcaaattgttcaaattcgtttgtgggtcgggtggccgctgctccggcctccggggccttgcggagactcaccccttcagcgtcgctgcccccagctcagctcttactgcgggccgctccgacggcggtccatcctgtcagggactatgcggcgcaaacatctccttcgccaaaagcaggcgccgccaccgggcgcatcgtggcggtcattggcgcagtggtggacgtccagtttgatgagggactaccaccaattctaaatgccctggaagtgcaaggcagggagaccagactggttttggaggtggcccagcatttgggtgagagcacagtaaggactattgctatggatggtacagaaggcttggttagaggccagaaagtactggattctggtgcaccaatcaaaattcctgttggtcctgagactttgggcagaatcatgaatgtcattggagaacctattgatgaaagaggtcccatcaaaaccaaacaatttgctcccattcatgctgaggctccagagttcatggaaatgagtgttgagcaggaaattctggtgactggtatcaaggttgtcgatctgctagctccctatgccaagggtggcaaaattgggctttttggtggtgctggagttggcaagactgtactgatcatggagttaatcaacaatgtcgccaaagcccatggtggttactctgtgtttgctggtgttggtgagaggacccgtgaaggcaatgatttataccatgaaatgattgaatctggtgttatcaacttaaaagatgccacctctaaggtagcgctggtatatggtcaaatgaatgaaccacctggtgctcgtgcccgggtagctctgactgggctgactgtggctgaatacttcagagaccaagaaggtcaagatgtactgctatttattgataacatctttcgcttcacccaggctggttcagaggtgtctgcattattgggccgaatcccttctgctgtgggctatcagcctaccctggccactgacatgggtactatgcaggaaagaattaccactaccaagaagggatctatcacctctgtacaggctatctatgtgcctgctgatgacttgactgaccctgcccctgctactacgtttgcccatttggatgctaccactgtactgtcgcgtgccattgctgagctgggcatctatccagctgtggatcctctagactccacctctcgtatcatggatcccaacattgttggcagtgagcattacgatgttgcccgtggggtgcaaaagatcctgcaggactacaaatccctccaggatatcattgccatcctgggtatggatgaactttctgaggaagacaagttgaccgtgtcccgtgcacggaaaatacagcgtttcttgtctcagccattccaggttgctgaggtcttcacaggtcatatggggaagctggtacccctgaaggagaccatcaaaggattccagcagattttggcaggtgaatatgaccatctcccagaacaggccttctatatggtgggacccattgaagaagctgtggcaaaagctgataagctggctgaagagcattcatcgtgaggggtctttgtcctctgtactgtctctctccttgcccctaacccaaaaagcttcatttttctgtgtaggctgcacaagagccttgattgaagatatattctttctgaacagtatttaaggtttccaataaaatgtacacccctcataaaaaacacnnaccanagacaacaaaaaacactttgttgggcggcctcgcgcctccgtgaaaaagttgttaggagccattgcgttgggcgcgcgggccccagtagggtccgtgcacgtggccagagtggtccaaggaaacctngtcggccatgggctgggttcccccaataaaaagcgccgggcacggagcgtctggaacaatccgcatgggttggaggcctactggctctccccggcgccaggagtcgagtaccgcgcgcggtggtgtc

SEQ ID NO: 99983 - DNA, 2390 bp, Homo sapiens
gaattctttcttcagcccatgtaaacatgaaaataagggttaaaaatgacttcattatggggaaaagggacaggatgcaaattgttcaaattcgtttgtgggtcgggtggccgctgctccggcctccggggccttgcggagactcaccccttcagcgtcgctgcccccagctcagctcttactgcgggccgctccgacggcggtccatcctgtcagggactatgcggcgcaaacatctccttcgccaaaagcaggcgccgccaccgggcgcatcgtggcggtcattggcgcagtggtggacgtccagtttgatgagggactaccaccaattctaaatgccctggaagtgcaaggcagggagaccagactggttttggaggtggcccagcatttgggtgagagcacagtaaggactattgctatggatggtacagaaggcttggttagaggccagaaagtactggattctggtgcaccaatcaaaattcctgttggtcctgagactttgggcagaatcatgaatgtcattggagaacctattgatgaaagaggtcccatcaaaaccaaacaatttgctcccattcatgctgaggctccagagttcatggaaatgagtgttgagcaggaaattctggtgactggtatcaaggttgtcgatctgctagctccctatgccaagggtggcaaaattgggctttttggtggtgctggagttggcaagactgtactgatcatggagttaatcaacaatgtcgccaaagcccatggtggttactctgtgtttgctggtgttggtgagaggacccgtgaaggcaatgatttataccatgaaatgattgaatctggtgttatcaacttaaaagatgccacctctaaggtagcgctggtatatggtcaaatgaatgaaccacctggtgctcgtgcccgggtagctctgactgggctgactgtggctgaatacttcagagaccaagaaggtcaagatgtactgctatttattgataacatctttcgcttcacccaggctggttcagaggtgtctgcattattgggccgaatcccttctgctgtgggctatcagcctaccctggccactgacatgggtactatgcaggaaagaattaccactaccaagaagggatctatcacctctgtacaggctatctatgtgcctgctgatgacttgactgaccctgcccctgctactacgtttgcccatttggatgctaccactgtactgtcgcgtgccattgctgagctgggcatctatccagctgtggatcctctagactccacctctcgtatcatggatcccaacattgttggcagtgagcattacgatgttgcccgtggggtgcaaaagatcctgcaggactacaaatccctccaggatatcattgccatcctgggtatggatgaactttctgaggaagacaagttgaccgtgtcccgtgcacggaaaatacagcgtttcttgtctcagccattccaggttgctgaggtcttcacaggtcatatggggaagctggtacccctgaaggagaccatcaaaggattccagcagattttggcaggtgaatatgaccatctcccagaacaggccttctatatggtgggacccattgaagaagctgtggcaaaagctgataagctggctgaagagcattcatcgtgaggggtctttgtcctctgtactgtctctctccttgcccctaacccaaaaagcttcatttttctgtgtaggctgcacaagagccttgattgaagatatattctttctgaacagtatttaaggtttccaataaaatgtacacccctcaaaaaaaaaaaaaaaaaaaaaaaaaaaaaaaaaaaaaaacaaaaaaagaaaacaaaaaaaaaaaaaaaaaaagaaaaaagaagaggggggggggggggaagagaggaggttcccgggggggggccaagtgatagcgcgcgcgagaaccacgggattactgtgtggaacacaggggggcccaaaggagggggcgagcagaaataatacaacaaggcggaggggcgcgaggatcaaaaaaggagagagaagaacgggaacacacaccggcaacaaacggggagaaacataggggcaaaagagaccccctaaccgccggggggggagacacaaagtggggcacacaaataccccacgcagaatatttacagaggccccaaggagagggaatatttaataaaatgtatagaaagagagagtgatcagatgggggtgtgtgtaacaaacagataggtgacaaattataagtggtgaggtgtgtagagaaaaagtttctggagcaaacagaggagagattgatgagttgatggcgagaaatttattacagcgaggagctatatgatgatagatgtaa

SEQ ID NO: 99984 - DNA, 1894 bp, Homo sapiens
gaattctttcttcagcccatgtaaacatgaaaataagggttaaaaatgacttcattatggggaaaagggacaggatgcaaattgttcaaattcgtttgtgggtcgggtggccgctgctccggcctccggggccttgcggagactcaccccttcagcgtcgctgcccccagctcagctcttactgcgggccgctccgacggcggtccatcctgtcagggactatgcggcgcaaacatctccttcgccaaaagcaggcgccgccaccgggcgcatcgtggcggtcattggcgcagtggtggacgtccagtttgatgagggactaccaccaattctaaatgccctggaagtgcaaggcagggagaccagactggttttggaggtggcccagcatttgggtgagagcacagtaaggactattgctatggatggtacagaaggcttggttagaggccagaaagtactggattctggtgcaccaatcaaaattcctgttggtcctgagactttgggcagaatcatgaatgtcattggagaacctattgatgaaagaggtcccatcaaaaccaaacaatttgctcccattcatgctgaggctccagagttcatggaaatgagtgttgagcaggaaattctggtgactggtatcaaggttgtcgatctgctagctccctatgccaagggtggcaaaattgggctttttggtggtgctggagttggcaagactgtactgatcatggagttaatcaacaatgtcgccaaagcccatggtggttactctgtgtttgctggtgttggtgagaggacccgtgaaggcaatgatttataccatgaaatgattgaatctggtgttatcaacttaaaagatgccacctctaaggtagcgctggtatatggtcaaatgaatgaaccacctggtgctcgtgcccgggtagctctgactgggctgactgtggctgaatacttcagagaccaagaaggtcaagatgtactgctatttattgataacatctttcgcttcacccaggctggttcagaggtgtctgcattattgggccgaatcccttctgctgtgggctatcagcctaccctggccactgacatgggtactatgcaggaaagaattaccactaccaagaagggatctatcacctctgtacaggctatctatgtgcctgctgatgacttgactgaccctgcccctgctactacgtttgcccatttggatgctaccactgtactgtcgcgtgccattgctgagctgggcatctatccagctgtggatcctctagactccacctctcgtatcatggatcccaacattgttggcagtgagcattacgatgttgcccgtggggtgcaaaagatcctgcaggactacaaatccctccaggatatcattgccatcctgggtatggatgaactttctgaggaagacaagttgaccgtgtcccgtgcacggaaaatacagcgtttcttgtctcagccattccaggttgctgaggtcttcacaggtcatatggggaagctggtacccctgaaggagaccatcaaaggattccagcagattttggcaggtgaatatgaccatctcccagaacaggccttctatatggtgggacccattgaagaagctgtggcaaaagctgataagctggctgaagagcattcatcgtgaggggtctttgtcctctgtactgtctctctccttgcccctaacccaaaaagcttcatttttctgtgtaggctgcacaagagccttgattgaagatatattctttctgaacagtatttaaggtttccaataaaatgtacacccctcaaaaaaaaaacacaacccaaacaattaacctccccatatctctacaccaaccgtatccttctctccccctctcct

SEQ ID NO: 99985 - DNA, 1838 bp, Homo sapiens
  misc_feature (1818)..(1818): n is a, c, g, or t
gaattctttcttcagcccatgtaaacatgaaaataagggttaaaaatgacttcattatggggaaaagggacaggatgcaaattgttcaaattcgtttgtgggtcgggtggccgctgctccggcctccggggccttgcggagactcaccccttcagcgtcgctgcccccagctcagctcttactgcgggccgctccgacggcggtccatcctgtcagggactatgcggcgcaaacatctccttcgccaaaagcaggcgccgccaccgggcgcatcgtggcggtcattggcgcagtggtggacgtccagtttgatgagggactaccaccaattctaaatgccctggaagtgcaaggcagggagaccagactggttttggaggtggcccagcatttgggtgagagcacagtaaggactattgctatggatggtacagaaggcttggttagaggccagaaagtactggattctggtgcaccaatcaaaattcctgttggtcctgagactttgggcagaatcatgaatgtcattggagaacctattgatgaaagaggtcccatcaaaaccaaacaatttgctcccattcatgctgaggctccagagttcatggaaatgagtgttgagcaggaaattctggtgactggtatcaaggttgtcgatctgctagctccctatgccaagggtggcaaaattgggctttttggtggtgctggagttggcaagactgtactgatcatggagttaatcaacaatgtcgccaaagcccatggtggttactctgtgtttgctggtgttggtgagaggacccgtgaaggcaatgatttataccatgaaatgattgaatctggtgttatcaacttaaaagatgccacctctaaggtagcgctggtatatggtcaaatgaatgaaccacctggtgctcgtgcccgggtagctctgactgggctgactgtggctgaatacttcagagaccaagaaggtcaagatgtactgctatttattgataacatctttcgcttcacccaggctggttcagaggtgtctgcattattgggccgaatcccttctgctgtgggctatcagcctaccctggccactgacatgggtactatgcaggaaagaattaccactaccaagaagggatctatcacctctgtacaggctatctatgtgcctgctgatgacttgactgaccctgcccctgctactacgtttgcccatttggatgctaccactgtactgtcgcgtgccattgctgagctgggcatctatccagctgtggatcctctagactccacctctcgtatcatggatcccaacattgttggcagtgagcattacgatgttgcccgtggggtgcaaaagatcctgcaggactacaaatccctccaggatatcattgccatcctgggtatggatgaactttctgaggaagacaagttgaccgtgtcccgtgcacggaaaatacagcgtttcttgtctcagccattccaggttgctgaggtcttcacaggtcatatggggaagctggtacccctgaaggagaccatcaaaggattccagcagattttggcaggtgaatatgaccatctcccagaacaggccttctatatggtgggacccattgaagaagctgtggcaaaagctgataagctggctgaagagcattcatcgtgaggggtctttgtcctctgtactgtctctctccttgcccctaacccaaaaagcttcatttttctgtgtaggctgcacaagagccttgattgaagatatattctttctgaaccttccttgtttataaaacaccacgaggtttaaangttccaaaagatgtcccccc

SEQ ID NO: 99986 - DNA, 1840 bp, Homo sapiens
gaattctttcttcagcccatgtaaacatgaaaataagggttaaaaatgacttcattatggggaaaagggacaggatgcaaattgttcaaattcgtttgtgggtcgggtggccgctgctccggcctccggggccttgcggagactcaccccttcagcgtcgctgcccccagctcagctcttactgcgggccgctccgacggcggtccatcctgtcagggactatgcggcgcaaacatctccttcgccaaaagcaggcgccgccaccgggcgcatcgtggcggtcattggcgcagtggtggacgtccagtttgatgagggactaccaccaattctaaatgccctggaagtgcaaggcagggagaccagactggttttggaggtggcccagcatttgggtgagagcacagtaaggactattgctatggatggtacagaaggcttggttagaggccagaaagtactggattctggtgcaccaatcaaaattcctgttggtcctgagactttgggcagaatcatgaatgtcattggagaacctattgatgaaagaggtcccatcaaaaccaaacaatttgctcccattcatgctgaggctccagagttcatggaaatgagtgttgagcaggaaattctggtgactggtatcaaggttgtcgatctgctagctccctatgccaagggtggcaaaattgggctttttggtggtgctggagttggcaagactgtactgatcatggagttaatcaacaatgtcgccaaagcccatggtggttactctgtgtttgctggtgttggtgagaggacccgtgaaggcaatgatttataccatgaaatgattgaatctggtgttatcaacttaaaagatgccacctctaaggtagcgctggtatatggtcaaatgaatgaaccacctggtgctcgtgcccgggtagctctgactgggctgactgtggctgaatacttcagagaccaagaaggtcaagatgtactgctatttattgataacatctttcgcttcacccaggctggttcagaggtgtctgcattattgggccgaatcccttctgctgtgggctatcagcctaccctggccactgacatgggtactatgcaggaaagaattaccactaccaagaagggatctatcacctctgtacaggctatctatgtgcctgctgatgacttgactgaccctgcccctgctactacgtttgcccatttggatgctaccactgtactgtcgcgtgccattgctgagctgggcatctatccagctgtggatcctctagactccacctctcgtatcatggatcccaacattgttggcagtgagcattacgatgttgcccgtggggtgcaaaagatcctgcaggactacaaatccctccaggatatcattgccatcctgggtatggatgaactttctgaggaagacaagttgaccgtgtcccgtgcacggaaaatacagcgtttcttgtctcagccattccaggttgctgaggtcttcacaggtcatatggggaagctggtacccctgaaggagaccatcaaaggattccagcagattttggcaggtgaatatgaccatctcccagaacaggccttctatatggtgggacccattgaagaagctgtggcaaaagctgataagctggctgaagagcattcatcgtgaggggtctttgtcctctgtactgtctctctccttgcccctaacccaaaaagcttcatttttctgtgtaggctgcacaagagccttgattgaagatatattctttctgaacctgtttgtcgtaggcagatgtcatgtgacgggatccttagagtcacctcagcatcc

SEQ ID NO: 99987 - DNA, 1663 bp, Homo sapiens
  misc_feature (1578)..(1578): n is a, c, g, or t
  misc_feature (1581)..(1581): n is a, c, g, or t
  misc_feature (1587)..(1587): n is a, c, g, or t
  misc_feature (1591)..(1591): n is a, c, g, or t
  misc_feature (1596)..(1596): n is a, c, g, or t
  misc_feature (1600)..(1600): n is a, c, g, or t
  misc_feature (1603)..(1603): n is a, c, g, or t
  misc_feature (1605)..(1605): n is a, c, g, or t
gaattctttcttcagcccatgtaaacatgaaaataagggttaaaaatgacttcattatggggaaaagggacaggatgcaaattgttcaaattcgtttgtgggtcgggtggccgctgctccggcctccggggccttgcggagactcaccccttcagcgtcgctgcccccagctcagctcttactgcgggccgctccgacggcggtccatcctgtcagggactatgcggcgcaaacatctccttcgccaaaagcaggcgccgccaccgggcgcatcgtggcggtcattggcgcagtggtggacgtccagtttgatgagggactaccaccaattctaaatgccctggaagtgcaaggcagggagaccagactggttttggaggtggcccagcatttgggtgagagcacagtaaggactattgctatggatggtacagaaggcttggttagaggccagaaagtactggattctggtgcaccaatcaaaattcctgttggtcctgagactttgggcagaatcatgaatgtcattggagaacctattgatgaaagaggtcccatcaaaaccaaacaatttgctcccattcatgctgaggctccagagttcatggaaatgagtgttgagcaggaaattctggtgactggtatcaaggttgtcgatctgctagctccctatgccaagggtggcaaaattgggctttttggtggtgctggagttggcaagactgtactgatcatggagttaatcaacaatgtcgccaaagcccatggtggttactctgtgtttgctggtgttggtgagaggacccgtgaaggcaatgatttataccatgaaatgattgaatctggtgttatcaacttaaaagatgccacctctaaggtagcgctggtatatggtcaaatgaatgaaccacctggtgctcgtgcccgggtagctctgactgggctgactgtggctgaatacttcagagaccaagaaggtcaagatgtactgctatttattgataacatctttcgcttcacccaggctggttcagaggtgtctgcattattgggccgaatcccttctgctgtgggctatcagcctaccctggccactgacatgggtactatgcaggaaagaattaccactaccaagaagggatctatcacctctgtacaggctatctatgtgcctgctgatgacttgactgaccctgcccctgctactacgtttgcccatttggatgctaccactgtactgtcgcgtgccattgctgagctgggcatctatccagctgtggatcctctagactccacctctcgtatcatggatcccaacattgttggcagtgagcattacgatgttgcccgtggggtgcaaaagatcctgcaggactacaaatccctccaggatatcattgccatcctgggtatggatgaactttctgaggaagacaagttgaccgtgtcccgtgcacggaaaatacagcgtttcttgtctcagccattccaggttgctgaggtcttcacaggtcatatggggaagctggtacccctgaaggagaccatcaaaggattccagcagattttggcagtganttnaccttnccgnaaagncttnttngnggaccattgagaaatctggacacacgatagggtcaaaacaataggaggagtaacccac

SEQ ID NO: 99988 - DNA, 1581 bp, Homo sapiens
  misc_feature (1422)..(1422): n is a, c, g, or t
  misc_feature (1428)..(1428): n is a, c, g, or t
  misc_feature (1436)..(1436): n is a, c, g, or t
  misc_feature (1440)..(1440): n is a, c, g, or t
  misc_feature (1443)..(1443): n is a, c, g, or t
  misc_feature (1449)..(1449): n is a, c, g, or t
  misc_feature (1452)..(1452): n is a, c, g, or t
gaattctttcttcagcccatgtaaacatgaaaataagggttaaaaatgacttcattatggggaaaagggacaggatgcaaattgttcaaattcgtttgtgggtcgggtggccgctgctccggcctccggggccttgcggagactcaccccttcagcgtcgctgcccccagctcagctcttactgcgggccgctccgacggcggtccatcctgtcagggactatgcggcgcaaacatctccttcgccaaaagcaggcgccgccaccgggcgcatcgtggcggtcattggcgcagtggtggacgtccagtttgatgagggactaccaccaattctaaatgccctggaagtgcaaggcagggagaccagactggttttggaggtggcccagcatttgggtgagagcacagtaaggactattgctatggatggtacagaaggcttggttagaggccagaaagtactggattctggtgcaccaatcaaaattcctgttggtcctgagactttgggcagaatcatgaatgtcattggagaacctattgatgaaagaggtcccatcaaaaccaaacaatttgctcccattcatgctgaggctccagagttcatggaaatgagtgttgagcaggaaattctggtgactggtatcaaggttgtcgatctgctagctccctatgccaagggtggcaaaattgggctttttggtggtgctggagttggcaagactgtactgatcatggagttaatcaacaatgtcgccaaagcccatggtggttactctgtgtttgctggtgttggtgagaggacccgtgaaggcaatgatttataccatgaaatgattgaatctggtgttatcaacttaaaagatgccacctctaaggtagcgctggtatatggtcaaatgaatgaaccacctggtgctcgtgcccgggtagctctgactgggctgactgtggctgaatacttcagagaccaagaaggtcaagatgtactgctatttattgataacatctttcgcttcacccaggctggttcagaggtgtctgcattattgggccgaatcccttctgctgtgggctatcagcctaccctggccactgacatgggtactatgcaggaaagaattaccactaccaagaagggatctatcacctctgtacaggctatctatgtgcctgctgatgacttgactgaccctgcccctgctactacgtttgcccatttggatgctaccactgtactgtcgcgtgccattgctgagctgggcatctatccagctgtggatcctctagactccacctctcgtatcatggatcccaacattgttggcagtgagcattacgatgttgcccgtggggtgcaaaagatcctgcagactacaatccctccaggatatcattgcatctggtatggtgacttctgggnagacangtgacgtnccgngcnggaaanacngcgtctggtcagcaaccagggggaggctaagcattgggagggcctcagggagaacagagtacagatgggggaacgccacaaagctatggcccaagaggacaatcggacaagagcgggggcgcccaatgg

SEQ ID NO: 99989 - DNA, 2338 bp, Homo sapiens
gaattctttcttcagcccatgtaaacatgaaaataagggttaaaaatgacttcattatggggaaaagggacaggatgcaaattgttcaaattcgtttgtgggtcgggtggccgctgctccggcctccggggccttgcggagactcaccccttcagcgtcgctgcccccagctcagctcttactgcgggccgctccgacggcggtccatcctgtcagggactatgcggcgcaaacatctccttcgccaaaagcaggcgccgccaccgggcgcatcgtggcggtcattggcgcagtggtggacgtccagtttgatgagggactaccaccaattctaaatgccctggaagtgcaaggcagggagaccagactggttttggaggtggcccagcatttgggtgagagcacagtaaggactattgctatggatggtacagaaggcttggttagaggccagaaagtactggattctggtgcaccaatcaaaattcctgttggtcctgagactttgggcagaatcatgaatgtcattggagaacctattgatgaaagaggtcccatcaaaaccaaacaatttgctcccattcatgctgaggctccagagttcatggaaatgagtgttgagcaggaaattctggtgactggtatcaaggttgtcgatctgctagctccctatgccaagggtggcaaaattgggctttttggtggtgctggagttggcaagactgtactgatcatggagttaatcaacaatgtcgccaaagcccatggtggttactctgtgtttgctggtgttggtgagaggacccgtgaaggcaatgatttataccatgaaatgattgaatctggtgttatcaacttaaaagatgccacctctaagaggtaagcattgagctaattgatgtccacgtggtagttacgccaggaaactattgccaactgaagccatgttctatattttctatttaatttttttttctttttaagaaaatgttaatattttcattttcgtgtcccagggcctacaaaggaaacctgttagtgttttcccccccaacttccaatacacaaatggacattttctttcctctttgatactgacattaaataacatttccaggttttctttttggtagatagtcccatcatttgaaagctaattttgggagggctggattggacgtggtacatatgtttcagttaagcctattttgtacttttcacttaacttgaataggtttttatttcctttctactatagttttgccttactaatataagaagctgtcttttttttttgaactgcatctctaatagggaaaagaaacttgcacacaaaaacgctgacaccttctgagatcctttgtcaggttttacgattatgtatgattactgcaggtagcgctggtatatggtcaaatgaatgaaccacctggtgctcgtgcccgggtagctctgactgggctgactgtggctgaatacttcagagaccaagaaggtcaagatgtactgctatttattgataacatctttcgcttcacccaggctggttcagaggtgtctgcattattgggccgaatcccttctgctgtgggctatcagcctaccctggccactgacatgggtactatgcaggaaagaattaccactaccaagaagggatctatcacctctgtacaggctatctatgtgcctgctgatgacttgactgaccctgcccctgctactacgtttgcccatttggatgctaccactgtactgtcgcgtgccattgctgagctgggcatctatccagctgtggatcctctagactccacctctcgtatcatggatcccaacattgttggcagtgagcattacgatgttgcccgtggggtgcaaaagatcctgcaggactacaaatccctccaggatatcattgccatcctgggtatggatgaactttctgaggaagacaagttgaccgtgtcccgtgcacggaaaatacagcgtttcttgtctcagccattccaggttgctgaggtcttcacaggtcatatggggaagctggtacccctgaaggagaccatcaaaggattccagcagattttggcaggtgaatatgaccatctcccagaacaggccttctatatggtgggacccattgaagaagctgtggcaaaagctgataagctggctgaagagcattcatcgtgaggggtctttgtcctctgtactgtctctctccttgcccctaacccaaaaagcttcatttttctgtgtaggctgcacaagagccttgattgaagatatattctttctgaacagtatttaaggtttccaataaaatgtacacccctca

SEQ ID NO: 99990 - DNA, 1326 bp, Homo sapiens
gaattctttcttcagcccatgtaaacatgaaaataagggttaaaaatgacttcattatggggaaaagggacaggatgcaaattgttcaaattcgtttgtgggtcgggtggccgctgctccggcctccggggccttgcggagactcaccccttcagcgtcgctgcccccagctcagctcttactgcgggccgctccgacggcggtccatcctgtcagggactatgcggcgcaaacatctccttcgccaaaagcaggcgccgccaccgggcgcatcgtggcggtcattggcgcagtggtggacgtccagtttgatgagggactaccaccaattctaaatgccctggaagtgcaaggcagggagaccagactggttttggaggtggcccagcatttgggtgagagcacagtaaggactattgctatggatggtacagaaggcttggttagaggccagaaagtactggattctggtgcaccaatcaaaattcctgttggtcctgagactttgggcagaatcatgaatgtcattggagaacctattgatgaaagaggtcccatcaaaaccaaacaatttgctcccattcatgctgaggctccagagttcatggaaatgagtgttgagcaggaaattctggtgactggtatcaaggttgtcgatctgctagctccctatgccaagggtggcaaaattgggctttttggtggtgctggagttggcaagactgtactgatcatggagttaatcaacaatgtcgccaaagcccatggtggttactctgtgtttgctggtgttggtgagaggacccgtgaaggcaatgatttataccatgaaatgattgaatctggtgttatcaacttaaaagatgccacctctaaggtagcgctggtatatggtcaaatgaatgaaccacctggtgctcgtgcccgggtagctctgactgggctgactgtggctgaatacttcagagaccaagaaggtcaagatgtactgctatttattgataacatctttcgcttcacccaggctggttcagaggtgtctgcattattgggccgaatcccttctgctgtgggctatcagcctaccctggccactgacatgggtactatgcaggaaagaattaccactaccaagaagggatctatcacctctgtacaggctatctatgtgcctgctgatgacttgactgaccctgcccctgctactacgtttgcccatttggatgctaccactgtactgtcgcgtgccattgctgagctgggcatctatccagctgtggcgtctttatggtcatacccgcttgctagcataagagtaccgagatt

SEQ ID NO: 99991 - DNA, 1786 bp, Homo sapiens
gaattctttcttcagcccatgtaaacatgaaaataagggttaaaaatgacttcattatggggaaaagggacaggatgcaaattgttcaaattcgtttgtgggtcgggtggccgctgctccggcctccggggccttgcggagactcaccccttcagcgtcgctgcccccagctcagctcttactgcgggccgctccgacggcggtccatcctgtcagggactatgcggcgcaaacatctccttcgccaaaagcaggcgccgccaccgggcgcatcgtggcggtcattggcgcagtggtggacgtccagtttgatgagggactaccaccaattctaaatgccctggaagtgcaaggcagggagaccagactggttttggaggtggcccagcatttgggtgagagcacagtaaggactattgctatggatggtacagaaggcttggttagaggccagaaagtactggattctggtgcaccaatcaaaattcctgttggtcctgagactttgggcagaatcatgaatgtcattggagaacctattgatgaaagaggtcccatcaaaaccaaacaatttgctcccattcatgctgaggctccagagttcatggaaatgagtgttgagcaggaaattctggtgactggtatcaaggttgtcgatctgctagctccctatgccaagggtggcaaaattgggctttttggtggtgctggagttggcaagactgtactgatcatggagttaatcaacaatgtcgccaaagcccatggtggttactctgtgtttgctggtgttggtgagaggacccgtgaaggcaatgatttataccatgaaatgattgaatctggtgttatcaacttaaaagatgccacctctaagctggtgctcgtgcccgggtagctctgactgggctgactgtggctgaatacttcagagaccaagaaggtcaagatgtactgctatttattgataacatctttcgcttcacccaggctggttcagaggtgtctgcattattgggccgaatcccttctgctgtgggctatcagcctaccctggccactgacatgggtactatgcaggaaagaattaccactaccaagaagggatctatcacctctgtacaggctatctatgtgcctgctgatgacttgactgaccctgcccctgctactacgtttgcccatttggatgctaccactgtactgtcgcgtgccattgctgagctgggcatctatccagctgtggatcctctagactccacctctcgtatcatggatcccaacattgttggcagtgagcattacgatgttgcccgtggggtgcaaaagatcctgcaggactacaaatccctccaggatatcattgccatcctgggtatggatgaactttctgaggaagacaagttgaccgtgtcccgtgcacggaaaatacagcgtttcttgtctcagccattccaggttgctgaggtcttcacaggtcatatggggaagctggtacccctgaaggagaccatcaaaggattccagcagattttggcaggtgaatatgaccatctcccagaacaggccttctatatggtgggacccattgaagaagctgtggcaaaagctgataagctggctgaagagcattcatcgtgaggggtctttgtcctctgtactgtctctctccttgcccctaacccaaaaagcttcatttttctgtgtaggctgcacaagagccttgattgaagatatattctttctgaacagtatttaaggtttccaataaaatgtacacccctca

SEQ ID NO: 99992 - DNA, 1768 bp, Homo sapiens
gaattctttcttcagcccatgtaaacatgaaaataagggttaaaaatgacttcattatggggaaaagggacaggatgcaaattgttcaaattcgtttgtgggtcgggtggccgctgctccggcctccggggccttgcggagactcaccccttcagcgtcgctgcccccagctcagctcttactgcgggccgctccgacggcggtccatcctgtcagggactatgcggcgcaaacatctccttcgccaaaagcaggcgccgccaccgggcgcatcgtggcggtcattggcgcagtggtggacgtccagtttgatgagggactaccaccaattctaaatgccctggaagtgcaaggcagggagaccagactggttttggaggtggcccagcatttgggtgagagcacagtaaggactattgctatggatggtacagaaggcttggttagaggccagaaagtactggattctggtgcaccaatcaaaattcctgttggtcctgagactttgggcagaatcatgaatgtcattggagaacctattgatgaaagaggtcccatcaaaaccaaacacaggaaattctggtgactggtatcaaggttgtcgatctgctagctccctatgccaagggtggcaaaattgggctttttggtggtgctggagttggcaagactgtactgatcatggagttaatcaacaatgtcgccaaagcccatggtggttactctgtgtttgctggtgttggtgagaggacccgtgaaggcaatgatttataccatgaaatgattgaatctggtgttatcaacttaaaagatgccacctctaaggtagcgctggtatatggtcaaatgaatgaaccacctggtgctcgtgcccgggtagctctgactgggctgactgtggctgaatacttcagagaccaagaaggtcaagatgtactgctatttattgataacatctttcgcttcacccaggctggttcagaggtgtctgcattattgggccgaatcccttctgctgtgggctatcagcctaccctggccactgacatgggtactatgcaggaaagaattaccactaccaagaagggatctatcacctctgtacaggctatctatgtgcctgctgatgacttgactgaccctgcccctgctactacgtttgcccatttggatgctaccactgtactgtcgcgtgccattgctgagctgggcatctatccagctgtggatcctctagactccacctctcgtatcatggatcccaacattgttggcagtgagcattacgatgttgcccgtggggtgcaaaagatcctgcaggactacaaatccctccaggatatcattgccatcctgggtatggatgaactttctgaggaagacaagttgaccgtgtcccgtgcacggaaaatacagcgtttcttgtctcagccattccaggttgctgaggtcttcacaggtcatatggggaagctggtacccctgaaggagaccatcaaaggattccagcagattttggcaggtgaatatgaccatctcccagaacaggccttctatatggtgggacccattgaagaagctgtggcaaaagctgataagctggctgaagagcattcatcgtgaggggtctttgtcctctgtactgtctctctccttgcccctaacccaaaaagcttcatttttctgtgtaggctgcacaagagccttgattgaagatatattctttctgaacagtatttaaggtttccaataaaatgtacacccctca

SEQ ID NO: 99993 - DNA, 1832 bp, Homo sapiens
gaattctttcttcagcccatgtaaacatgaaaataagggttaaaaatgacttcattatggggaaaagggacaggatgcaaattgttcaaattcgtttgtgggtcgggtggccgctgctccggcctccggggccttgcggagactcaccccttcagcgtcgctgcccccagctcagctcttactgcgggccgctccgacggcggtccatcctgtcagggactatgcggcgcaaacatctccttcgccaaaagcaggcgccgccaccgggcgcatcgtggcggtcattggcgcagtggtggacgtccagtttgatgagggactaccaccaattctaaatgccctggaagtgcaaggcagggagaccagactggttttggaggtggcccagcatttgggtgagagcacagtaaggactattgctatggatggtacagaaggcttggttagaggccagaaagtactggattctggtgcaccaatcaaaattcctgttggtcctgagactttgggcagaatcatgaatgtcattggagaacctattgatgaaagaggtcccatcaaaaccaaacaatttgctcccattcatgctgaggctccagagttcatggaaatgagtgttgagcaggaaattctggtgactggtatcaaggttgtcgatctgctagctccctatgccaagggtggcaaaattgggctttttggtggtgctggagttggcaagactgtactgatcatggagttaatcaacaatgtcgccaaagcccatggtggttactctgtgtttgctggtgttggtgagaggacccgtgaaggcaatgatttataccatgaaatgattgaatctggtgttatcaacttaaaagatgccacctctaaggtagcgctggtatatggtcaaatgaatgaaccacctggtgctcgtgcccgggtagctctgactgggctgactgtggctgaatacttcagagaccaagaaggtcaagatgtactgctatttattgataacatctttcgcttcacccaggctggttcagaggtgtctgcattattgggccgaatcccttctgctgtgggctatcagcctaccctggccactgacatgggtactatgcaggaaagaattaccactaccaagaagggatctatcacctctgtacaggactacaaatccctccaggatatcattgccatcctgggtatggatgaactttctgaggaagacaagttgaccgtgtcccgtgcacggaaaatacagcgtttcttgtctcagccattccaggttgctgaggtcttcacaggtcatatggggaagctggtacccctgaaggagaccatcaaaggattccagcagattttggcaggtgaatatgaccatctcccagaacaggccttctatatggtgggacccattgaagaagctgtggcaaaagctgataagctggctgaagagcattcatcgtgaggggtctttgtcctctgtactgtctctctccttgcccctaacccaaaaagcttcatttttctgtgtaggctgcacaagagccttgattgaagatatattctttctgaacatgttcccataaatgttcaccttcgaaaaaaaaaagaggagaacaaacagagggggggcccaaaaaaaccccgcggggggcccattacgccaccgcgtctgttacagggggccccagagaggcatataacacagggcgcaaacagtgcgtgaaaaggactgacgtcaggacactctggttgtcaccccatacgcaacaatatgtgtagtcgggtcacttcatacatcagcagcacgacgagcaccaaacccaaggaggggc

SEQ ID NO: 99994 - DNA, 1454 bp, Homo sapiens
gaattctttcttcagcccatgtaaacatgaaaataagggttaaaaatgacttcattatggggaaaagggacaggatgcaaattgttcaaattcgtttgtgggtcgggtggccgctgctccggcctccggggccttgcggagactcaccccttcagcgtcgctgcccccagctcagctcttactgcgggccgctccgacggcggtccatcctgtcagggactatgcggcgcaaacatctccttcgccaaaagcaggcgccgccaccgggcgcatcgtggcggtcattggcgcagtggtggacgtccagtttgatgagggactaccaccaattctaaatgccctggaagtgcaaggcagggagaccagactggttttggaggtggcccagcatttgggtgagagcacagtaaggactattgctatggatggtacagaaggcttggttagaggccagaaagtactggattctggtgcaccaatcaaaattcctgttggtcctgagactttgggcagaatcatgaatgtcattggagaacctattgatgaaagaggtcccatcaaaaccaaacaatttgctcccattcatgctgaggctccagagttcatggaaatgagtgttgagcaggaaattctggtgactggtatcaaggttgtcgatctgctagctccctatgccaagggtggcaaaattgggctttttggtggtgctggagttggcaagactgtactgatcatggagttaatcaacaatgtcgccaaagcccatggtggttactctgtgtttgctggtgttggtgagaggacccgtgaaggcaatgatttataccatgaaatgattgaatctggtgttatcaacttaaaagatgccacctctaaggtagcgctggtatatggtcaaatgaatgaaccacctggtgctcgtgcccgggtagctctgactgggctgactgtggctgaatacttcagagaccaagaaggtcaagatgtactgctatttattgataacatctttcgcttcacccaggctggttcagaggtgtctgcattattgggccgaatcccttctgctgtgggctatcagcctaccctggccactgacatgggtactatgcaggaaagaattaccactaccaagaagggatctatcacctctgtacagtcttgtaaggctatctatgtgcctgtgatgattgaatgacctgccctgtatagttgcatttgatgtacatgtatggtggtgcatggtgagctaggattatcagtggggatctttagataattgtatatggtccaacttgggggggagctagattgcgggggtgaaagattgggataaaatgcaggaattgcctggttggtatttcgaaaagtgccgggcggggaaaaggtctttagcacaagggtgtaaggtggaagggctagacaatcgtggggaaatcaagttggagagggag

SEQ ID NO: 99995 - DNA, 1523 bp, Homo sapiens
gaattctttcttcagcccatgtaaacatgaaaataagggttaaaaatgacttcattatggggaaaagggacaggatgcaaattgttcaaattcgtttgtgggtcgggtggccgctgctccggcctccggggccttgcggagactcaccccttcagcgtcgctgcccccagctcagctcttactgcgggccgctccgacggcggtccatcctgtcagggactatgcggcgcaaacatctccttcgccaaaagcaggcgccgccaccgggcgcatcgtggcggtcattggcgcagtggtggacgtccagtttgatgagggactaccaccaattctaaatgccctggaagtgcaaggcagggagaccagactggttttggaggtggcccagcatttggggctttttggtggtgctggagttggcaagactgtactgatcatggagttaatcaacaatgtcgccaaagcccatggtggttactctgtgtttgctggtgttggtgagaggacccgtgaaggcaatgatttataccatgaaatgattgaatctggtgttatcaacttaaaagatgccacctctaaggtagcgctggtatatggtcaaatgaatgaaccacctggtgctcgtgcccgggtagctctgactgggctgactgtggctgaatacttcagagaccaagaaggtcaagatgtactgctatttattgataacatctttcgcttcacccaggctggttcagaggtgtctgcattattgggccgaatcccttctgctgtgggctatcagcctaccctggccactgacatgggtactatgcaggaaagaattaccactaccaagaagggatctatcacctctgtacaggctatctatgtgcctgctgatgacttgactgaccctgcccctgctactacgtttgcccatttggatgctaccactgtactgtcgcgtgccattgctgagctgggcatctatccagctgtggatcctctagactccacctctcgtatcatggatcccaacattgttggcagtgagcattacgatgttgcccgtggggtgcaaaagatcctgcaggactacaaatccctccaggatatcattgccatcctgggtatggatgaactttctgaggaagacaagttgaccgtgtcccgtgcacggaaaatacagcgtttcttgtctcagccattccaggttgctgaggtcttcacaggtcatatggggaagctggtacccctgaaggagaccatcaaaggattccagcagattttggcaggtgaatatgaccatctcccagaacaggccttctatatggtgggacccattgaagaagctgtggcaaaagctgataagctggctgaagagcattcatcgtgaggggtctttgtcctctgtactgtctctctccttgcccctaacccaaaaagcttcatttttctgtgtaggctgcacaagagccttgattgaagatatattctttctgaacagtatttaaggtttccaataaaatgtacacccctca

SEQ ID NO: 99996 - DNA, 1661 bp, Homo sapiens
gaattctttcttcagcccatgtaaacatgaaaataagggttaaaaatgacttcattatggggaaaagggacaggatgcaaattgttcaaattcgtttgtgggtcgggtggccgctgctccggcctccggggccttgcggagactcaccccttcagcgtcgctgcccccagctcagctcttactgcgggccgctccgacggcggtccatcctgtcagggactatgcggcgcaaacatctccttcgccaaaagcaggcgccgccaccgggcgcatcgtggcggtcattggcgcagtggtggacgtccagtttgatgagggactaccaccaattctaaatgccctggaagtgcaaggcagggagaccagactggttttggaggtggcccagcatttgggtgagagcacagtaaggactattgctatggatggtacagaaggcttggttagaggccagaaagtactggattctggtgcaccaatcaaaattcctgttggtcctgagactttgggcagaatcatgaatgtcattggagaacctattgatgaaagaggtcccatcaaaaccaaacaatttgctcccattcatgctgaggctccagagttcatggaaatgagtgttgagcaggaaattctggtgactggtatcaaggttgtcgatctgctagctccctatgccaagggtggcaaaattgggctttttggtggtgctggagttggcaagactgtactgatcatggagttaatcaacaatgtcgccaaagcccatggtggttactctgtgtttgctggtgttggtgagaggacccgtgaaggcaatgatttataccatgaaatgattgaatctggtgttatcaacttaaaagatgccacctctaaggtgtctgcattattgggccgaatcccttctgctgtgggctatcagcctaccctggccactgacatgggtactatgcaggaaagaattaccactaccaagaagggatctatcacctctgtacaggctatctatgtgcctgctgatgacttgactgaccctgcccctgctactacgtttgcccatttggatgctaccactgtactgtcgcgtgccattgctgagctgggcatctatccagctgtggatcctctagactccacctctcgtatcatggatcccaacattgttggcagtgagcattacgatgttgcccgtggggtgcaaaagatcctgcaggactacaaatccctccaggatatcattgccatcctgggtatggatgaactttctgaggaagacaagttgaccgtgtcccgtgcacggaaaatacagcgtttcttgtctcagccattccaggttgctgaggtcttcacaggtcatatggggaagctggtacccctgaaggagaccatcaaaggattccagcagattttggcaggtgaatatgaccatctcccagaacaggccttctatatggtgggacccattgaagaagctgtggcaaaagctgataagctggctgaagagcattcatcgtgaggggtctttgtcctctgtactgtctctctccttgcccctaacccaaaaagcttcatttttctgtgtaggctgcacaagagccttgattgaagatatattctttctgaacagtatttaaggtttccaataaaatgtacacccctca

SEQ ID NO: 99997 - DNA, 998 bp, Homo sapiens
  misc_feature (882)..(882): n is a, c, g, or t
gaattctttcttcagcccatgtaaacatgaaaataagggttaaaaatgacttcattatggggaaaagggacaggatgcaaattgttcaaattcgtttgtgggtcgggtggccgctgctccggcctccggggccttgcggagactcaccccttcagcgtcgctgcccccagctcagctcttactgcgggccgctccgacggcggtccatcctgtcagggactatgcggcgcaaacatctccttcgccaaaagcaggcgccgccaccgggcgcatcgtggcggtcattggcgcagtggtggacgtccagtttgatgagggactaccaccaattctaaatgccctggaagtgcaaggcagggagaccagactggttttggaggtggcccagcatttgggtgagagcacagtaaggactattgctatggatggtacagaaggcttggttagaggccagaaagtactggattctggtgcaccaatcaaaattcctgttggtcctgagactttgggcagaatcatgaatgtcattggagaacctattgatgaaagaggtcccatcaaaaccaaacaatttgctcccattcatgctgaggctccagagttcatggaaatgagtgttgagcaggaaattctggtgactggtatcaaggttgtcgatctgctagctccctatgccaagggtggcaaaattgggctttttggtggtgctggagttggcaagactgtactgatcatggagttaatcaacaatgtcgccaaagcccatggtggttactctgtgtttgctggtgttggtgagaggacccgtgaaggcaatgatttataccatgaaatgattgaatctggtgttatcaacttaaaagatgccacctctaagaggcnggttatggtcaatgatgaacacctgggtctggccggtactgatggggaagggggaaatcgaaacagaaggaagtggtttggaattgtaccaggggaggtgggttggactcgggggc

SEQ ID NO: 99998 - DNA, 1026 bp, Homo sapiens
  misc_feature (922)..(922): n is a, c, g, or t
  misc_feature (932)..(932): n is a, c, g, or t
  misc_feature (961)..(961): n is a, c, g, or t
  misc_feature (969)..(969): n is a, c, g, or t
  misc_feature (983)..(983): n is a, c, g, or t
  misc_feature (993)..(993): n is a, c, g, or t
  misc_feature (999)..(1000): n is a, c, g, or t
  misc_feature (1006)..(1006): n is a, c, g, or t
gaattctttcttcagcccatgtaaacatgaaaataagggttaaaaatgacttcattatggggaaaagggacaggatgcaaattgttcaaattcgtttgtgggtcgggtggccgctgctccggcctccggggccttgcggagactcaccccttcagcgtcgctgcccccagctcagctcttactgcgggccgctccgacggcggtccatcctgtcagggactatgcggcgcaaacatctccttcgccaaaagcaggcgccgccaccgggcgcatcgtggcggtcattggcgcagtggtggacgtccagtttgatgagggactaccaccaattctaaatgccctggaagtgcaaggcagggagaccagactggttttggaggtggcccagcatttgggtgagagcacagtaaggactattgctatggatggtacagaaggcttggttagaggccagaaagtactggattctggtgcaccaatcaaaattcctgttggtcctgagactttgggcagaatcatgaatgtcattggagaacctattgatgaaagaggtcccatcaaaaccaaacaatttgctcccattcatgctgaggctccagagttcatggaaatgagtgttgagcaggaaattctggtgactggtatcaaggttgtcgatctgctagctccctatgccaagggtggcaaaattgggctttttggtggtgctggagttggcaagactgtactgatcatggagttaatcaacaatgtcgccaaagcccatggtggttactctgtgtttgctggtgttggtgagaggacccgtgaaggcaatgatttataccatgaaatgattgaatctggtgttatcaacttaaaagatgccacctctaaggcgcggtatttggtccaatgatgaccacctggggctcgtgccggntactctgacngggcggacgggggtgaaattcaagaacanaggcaagngcggcttttggacntcttcgtccnggcggnnaggggntttggcccccttggggatac

SEQ ID NO: 99999 - DNA, 1174 bp, Homo sapiens
gaattctttcttcagcccatgtaaacatgaaaataagggttaaaaatgacttcattatggggaaaagggacaggatgcaaattgttcaaattcgtttgtgggtcgggtggccgctgctccggcctccggggccttgcggagactcaccccttcagcgtcgctgcccccagctcagctcttactgcgggccgctccgacggcggtccatcctgtcagggactatgcggcgcaaacatctccttcgccaaaagcaggcgccgccaccgggcgcatcgtggcggtcattggcgcagtggtggacgtccagtttgatgagggactaccaccaattctaaatgccctggaagtgcaaggcagggagaccagactggttttggaggtggcccagcatttgggtgagagcacagtaaggactattgctatggatggtacagaaggcttggttagaggccagaaagtactggattctggtgcaccaatcaaaattcctgttggtcctgagactttgggcagaatcatgaatgtcattggagaacctattgatgaaagaggtcccatcaaaaccaaacaatttgctcccattcatgctgaggctccagagttcatggaaatgagtgttgagcaggaaattctggtgactggtatcaaggttgtcgatctgctagctccctatgccaagggtggcaaaattgggctttttggtggtgctggagttggcaagactgtactgatcatggagttaatcaacaatgtcgccaaagcccatggtggttactctgtgtttgctggtgttggtgagaggacccgtgaaggcaatgatttataccatgaaatgattgaatctggtgttatcaacttaaaagatgccacctctaagaggtaagcattgagctaattgatgtccacgtggtagttacgccaggaaactattgccaactgaagccatgttctatattttctatttaatttttttactctctctacaaggttttttcctagtgtcctaagagctgttcctctttggactaacagttaaatttactaggggatttagagggttctgtgggctaatttaaagttgaactaagattctatcttgtacataccagctatcatccatggtctcggtagttttgtcgcctctacctataaatctcccccagtgattttgcca

SEQ ID NO: 100000 - DNA, 1151 bp, Homo sapiens
  misc_feature (969)..(969): n is a, c, g, or t
  misc_feature (985)..(985): n is a, c, g, or t
gaattctttcttcagcccatgtaaacatgaaaataagggttaaaaatgacttcattatggggaaaagggacaggatgcaaattgttcaaattcgtttgtgggtcgggtggccgctgctccggcctccggggccttgcggagactcaccccttcagcgtcgctgcccccagctcagctcttactgcgggccgctccgacggcggtccatcctgtcagggactatgcggcgcaaacatctccttcgccaaaagcaggcgccgccaccgggcgcatcgtggcggtcattggcgcagtggtggacgtccagtttgatgagggactaccaccaattctaaatgccctggaagtgcaaggcagggagaccagactggttttggaggtggcccagcatttgggtgagagcacagtaaggactattgctatggatggtacagaaggcttggttagaggccagaaagtactggattctggtgcaccaatcaaaattcctgttggtcctgagactttgggcagaatcatgaatgtcattggagaacctattgatgaaagaggtcccatcaaaaccaaacaatttgctcccattcatgctgaggctccagagttcatggaaatgagtgttgagcaggaaattctggtgactggtatcaaggttgtcgatctgctagctccctatgccaagggtggcaaaattgggctttttggtggtgctggagttggcaagactgtactgatcatggagttaatcaacaatgtcgccaaagcccatggtggttactctgtgtttgctggtgttggtgagaggacccgtgaaggcaatgatttataccatgaaatgattgaatctggtgttatcaacttaaaagatgccacctctaaggggcgcatcgtggcggtcattggcgcattggtggacgtccagtttgatgagggactaccaccaattctaaatgccctggaagtgcaaggcanggagaccagactggtnttggaggtggcccaccatttgggtgagagcacaggaaggactgtctctctccttgcccctaacccaaaaagcttcatttttctgtgtaggctgcacaagagccttgattgaagatatattctttctgaacagtatttaaggtttccaataaaatgtacacccctca

SEQ ID NO: 100001 - DNA, 1025 bp, Homo sapiens
  misc_feature (890)..(890): n is a, c, g, or t
  misc_feature (894)..(894): n is a, c, g, or t
  misc_feature (900)..(900): n is a, c, g, or t
  misc_feature (908)..(908): n is a, c, g, or t
  misc_feature (915)..(915): n is a, c, g, or t
  misc_feature (918)..(919): n is a, c, g, or t
gaattctttcttcagcccatgtaaacatgaaaataagggttaaaaatgacttcattatggggaaaagggacaggatgcaaattgttcaaattcgtttgtgggtcgggtggccgctgctccggcctccggggccttgcggagactcaccccttcagcgtcgctgcccccagctcagctcttactgcgggccgctccgacggcggtccatcctgtcagggactatgcggcgcaaacatctccttcgccaaaagcaggcgccgccaccgggcgcatcgtggcggtcattggcgcagtggtggacgtccagtttgatgagggactaccaccaattctaaatgccctggaagtgcaaggcagggagaccagactggttttggaggtggcccagcatttgggtgagagcacagtaaggactattgctatggatggtacagaaggcttggttagaggccagaaagtactggattctggtgcaccaatcaaaattcctgttggtcctgagactttgggcagaatcatgaatgtcattggagaacctattgatgaaagaggtcccatcaaaaccaaacaatttgctcccattcatgctgaggctccagagttcatggaaatgagtgttgagcaggaaattctggtgactggtatcaaggttgtcgatctgctagctccctatgccaagggtggcaaaattgggctttttggtggtgctggagttggcaagactgtactgatcatggagttaatcaacaatgtcgccaaagcccatggtggttactctgtgtttgctggtgttggtgagaggacccgtgaaggcaatgatttataccatgaaatgattgaatctggtgttatcaacttaaaagatgccacctctaaggccggttatggcnatgnagaccnctgggccngcccggnacnnacggggcgggggaaactccacccgaggcgagcgggttgagacctctccagggggaggttaatggcgcacccgtggaccacccggggtgggaaaccccaggcctttg

SEQ ID NO: 100002 - DNA, 959 bp, Homo sapiens
gaattctttcttcagcccatgtaaacatgaaaataagggttaaaaatgacttcattatggggaaaagggacaggatgcaaattgttcaaattcgtttgtgggtcgggtggccgctgctccggcctccggggccttgcggagactcaccccttcagcgtcgctgcccccagctcagctcttactgcgggccgctccgacggcggtccatcctgtcagggactatgcggcgcaaacatctccttcgccaaaagcaggcgccgccaccgggcgcatcgtggcggtcattggcgcagtggtggacgtccagtttgatgagggactaccaccaattctaaatgccctggaagtgcaaggcagggagaccagactggttttggaggtggcccagcatttgggtgagagcacagtaaggactattgctatggatggtacagaaggcttggttagaggccagaaagtactggattctggtgcaccaatcaaaattcctgttggtcctgagactttgggcagaatcatgaatgtcattggagaacctattgatgaaagaggtcccatcaaaaccaaacaatttgctcccattcatgctgaggctccagagttcatggaaatgagtgttgagcaggaaattctggtgactggtatcaaggttgtcgatctgctagctccctatgccaagggtggcaaaattgggctttttggtggtgctggagttggcaagactgtactgatcatggagttaatcaacaatgtcgccaaagcccatggtggttactctgtgtttgctggtgttggtgagaggacccgtgaaggcaatgatttataccatgaaatgattgaatctggtgttatcaacttaaaagatgccacctctaagctcctaggatcgcggctttggtcaatgatgacccccggcgccctcccggtactccatggccagcggggggcaacccaacaaa

SEQ ID NO: 100003 - DNA, 938 bp, Homo sapiens
  misc_feature (938)..(938): n is a, c, g, or t
gaattctttcttcagcccatgtaaacatgaaaataagggttaaaaatgacttcattatggggaaaagggacaggatgcaaattgttcaaattcgtttgtgggtcgggtggccgctgctccggcctccggggccttgcggagactcaccccttcagcgtcgctgcccccagctcagctcttactgcgggccgctccgacggcggtccatcctgtcagggactatgcggcgcaaacatctccttcgccaaaagcaggcgccgccaccgggcgcatcgtggcggtcattggcgcagtggtggacgtccagtttgatgagggactaccaccaattctaaatgccctggaagtgcaaggcagggagaccagactggttttggaggtggcccagcatttgggtgagagcacagtaaggactattgctatggatggtacagaaggcttggttagaggccagaaagtactggattctggtgcaccaatcaaaattcctgttggtcctgagactttgggcagaatcatgaatgtcattggagaacctattgatgaaagaggtcccatcaaaaccaaacaatttgctcccattcatgctgaggctccagagttcatggaaatgagtgttgagcaggaaattctggtgactggtatcaaggttgtcgatctgctagctccctatgccaagggtggcaaaattgggctttttggtggtgctggagttggcaagactgtactgatcatggagttaatcaacaatgtcgccaaagcccatggtggttactctgtgtttgctggtgttggtgagaggacccgtgaaggcaatgatttataccatgaaatgattgaatctggtgttatcaacttaaaagatgccacctctaaggcggcaaccactccttcacctttgatgctggggctggcattggcctcaacgaccactttgn

SEQ ID NO: 100004 - DNA, 1736 bp, Homo sapiens
gaattctttcttcagcccatgtaaacatgaaaataagggttaaaaatgacttcattatggggaaaagggacaggatgcaaattgttcaaattcgtttgtgggtcgggtggccgctgctccggcctccggggccttgcggagactcaccccttcagcgtcgctgcccccagctcagctcttactgcgggccgctccgacggcggtccatcctgtcagggactatgcggcgcaaacatctccttcgccaaaagcaggcgccgccaccgggcgcatcgtggcggtcattggcgcagtggtggacgtccagtttgatgagggactaccaccaattctaaatgccctggaagtgcaaggcagggagaccagactggttttggaggtggcccagcatttgggtgagagcacagtaaggactattgctatggatggtacagaaggcttggttagaggccagaaagtactggattatgctaccactgtactgtcgcgtgccattgctgagctgggcatctatccagctgtggatcctctagactccacctctcgtatcatggatcccaacattgttggcagtgagcattacgatgttgcccgtggggtgcaaaagatcctgcagggtgagtatattactatgtgggatcagtgtccggaaagtcaaaaagagggcctgtggggactatatgaggactggatctttcttagtgatttgttttggagcaaggaaagttgaggctggcaattgctagtgagagctaatgaggtctcttgagtttccaggtacttaacgctttggaatgcaatatttttctttctttttttttttttttgagatgagtctcactgtgtctcccaagctggagtgcagtggtgccatctcggctcactgcaacctccgcctcccaggttcaagcgattctcctgcctcagcctcctgagtacctgggattacaggtgcgcgccaccatgcctggctacttttgtatttttagtagagaccaggtttcatcagttggtcaggctggtctcgatctcctgacctcatgatccacccaccgtggcctcccaaagtggtgggattacagacgtgagccactgcgcccggcggaatgcaatatttttctaacagcaccaaactaggactatggagaacaagacactgatctttcttggctgagggccctcataacaccaccaccttctctgccccctagcatgtaactttccctttgttagcttgtccaaattaagggagtgagaatacttaactcagtcttcttttttctcataggactacaaatccctccaggatatcattgccatcctgggtatggatgaactttctgaggaagacaagttgaccgtgtcccgtgcacggaaaatacagcgtttcttgtctcagccattccaggttgctgaggtcttcacaggtcatatggggaagctggtacccctgaaggagaccatcaaaggattccagcagattttggcaggtgaatatgaccatctcccagaacaggccttctatatggtgggacccattgaagaagctgtggcaaaagctgataagctggctgaagagcattcatcgtgaggggtctttgtcctctgtactgtctctctccttgcccctaacccaaaaagcttcatttttctgtgtaggctgcacaagagccttgattgaagatatattctttctgaacagtatttaaggtttccaataaaatgtacacccctca

SEQ ID NO: 100005 - DNA, 929 bp, Homo sapiens
gaattctttcttcagcccatgtaaacatgaaaataagggttaaaaatgacttcattatggggaaaagggacaggatgcaaattgttcaaattcgtttgtgggtcgggtggccgctgctccggcctccggggccttgcggagactcaccccttcagcgtcgctgcccccagctcagctcttactgcgggccgctccgacggcggtccatcctgtcagggactatgcggcgcaaacatctccttcgccaaaagcaggcgccgccaccgggcgcatcgtggcggtcattggcgcagtggtggacgtccagtttgatgagggactaccaccaattctaaatgccctggaagtgcaaggcagggagaccagactggttttggaggtggcccagcatttgggtgagagcacagtaaggactattgctatggatggtacagaaggcttggttagaggccagaaagtactggattctggtgcaccaatcaaaattcctgttggtcctgagactttgggcagaatcatgaatgtcattgtttctgaggaagacaagttgaccgtgtcccgtgcacggaaaatacagcgtttcttgtctcagccattccaggttgctgaggtcttcacaggtcatatggggaagctggtacccctgaaggagaccatcaaaggattccagcagattttggcaggtgaatatgaccatctcccagaacaggccttctatatggtgggacccattgaagaagctgtggcaaaagctgataagctggctgaagagcattcatcgtgaggggtctttgtcctctgtactgtctctctccttgcccctaacccaaaaagcttcatttttctgtgtaggctgcacaagagccttgattgaagatatattctttctgaacagtatttaaggtttccaataaaatgtacacccctca

SEQ ID NO: 100006 - DNA, 731 bp, Homo sapiens
gaattctttcttcagcccatgtaaacatgaaaataagggttaaaaatgacttcattatggggaaaagggacaggatgcaaattgttcaaattcgtttgtgggtcgggtggccgctgctccggcctccggggccttgcggagactcaccccttcagcgtcgctgcccccagctcagctcttactgcgggccgctccgacggcggtccatcctgtcagggactatgcggcgcaaacatctccttcgccaaaagcaggcgccgccaccgggcgcatcgtggcggtcattggcgcagtggtggacgtccagtttgatgagggactaccaccaattctaaatgccctggaagtgcaaggcagggagaccagactggttttggaggtggcccagcatttgggtgagagcacagtaaggactattgctatggatggtacagaaggcttggttagaggccagaaagtactggattctggtgcaccaatcaaaattcctgttggtcctgagactttgggcagaatcatgaatgtcattgccattgaagaagctgtggcaaaagctgataagctggctgaagagcattcatcgtgaggggtctttgtcctctgtactgtctctctccttgcccctaacccaaaaagcttcatttttctgtgtaggctgcacaagagccttgattgaagatatattctttctgaacagtatttaaggtttccaataaaatgtacacccctca

SEQ ID NO: 100007 - DNA, 396 bp, Homo sapiens
  misc_feature (5)..(5): n is a, c, g, or t
  misc_feature (126)..(130): n is a, c, g, or t
  misc_feature (139)..(139): n is a, c, g, or t
  misc_feature (149)..(149): n is a, c, g, or t
ttctncctcgccttttcggttttgggtttgcgttcacctcgctgttttgttttgtgctggcttggcttattgttctttgttgcgctttgctctttttcctgttttcggggttccttatcggctgcnnnnnttccagcangattttggcnggtgaatatgaccatctcccagaacaggccttctatatggtgggacccattgaagaagctgtggcaaaagctgataagctggctgaagagcattcatcgtgaggggtctttgtcctctgtactgtctctctccttgcccctaacccaaaaagcttcatttttctgtgtaggctgcacaagagccttgattgaagatatattctttctgaacagtatttaaggtttccaataaaatgtacacccctca

SEQ ID NO: 100008 - DNA, 239 bp, Homo sapiens
ctttcgttcttctgagtttgctgaagccagatgcaatttctgagaaggaataggatggaaggaagcaattactttttttgaagtttgcttatttaggaaagcagaactcttaaatattctttcttttcaacctcttatagggctttttggtggtgctggagttggcaagactgtactgatcatggagttaatcaacaatgtcgccaaagcccatggtggttactctgtgtttgctggtg

SEQ ID NO: 100009 - DNA, 413 bp, Homo sapiens
gctgtgcaggcgctttatcgatcgctgcgcggccttccctcttggacacgcgttccgtacaagcggaaagaggcctgacttcggctgagttttcctctccttgtgtgttaagtcctggcttccgatgacctttaactggcctgaccccagctccttccaatatcttttgtctgttagtcagggactatgcggcgcaaacatctccttcgccaaaagcaggcgccgccaccgggcgcatcgtggcggtcattggcgcagtggtggacgtccagtttgatgagggactaccaccaattctaaatgccctggaagtgcaaggcagggagaccagactggttttggaggtggcccagcatttgggtaagtagagtttgttaggaatagtaaagaccttgtgtagcccaaatatcccc

SEQ ID NO: 100010 - DNA, 981 bp, Homo sapiens
  misc_feature (2)..(2): n is a, c, g, or t
  misc_feature (17)..(17): n is a, c, g, or t
  misc_feature (846)..(846): n is a, c, g, or t
  misc_feature (850)..(850): n is a, c, g, or t
  misc_feature (856)..(856): n is a, c, g, or t
  misc_feature (864)..(864): n is a, c, g, or t
  misc_feature (871)..(871): n is a, c, g, or t
  misc_feature (874)..(875): n is a, c, g, or t
gnggggggggggaaacncaaaactaaggctaggtacgaggctgggtggtgtttgtgggtcgggtggccgctgctccggcctccggggccttgcggagactcaccccttcagcgtcgctgcccccagctcagctcttactgcgggccgctccgacggcggtccatcctgtcagggactatgcggcgcaaacatctccttcgccaaaagcaggcgccgccaccgggcgcatcgtggcggtcattggcgcagtggtggacgtccagtttgatgagggactaccaccaattctaaatgccctggaagtgcaaggcagggagaccagactggttttggaggtggcccagcatttgggtgagagcacagtaaggactattgctatggatggtacagaaggcttggttagaggccagaaagtactggattctggtgcaccaatcaaaattcctgttggtcctgagactttgggcagaatcatgaatgtcattggagaacctattgatgaaagaggtcccatcaaaaccaaacaatttgctcccattcatgctgaggctccagagttcatggaaatgagtgttgagcaggaaattctggtgactggtatcaaggttgtcgatctgctagctccctatgccaagggtggcaaaattgggctttttggtggtgctggagttggcaagactgtactgatcatggagttaatcaacaatgtcgccaaagcccatggtggttactctgtgtttgctggtgttggtgagaggacccgtgaaggcaatgatttataccatgaaatgattgaatctggtgttatcaacttaaaagatgccacctctaaggccggttatggcnatgnagaccnctgggccngcccggnacnnacggggcgggggaaactccacccgaggcgagcgggttgagacctctccagggggaggttaatggcgcacccgtggaccacccggggtgggaaaccccaggcctttg

SEQ ID NO: 100011 - DNA, 2274 bp, Homo sapiens
  misc_feature (2216)..(2216): n is a, c, g, or t
gaattctttcttcagcccatgtaaacatgaaaataagggttaaaaatgacttcattatggggaaaagggacaggatgcaaattgttcaaattcgtttgtgggtcgggtggccgctgctccggcctccggggccttgcggagactcaccccttcagcgtcgctgcccccagctcagctcttactgcgggccgctccgacggcggtccatcctgtcagggactatgcggcgcaaacatctccttcgccaaaagcaggcgccgccaccgggcgcatcgtggcggtcattggcgcagtggtggacgtccagtttgatgagggactaccaccaattctaaatgccctggaagtgcaaggcagggagaccagactggttttggaggtggcccagcatttgggtgagagcacagtaaggactattgctatggatggtacagaaggcttggttagaggccagaaagtactggattctggtgcaccaatcaaaattcctgttggtcctgagactttgggcagaatcatgaatgtcattggagaacctattgatgaaagaggtcccatcaaaaccaaacaatttgctcccattcatgctgaggctccagagttcatggaaatgagtgttgagcaggaaattctggtgactggtatcaaggttgtcgatctgctagctccctatgccaagggtggcaaaattgggctttttggtggtgctggagttggcaagactgtactgatcatggagttaatcaacaatgtcgccaaagcccatggtggttactctgtgtttgctggtgttggtgagaggacccgtgaaggcaatgatttataccatgaaatgattgaatctggtgttatcaacttaaaagatgccacctctaaggtagcgctggtatatggtcaaatgaatgaaccacctggtgctcgtgcccgggtagctctgactgggctgactgtggctgaatacttcagagaccaagaaggtcaagatgtactgctatttattgataacatctttcgcttcacccaggctggttcagaggtgtctgcattattgggccgaatcccttctgctgtgggctatcagcctaccctggccactgacatgggtactatgcaggaaagaattaccactaccaagaagggatctatcacctctgtacaggctatctatgtgcctgctgatgacttgactgaccctgcccctgctactacgtttgcccatttggatgctaccactgtactgtcgcgtgccattgctgagctgggcatctatccagctgtggatcctctagactccacctctcgtatcatggatcccaacattgttggcagtgagcattacgatgttgcccgtggggtgcaaaagatcctgcaggactacaaatccctccaggatatcattgccatcctgggtatggatgaactttctgaggaagacaagttgaccgtgtcccgtgcacggaaaatacagcgtttcttgtctcagccattccaggttgctgaggtcttcacaggtcatatggggaagctggtacccctgaaggagaccatcaaaggattccagcagattttggcaggtgaatatgaccatctcccagaacaggccttctatatggtgggacccattgaagaagctgtggcaaaagctgataagctggctgaagagcattcatcgtgaggggtctttgtcctctgtactgtctctctccttgcccctaacccaaaaagcttcatttttctgtgtaggctgcacaagagccttgattgaagatatattctttctgaacagtatttaaggtttccaataaaatgtacacccctcaaaaaaaaacaaaaaaagaaaacaaaaaaaaaaaaaaaaaaaaaaaaaaaaaaaaaaaaaaaaaaaaaaaaaaaaaaaaaaaaaaaaaaaaaaaaaaaaaaaaggggggggggggaaaaaaccccggggggggccatggccctttttaagggggcgccccctaatgaggagggagcgctttataataaagcgagcagcgagcagagcggcgcgcgcggttgtataaaacaacagaggtcgggggcgagaggggaaaccaccggtgcgcggcggggcgatgttctggggagggagagagacccccccacacctctgggggggcggggcgaacaatcatgtgggcaccaaccaccccccgaggaagaattaagacgctccgggggaaaatacaaacatngaggcgttgtcacatggggccgacacccccgggattatcgcgggggcagaaaaaatgc

SEQ ID NO: 100012 - DNA, 2233 bp, Homo sapiens
  misc_feature (2175)..(2175): n is a, c, g, or t
gaattctttcttcagcccatgtaaacatgaaaataagggttaaaaatgacttcattatggggaaaagggacaggatgcaaattgttcaaattcgtttgtgggtcgggtggccgctgctccggcctccggggccttgcggagactcaccccttcagcgtcgctgcccccagctcagctcttactgcgggccgctccgacggcggtccatcctgtcagggactatgcggcgcaaacatctccttcgccaaaagcaggcgccgccaccgggcgcatcgtggcggtcattggcgcagtggtggacgtccagtttgatgagggactaccaccaattctaaatgccctggaagtgcaaggcagggagaccagactggttttggaggtggcccagcatttgggtgagagcacagtaaggactattgctatggatggtacagaaggcttggttagaggccagaaagtactggattctggtgcaccaatcaaaattcctgttggtcctgagactttgggcagaatcatgaatgtcattggagaacctattgatgaaagaggtcccatcaaaaccaaacaatttgctcccattcatgctgaggctccagagttcatggaaatgagtgttgagcaggaaattctggtgactggtatcaaggttgtcgatctgctagctccctatgccaagggtggcaaaattgggctttttggtggtgctggagttggcaagactgtactgatcatggagttaatcaacaatgtcgccaaagcccatggtggttactctgtgtttgctggtgttggtgagaggacccgtgaaggcaatgatttataccatgaaatgattgaatctggtgttatcaacttaaaagatgccacctctaaggtagcgctggtatatggtcaaatgaatgaaccacctggtgctcgtgcccgggtagctctgactgggctgactgtggctgaatacttcagagaccaagaaggtcaagatgtactgctatttattgataacatctttcgcttcacccaggctggttcagaggtgtctgcattattgggccgaatcccttctgctgtgggctatcagcctaccctggccactgacatgggtactatgcaggaaagaattaccactaccaagaagggatctatcacctctgtacaggctatctatgtgcctgctgatgacttgactgaccctgcccctgctactacgtttgcccatttggatgctaccactgtactgtcgcgtgccattgctgagctgggcatctatccagctgtggatcctctagactccacctctcgtatcatggatcccaacattgttggcagtgagcattacgatgttgcccgtggggtgcaaaagatcctgcaggactacaaatccctccaggatatcattgccatcctgggtatggatgaactttctgaggaagacaagttgaccgtgtcccgtgcacggaaaatacagcgtttcttgtctcagccattccaggttgctgaggtcttcacaggtcatatggggaagctggtacccctgaaggagaccatcaaaggattccagcagattttggcaggtgaatatgaccatctcccagaacaggccttctatatggtgggacccattgaagaagctgtggcaaaagctgataagctggctgaagagcattcatcgtgaggggtctttgtcctctgtactgtctctctccttgcccctaacccaaaaagcttcatttttctgtgtaggctgcacaagagccttgattgaagatatattctttctgaacagtatttaaggtttccaataaaatgtacacccctcaaaaaaaaaaaaaaaaaaaaaaaaaaaaaaaaaaaaaaaaaaaaaaaaaaaaaaaaaaaaaaggggggggggggaaaaaaccccggggggggccatggccctttttaagggggcgccccctaatgaggagggagcgctttataataaagcgagcagcgagcagagcggcgcgcgcggttgtataaaacaacagaggtcgggggcgagaggggaaaccaccggtgcgcggcggggcgatgttctggggagggagagagacccccccacacctctgggggggcggggcgaacaatcatgtgggcaccaaccaccccccgaggaagaattaagacgctccgggggaaaatacaaacatngaggcgttgtcacatggggccgacacccccgggattatcgcgggggcagaaaaaatgc

SEQ ID NO: 100013 - DNA, 2187 bp, Homo sapiens
  misc_feature (2129)..(2129): n is a, c, g, or t
gaattctttcttcagcccatgtaaacatgaaaataagggttaaaaatgacttcattatggggaaaagggacaggatgcaaattgttcaaattcgtttgtgggtcgggtggccgctgctccggcctccggggccttgcggagactcaccccttcagcgtcgctgcccccagctcagctcttactgcgggccgctccgacggcggtccatcctgtcagggactatgcggcgcaaacatctccttcgccaaaagcaggcgccgccaccgggcgcatcgtggcggtcattggcgcagtggtggacgtccagtttgatgagggactaccaccaattctaaatgccctggaagtgcaaggcagggagaccagactggttttggaggtggcccagcatttgggtgagagcacagtaaggactattgctatggatggtacagaaggcttggttagaggccagaaagtactggattctggtgcaccaatcaaaattcctgttggtcctgagactttgggcagaatcatgaatgtcattggagaacctattgatgaaagaggtcccatcaaaaccaaacaatttgctcccattcatgctgaggctccagagttcatggaaatgagtgttgagcaggaaattctggtgactggtatcaaggttgtcgatctgctagctccctatgccaagggtggcaaaattgggctttttggtggtgctggagttggcaagactgtactgatcatggagttaatcaacaatgtcgccaaagcccatggtggttactctgtgtttgctggtgttggtgagaggacccgtgaaggcaatgatttataccatgaaatgattgaatctggtgttatcaacttaaaagatgccacctctaaggtagcgctggtatatggtcaaatgaatgaaccacctggtgctcgtgcccgggtagctctgactgggctgactgtggctgaatacttcagagaccaagaaggtcaagatgtactgctatttattgataacatctttcgcttcacccaggctggttcagaggtgtctgcattattgggccgaatcccttctgctgtgggctatcagcctaccctggccactgacatgggtactatgcaggaaagaattaccactaccaagaagggatctatcacctctgtacaggctatctatgtgcctgctgatgacttgactgaccctgcccctgctactacgtttgcccatttggatgctaccactgtactgtcgcgtgccattgctgagctgggcatctatccagctgtggatcctctagactccacctctcgtatcatggatcccaacattgttggcagtgagcattacgatgttgcccgtggggtgcaaaagatcctgcaggactacaaatccctccaggatatcattgccatcctgggtatggatgaactttctgaggaagacaagttgaccgtgtcccgtgcacggaaaatacagcgtttcttgtctcagccattccaggttgctgaggtcttcacaggtcatatggggaagctggtacccctgaaggagaccatcaaaggattccagcagattttggcaggtgaatatgaccatctcccagaacaggccttctatatggtgggacccattgaagaagctgtggcaaaagctgataagctggctgaagagcattcatcgtgaggggtctttgtcctctgtactgtctctctccttgcccctaacccaaaaagcttcatttttctgtgtaggctgcacaagagccttgattgaagatatattctttctgaacagtatttaaggtttccaataaaatgtacacccctcaaaaaaaaaaaaaaaaggggggggggggaaaaaaccccggggggggccatggccctttttaagggggcgccccctaatgaggagggagcgctttataataaagcgagcagcgagcagagcggcgcgcgcggttgtataaaacaacagaggtcgggggcgagaggggaaaccaccggtgcgcggcggggcgatgttctggggagggagagagacccccccacacctctgggggggcggggcgaacaatcatgtgggcaccaaccaccccccgaggaagaattaagacgctccgggggaaaatacaaacatngaggcgttgtcacatggggccgacacccccgggattatcgcgggggcagaaaaaatgc

SEQ ID NO: 100014 - DNA, 2185 bp, Homo sapiens
gaattctttcttcagcccatgtaaacatgaaaataagggttaaaaatgacttcattatggggaaaagggacaggatgcaaattgttcaaattcgtttgtgggtcgggtggccgctgctccggcctccggggccttgcggagactcaccccttcagcgtcgctgcccccagctcagctcttactgcgggccgctccgacggcggtccatcctgtcagggactatgcggcgcaaacatctccttcgccaaaagcaggcgccgccaccgggcgcatcgtggcggtcattggcgcagtggtggacgtccagtttgatgagggactaccaccaattctaaatgccctggaagtgcaaggcagggagaccagactggttttggaggtggcccagcatttgggtgagagcacagtaaggactattgctatggatggtacagaaggcttggttagaggccagaaagtactggattctggtgcaccaatcaaaattcctgttggtcctgagactttgggcagaatcatgaatgtcattggagaacctattgatgaaagaggtcccatcaaaaccaaacaatttgctcccattcatgctgaggctccagagttcatggaaatgagtgttgagcaggaaattctggtgactggtatcaaggttgtcgatctgctagctccctatgccaagggtggcaaaattgggctttttggtggtgctggagttggcaagactgtactgatcatggagttaatcaacaatgtcgccaaagcccatggtggttactctgtgtttgctggtgttggtgagaggacccgtgaaggcaatgatttataccatgaaatgattgaatctggtgttatcaacttaaaagatgccacctctaaggtagcgctggtatatggtcaaatgaatgaaccacctggtgctcgtgcccgggtagctctgactgggctgactgtggctgaatacttcagagaccaagaaggtcaagatgtactgctatttattgataacatctttcgcttcacccaggctggttcagaggtgtctgcattattgggccgaatcccttctgctgtgggctatcagcctaccctggccactgacatgggtactatgcaggaaagaattaccactaccaagaagggatctatcacctctgtacaggctatctatgtgcctgctgatgacttgactgaccctgcccctgctactacgtttgcccatttggatgctaccactgtactgtcgcgtgccattgctgagctgggcatctatccagctgtggatcctctagactccacctctcgtatcatggatcccaacattgttggcagtgagcattacgatgttgcccgtggggtgcaaaagatcctgcaggactacaaatccctccaggatatcattgccatcctgggtatggatgaactttctgaggaagacaagttgaccgtgtcccgtgcacggaaaatacagcgtttcttgtctcagccattccaggttgctgaggtcttcacaggtcatatggggaagctggtacccctgaaggagaccatcaaaggattccagcagattttggcaggtgaatatgaccatctcccagaacaggccttctatatggtgggacccattgaagaagctgtggcaaaagctgataagctggctgaagagcattcatcgtgaggggtctttgtcctctgtactgtctctctccttgcccctaacccaaaaagcttcatttttctgtgtaggctgcacaagagccttgattgaagatatattctttctgaacagtatttaaggtttccaataaaatgtacacccctcagaaaaaacagagaagagaagacacacaaaacaagaaaaaaaagaaagaaataatagataaataaaacaaaacaagtaaaagaagaataacaaagaggaacaagaaataaaggaggagaacagaagagacaagtatcaaccccgaaggaaggcagagatcaaagaaatagggcagggagagcgactccaacgacataggaagggaacaaaggggggagtacaggtagagaaaacgaagaaagagctcaacataacagcaaaggatccaacagcaagggggaagcagggcaaatcatcgaaaacatgcatacagaggaaataacgaacgacaggagcaatcaaggcgcaaacaaagacagaagagaa

SEQ ID NO: 100015 - DNA, 1839 bp, Homo sapiens
gaattctttcttcagcccatgtaaacatgaaaataagggttaaaaatgacttcattatggggaaaagggacaggatgcaaattgttcaaattcgtttgtgggtcgggtggccgctgctccggcctccggggccttgcggagactcaccccttcagcgtcgctgcccccagctcagctcttactgcgggccgctccgacggcggtccatcctgtcagggactatgcggcgcaaacatctccttcgccaaaagcaggcgccgccaccgggcgcatcgtggcggtcattggcgcagtggtggacgtccagtttgatgagggactaccaccaattctaaatgccctggaagtgcaaggcagggagaccagactggttttggaggtggcccagcatttgggtgagagcacagtaaggactattgctatggatggtacagaaggcttggttagaggccagaaagtactggattctggtgcaccaatcaaaattcctgttggtcctgagactttgggcagaatcatgaatgtcattggagaacctattgatgaaagaggtcccatcaaaaccaaacaatttgctcccattcatgctgaggctccagagttcatggaaatgagtgttgagcaggaaattctggtgactggtatcaaggttgtcgatctgctagctccctatgccaagggtggcaaaattgggctttttggtggtgctggagttggcaagactgtactgatcatggagttaatcaacaatgtcgccaaagcccatggtggttactctgtgtttgctggtgttggtgagaggacccgtgaaggcaatgatttataccatgaaatgattgaatctggtgttatcaacttaaaagatgccacctctaaggtagcgctggtatatggtcaaatgaatgaaccacctggtgctcgtgcccgggtagctctgactgggctgactgtggctgaatacttcagagaccaagaaggtcaagatgtactgctatttattgataacatctttcgcttcacccaggctggttcagaggtgtctgcattattgggccgaatcccttctgctgtgggctatcagcctaccctggccactgacatgggtactatgcaggaaagaattaccactaccaagaagggatctatcacctctgtacaggctatctatgtgcctgctgatgacttgactgaccctgcccctgctactacgtttgcccatttggatgctaccactgtactgtcgcgtgccattgctgagctgggcatctatccagctgtggatcctctagactccacctctcgtatcatggatcccaacattgttggcagtgagcattacgatgttgcccgtggggtgcaaaagatcctgcaggactacaaatccctccaggatatcattgccatcctgggtatggatgaactttctgaggaagacaagttgaccgtgtcccgtgcacggaaaatacagcgtttcttgtctcagccattccaggttgctgaggtcttcacaggtcatatggggaagctggtacccctgaaggagaccatcaaaggattccagcagattttggcaggtgaatatgaccatctcccagaacaggccttctatatggtgggacccattgaagaagctgtggcaaaagctgataagctggctgaagagcattcatcgtgaggggtctttgtcctctgtactgtctctctccttgcccctaacccaaaaagcttcatttttctgtgtaggctgcacaagagccttgattgaagatatattctttctgaacacaccaggagttaagttccaatatatgcctgtcggggtgcgtgtctgttggtggt

SEQ ID NO: 100016 - DNA, 2371 bp, Homo sapiens
  misc_feature (1640)..(1643): n is a, c, g, or t
  misc_feature (1646)..(1646): n is a, c, g, or t
  misc_feature (1648)..(1649): n is a, c, g, or t
  misc_feature (1652)..(1653): n is a, c, g, or t
  misc_feature (1656)..(1656): n is a, c, g, or t
  misc_feature (1665)..(1665): n is a, c, g, or t
  misc_feature (1668)..(1669): n is a, c, g, or t
  misc_feature (1671)..(1671): n is a, c, g, or t
  misc_feature (1698)..(1698): n is a, c, g, or t
  misc_feature (1702)..(1702): n is a, c, g, or t
  misc_feature (1718)..(1719): n is a, c, g, or t
  misc_feature (1721)..(1721): n is a, c, g, or t
  misc_feature (1723)..(1723): n is a, c, g, or t
  misc_feature (1728)..(1728): n is a, c, g, or t
gaattctttcttcagcccatgtaaacatgaaaataagggttaaaaatgacttcattatggggaaaagggacaggatgcaaattgttcaaattcgtttgtgggtcgggtggccgctgctccggcctccggggccttgcggagactcaccccttcagcgtcgctgcccccagctcagctcttactgcgggccgctccgacggcggtccatcctgtcagggactatgcggcgcaaacatctccttcgccaaaagcaggcgccgccaccgggcgcatcgtggcggtcattggcgcagtggtggacgtccagtttgatgagggactaccaccaattctaaatgccctggaagtgcaaggcagggagaccagactggttttggaggtggcccagcatttgggtgagagcacagtaaggactattgctatggatggtacagaaggcttggttagaggccagaaagtactggattctggtgcaccaatcaaaattcctgttggtcctgagactttgggcagaatcatgaatgtcattggagaacctattgatgaaagaggtcccatcaaaaccaaacaatttgctcccattcatgctgaggctccagagttcatggaaatgagtgttgagcaggaaattctggtgactggtatcaaggttgtcgatctgctagctccctatgccaagggtggcaaaattgggctttttggtggtgctggagttggcaagactgtactgatcatggagttaatcaacaatgtcgccaaagcccatggtggttactctgtgtttgctggtgttggtgagaggacccgtgaaggcaatgatttataccatgaaatgattgaatctggtgttatcaacttaaaagatgccacctctaaggtagcgctggtatatggtcaaatgaatgaaccacctggtgctcgtgcccgggtagctctgactgggctgactgtggctgaatacttcagagaccaagaaggtcaagatgtactgctatttattgataacatctttcgcttcacccaggctggttcagaggtgtctgcattattgggccgaatcccttctgctgtgggctatcagcctaccctggccactgacatgggtactatgcaggaaagaattaccactaccaagaagggatctatcacctctgtacaggctatctatgtgcctgctgatgacttgactgaccctgcccctgctactacgtttgcccatttggatgctaccactgtactgtcgcgtgccattgctgagctgggcatctatccagctgtggatcctctagactccacctctcgtatcatggatcccaacattgttggcagtgagcattacgatgttgcccgtggggtgcaaaagatcctgcaggactacaaatccctccaggatatcattgccatcctgggtatggatgaactttctgaggaagacaagttgaccgtgtcccgtgcacggaaaatacagcgtttcttgtctcagccattccaggttgctgaggtcttcacaggtcatatggggaagctggtacccctgaaggagaccatcaaaggattccagcagattttggcaggtgaatatgaccatctcccagaacaggccttctatatggtgggacccattgaagaagctgtggacnnnngantnnatnngantaggaatanacnncngcttgctgtattcatttttgttttagnagtntcgttaatatgtggtnngnangtaanccaaaaagcttcatttttctgtgtaggctgcacaagagccttgattgaagatatattctttctgaacagtatttaaggtttccaataaaatgtacacccctcaaaaaaaaacaaaaaaagaaaacaaaaaaaaaaaaaaaaaaagaaaaaagaagaggggggggggggggaagagaggaggttcccgggggggggccaagtgatagcgcgcgcgagaaccacgggattactgtgtggaacacaggggggcccaaaggagggggcgagcagaaataatacaacaaggcggaggggcgcgaggatcaaaaaaggagagagaagaacgggaacacacaccggcaacaaacggggagaaacataggggcaaaagagaccccctaaccgccggggggggagacacaaagtggggcacacaaataccccacgcagaatatttacagaggccccaaggagagggaatatttaataaaatgtatagaaagagagagtgatcagatgggggtgtgtgtaacaaacagataggtgacaaattataagtggtgaggtgtgtagagaaaaagtttctggagcaaacagaggagagattgatgagttgatggcgagaaatttattacagcgaggagctatatgatgatagatgtaa

SEQ ID NO: 100017 - DNA, 2492 bp, Homo sapiens
gaattctttcttcagcccatgtaaacatgaaaataagggttaaaaatgacttcattatggggaaaagggacaggatgcaaattgttcaaattcgtttgtgggtcgggtggccgctgctccggcctccggggccttgcggagactcaccccttcagcgtcgctgcccccagctcagctcttactgcgggccgctccgacggcggtccatcctgtcagggactatgcggcgcaaacatctccttcgccaaaagcaggcgccgccaccgggcgcatcgtggcggtcattggcgcagtggtggacgtccagtttgatgagggactaccaccaattctaaatgccctggaagtgcaaggcagggagaccagactggttttggaggtggcccagcatttgggtgagagcacagtaaggactattgctatggatggtacagaaggcttggttagaggccagaaagtactggattctggtgcaccaatcaaaattcctgttggtcctgagactttgggcagaatcatgaatgtcattggagaacctattgatgaaagaggtcccatcaaaaccaaacaatttgctcccattcatgctgaggctccagagttcatggaaatgagtgttgagcaggaaattctggtgactggtatcaaggttgtcgatctgctagctccctatgccaagggtggcaaaattgggctttttggtggtgctggagttggcaagactgtactgatcatggagttaatcaacaatgtcgccaaagcccatggtggttactctgtgtttgctggtgttggtgagaggacccgtgaaggcaatgatttataccatgaaatgattgaatctggtgttatcaacttaaaagatgccacctctaaggtagcgctggtatatggtcaaatgaatgaaccacctggtgctcgtgcccgggtagctctgactgggctgactgtggctgaatacttcagagaccaagaaggtcaagatgtactgctatttattgataacatctttcgcttcacccaggctggttcagaggtgtctgcattattgggccgaatcccttctgctgtgggctatcagcctaccctggccactgacatgggtactatgcaggaaagaattaccactaccaagaagggatctatcacctctgtacaggctatctatgtgcctgctgatgacttgactgaccctgcccctgctactacgtttgcccatttggatgctaccactgtactgtcgcgtgccattgctgagctgggcatctatccagctgtggatcctctagactccacctctcgtatcatggatcccaacattgttggcagtgagcattacgatgttgcccgtggggtgcaaaagatcctgcagggtgagtatattactatgtgggatcagtgtccggaaagtcaaaaagagggcctgtggggactatatgaggactggatctttcttagtgatttgttttggagcaaggaaagttgaggctggcaattgctagtgagagctaatgaggtctcttgagtttccaggtacttaacgctttggaatgcaatatttttctttctttttttttttttttgagatgagtctcactgtgtctcccaagctggagtgcagtggtgccatctcggctcactgcaacctccgcctcccaggttcaagcgattctcctgcctcagcctcctgagtacctgggattacaggtgcgcgccaccatgcctggctacttttgtatttttagtagagaccaggtttcatcagttggtcaggctggtctcgatctcctgacctcatgatccacccaccgtggcctcccaaagtggtgggattacagacgtgagccactgcgcccggcggaatgcaatatttttctaacagcaccaaactaggactatggagaacaagacactgatctttcttggctgagggccctcataacaccaccaccttctctgccccctagcatgtaactttccctttgttagcttgtccaaattaagggagtgagaatacttaactcagtcttcttttttctcataggactacaaatccctccaggatatcattgccatcctgggtatggatgaactttctgaggaagacaagttgaccgtgtcccgtgcacggaaaatacagcgtttcttgtctcagccattccaggttgctgaggtcttcacaggtcatatggggaagctggtacccctgaaggagaccatcaaaggattccagcagattttggcaggtgaatatgaccatctcccagaacaggccttctatatggtgggacccattgaagaagctgtggcaaaagctgataagctggctgaagagcattcatcgtgaggggtctttgtcctctgtactgtctctctccttgcccctaacccaaaaagcttcatttttctgtgtaggctgcacaagagccttgattgaagatatattctttctgaacagtatttaaggtttccaataaaatgtacacccctca

SEQ ID NO: 100018 - DNA, 2393 bp, Homo sapiens
gaattctttcttcagcccatgtaaacatgaaaataagggttaaaaatgacttcattatggggaaaagggacaggatgcaaattgttcaaattcgtttgtgggtcgggtggccgctgctccggcctccggggccttgcggagactcaccccttcagcgtcgctgcccccagctcagctcttactgcgggccgctccgacggcggtccatcctgtcagggactatgcggcgcaaacatctccttcgccaaaagcaggcgccgccaccgggcgcatcgtggcggtcattggcgcagtggtggacgtccagtttgatgagggactaccaccaattctaaatgccctggaagtgcaaggcagggagaccagactggttttggaggtggcccagcatttgggtgagagcacagtaaggactattgctatggatggtacagaaggcttggttagaggccagaaagtactggattctggtgcaccaatcaaaattcctgttggtcctgagactttgggcagaatcatgaatgtcattggagaacctattgatgaaagaggtcccatcaaaaccaaacaatttgctcccattcatgctgaggctccagagttcatggaaatgagtgttgagcaggaaattctggtgactggtatcaaggttgtcgatctgctagctccctatgccaagggtggcaaaattgggctttttggtggtgctggagttggcaagactgtactgatcatggagttaatcaacaatgtcgccaaagcccatggtggttactctgtgtttgctggtgttggtgagaggacccgtgaaggcaatgatttataccatgaaatgattgaatctggtgttatcaacttaaaagatgccacctctaagaggtaagcattgagctaattgatgtccacgtggtagttacgccaggaaactattgccaactgaagccatgttctatattttctatttaatttttttttctttttaagaaaatgttaatattttcattttcgtgtcccagggcctacaaaggaaacctgttagtgttttcccccccaacttccaatacacaaatggacattttctttcctctttgatactgacattaaataacatttccaggttttctttttggtagatagtcccatcatttgaaagctaattttgggagggctggattggacgtggtacatatgtttcagttaagcctattttgtacttttcacttaacttgaataggtttttatttcctttctactatagttttgccttactaatataagaagctgtcttttttttttgaactgcatctctaatagggaaaagaaacttgcacacaaaaacgctgacaccttctgagaaaggatctgtggtcgtttctccgatttgggaaccttcagtatgtggcttctctactcctttgtcaggttttacgattatgtatgattactgcaggtagcgctggtatatggtcaaatgaatgaaccacctggtgctcgtgcccgggtagctctgactgggctgactgtggctgaatacttcagagaccaagaaggtcaagatgtactgctatttattgataacatctttcgcttcacccaggctggttcagaggtgtctgcattattgggccgaatcccttctgctgtgggctatcagcctaccctggccactgacatgggtactatgcaggaaagaattaccactaccaagaagggatctatcacctctgtacaggctatctatgtgcctgctgatgacttgactgaccctgcccctgctactacgtttgcccatttggatgctaccactgtactgtcgcgtgccattgctgagctgggcatctatccagctgtggatcctctagactccacctctcgtatcatggatcccaacattgttggcagtgagcattacgatgttgcccgtggggtgcaaaagatcctgcaggactacaaatccctccaggatatcattgccatcctgggtatggatgaactttctgaggaagacaagttgaccgtgtcccgtgcacggaaaatacagcgtttcttgtctcagccattccaggttgctgaggtcttcacaggtcatatggggaagctggtacccctgaaggagaccatcaaaggattccagcagattttggcaggtgaatatgaccatctcccagaacaggccttctatatggtgggacccattgaagaagctgtggcaaaagctgataagctggctgaagagcattcatcgtgaggggtctttgtcctctgtactgtctctctccttgcccctaacccaaaaagcttcatttttctgtgtaggctgcacaagagccttgattgaagatatattctttctgaacagtatttaaggtttccaataaaatgtacacccctca

SEQ ID NO: 100019 - DNA, 1607 bp, Homo sapiens
gaattctttcttcagcccatgtaaacatgaaaataagggttaaaaatgacttcattatggggaaaagggacaggatgcaaattgttcaaattcgtttgtgggtcgggtggccgctgctccggcctccggggccttgcggagactcaccccttcagcgtcgctgcccccagctcagctcttactgcgggccgctccgacggcggtccatcctgtcagggactatgcggcgcaaacatctccttcgccaaaagcaggcgccgccaccgggcgcatcgtggcggtcattggcgcagtggtggacgtccagtttgatgagggactaccaccaattctaaatgccctggaagtgcaaggcagggagaccagactggttttggaggtggcccagcatttgggtgagagcacagtaaggactattgctatggatggtacagaaggcttggttagaggccagaaagtactggattctggtgcaccaatcaaaattcctgttggtcctgagactttgggcagaatcatgaatgtcattggagaacctattgatgaaagaggtcccatcaaaaccaaacaatttgctcccattcatgctgaggctccagagttcatggaaatgagtgttgagcaggaaattctggtgactggtatcaaggttgtcgatctgctagctccctatgccaagggtggcaaaattgggctttttggtggtgctggagttggcaagactgtactgatcatggagttaatcaacaatgtcgccaaagcccatggtggttactctgtgtttgctggtgttggtgagaggacccgtgaaggcaatgatttataccatgaaatgattgaatctggtgttatcaacttaaaagatgccacctctaaggtagcgctggtatatggtcaaatgaatgaaccacctggtgctcgtgcccgggtagctctgactgggctgactgtggctgaatacttcagagaccaagaaggtcaagatgtactgctatttattgataacatctttcgcttcacccaggctggttcagaggtgtctgcattattgggccgaatcccttctgctgtgggctatcagcctaccctggccactgacatgggtactatgcaggaaagaattaccactaccaagaagggatctatcacctctgtacaggactacaaatccctccaggatatcattgccatcctgggtatggatgaactttctgaggaagacaagttgaccgtgtcccgtgcacggaaaatacagcgtttcttgtctcagccattccaggttgctgaggtcttcacaggtcatatggggaagctggtacccctgaaggagaccatcaaaggattccagcagattttggcaggtgaatatgaccatctcccagaacaggccttctatatggtgggacccattgaagaagctgtggcaaaagctgataagctggctgaagagcattcatcgtgaggggtctttgtcctctgtactgtctctctccttgcccctaacccaaaaagcttcatttttctgtgtaggctgcacaagagccttgattgaagatatattctttctgaacagtatttaaggtttccaataaaatgtacacccctca

SEQ ID NO: 100020 - DNA, 1666 bp, Homo sapiens
gaattctttcttcagcccatgtaaacatgaaaataagggttaaaaatgacttcattatggggaaaagggacaggatgcaaattgttcaaattcgtttgtgggtcgggtggccgctgctccggcctccggggccttgcggagactcaccccttcagcgtcgctgcccccagctcagctcttactgcgggccgctccgacggcggtccatcctgtcagggactatgcggcgcaaacatctccttcgccaaaagcaggcgccgccaccgggcgcatcgtggcggtcattggcgcagtggtggacgtccagtttgatgagggactaccaccaattctaaatgccctggaagtgcaaggcagggagaccagactggttttggaggtggcccagcatttgggtgagagcacagtaaggactattgctatggatggtacagaaggcttggttagaggccagaaagtactggattctggtgcaccaatcaaaattcctgttggtcctgagactttgggcagaatcatgaatgtcattggagaacctattgatgaaagaggtcccatcaaaaccaaacaatttgctcccattcatgctgaggctccagagttcatggaaatgagtgttgagcaggaaattctggtgactggtatcaaggttgtcgatctgctagctccctatgccaagggtggcaaaattgggctttttggtggtgctggagttggcaagactgtactgatcatggagttaatcaacaatgtcgccaaagcccatggtggttactctgtgtttgctggtgttggtgagaggacccgtgaaggcaatgatttataccatgaaatgattgaatctggtgttatcaacttaaaagatgccacctctaaggtagcgctggtatatggtcaaatgaatgaaccacctggtgctcgtgcccgggtagctctgactgggctgactgtggctgaatacttcagagaccaagaaggtcaagatgtactgctatttattgataacatctttcgcttcacccaggctggttcagaggtgtctgcattattgggccgaatcccttctgctgtgggctatcagcctaccctggccacattgctgagctgggcatctatccagctgtggatcctctagactccacctctcgtatcatggatcccaacattgttggcagtgagcattacgatgttgcccgtggggtgcaaaagatcctgcaggactacaaatccctccaggatatcattgccatcctgggtatggatgaactttctgaggaagacaagttgaccgtgtcccgtgcacggaaaatacagcgtttcttgtctcagccattccaggttgctgaggtcttcacaggtcatatggggaagctggtacccctgaaggagaccatcaaaggattccagcagattttggcaggtgaatatgaccatctcccagaacaggccttctatatggtgggacccattgaagaagctgtggcaaaagctgataagctggctgaagagcattcatcgtgaggggtctttgtcctctgtactgtctctctccttgcccctaacccaaaaagcttcatttttctgtgtaggctgcacaagagccttgattgaagatatattctttctgaacagtatttaaggtttccaataaaatgtacacccctca

SEQ ID NO: 100021 - DNA, 609 bp, Homo sapiens
acgaaggatttcccgtgccgtgggagcgggttcaggaccgctggtcggacctgagagtcccagctgtgggaagctcagctgtgtaatttgtagtaacgaagcagaagttacaacgaaaagacaagttttcctgtgcttggcagggcccccctcccccccaccaaggcctgcagtggatagagcctagcagatcctggacaatactatcctaaaagctacatctctgacagtgatttccagcgactttgtcaacacggtccgcccccagcaagtataagaggaaaaacaacaaatgtctttactgccttgtctttcccccttgccacttgtcattattcaagttttgtaagttcctgatttccattcagtgcagctgcaaggttaccagctgtgcttgcgttgcaagacctgtcacagtttgattaactgccttctttctgcttctgtaagccctcttgcctgccccgcgagtttcacaccatcaaattcctgctgcaccattcaaactagccaaccccctttcagaagtgtgtataaaagtcaagccccctgtctttcttcggggctcatgctaggcccgagtgcattcaataaaatccttctgttcca

SEQ ID NO: 100022 - DNA, 177 bp, Homo sapiens
tagtttttcttacaaaaacatttaccaaagctctttctttctcccaaaaaatcttaatgtaaaaaaaaccaattaggcaaagatccagtttctgacagtggcttctaaatgtctctaactttcctttaataatccattagacaaattgccaggaaaattctgtaaaagaagagcaat

SEQ ID NO: 100023 - DNA, 295 bp, Homo sapiens
gacacaaccttttgaactattgctgctgttttcattttaaaaaggaacttttaatactaaaattataggaagaacataatatctgacgtcacgtaaattcagatttgaaggaaatttactttttttccttatttgttcttattttttctcattttgttaagaaccagcgaacactttgaagaaagccaaaagtttacatctggagctggagggttctgtgactgcacaccaggcactctgccagccctacttctgcctgtagtcctgcaggtcacttgccagaggtggtactttc

SEQ ID NO: 100024 - DNA, 402 bp, Homo sapiens
ggcactggccagagaaactgagttggaacgtgctgcccccttttcctttgcagccagtacccttggctgagcatttggacagggtctttcctcagttcccacccccaccacacacacaggttcccacagagtgatgtcttcactttgggggcatgagttgaattcaggctgggctcaactgccccatctgggaaccaggtccttgttcagttgacttagtttgtccatgtgtgaatagagggtattagggatgcacaggagtctcctggagttcatctctccaaaccccaggcctttcccaaggaggtgagaggtgtgcctgccccgcgagcggtgcacgtggtccacactccaaggtcccaaacctcttggaatggaagtgatacctttgctcttagagat

SEQ ID NO: 100025 - DNA, 296 bp, Homo sapiens
agctgagagttactggcgatcatgtctgctgaaagaggatgatccacctggagaactctgtttggggccaacagccaggtcttgttaggaactaatgtcgttgatttggggacctatcaactggctccaagcagatgttctaggaacatgggagtaatgttggccccatgtactgagtgggaaggtgacttctgggagagacagaaccctgtaaaaatacaagtgctggcatgtcccagagaaatccagtggtgtcactttctatggatttgcctaaaatttaactcgaggagagg

SEQ ID NO: 100026 - DNA, 335 bp, Homo sapiens
ctgaggttgcctaggttgaatattgtcccctaaactcatgtccactcggaacctcatggaaacacaaactttgcagacgtgatcaagtgaagaggacatcatactgtacagaaagggatgtgcaattttgcccatgggactactctctggagaatccccaggaaaatctcacctgcagctgctggcatcctcctgaagactgtctcattgcaagccactggccactgaacgcagcactgtcctggtctctcctgactggcttgccaaattttgttcctggaccaacctgagggccgagctgctatttctcatggcccagtaacaagaagcagatg

SEQ ID NO: 100027 - DNA, 790 bp, Homo sapiens
tgtgatcttctgcttctggctcccccagcttcaaaggccctgatggtgccccttcccttttggcagcactgtcaggattgagtctctggggactgaggcctccagatacctctgtaccccttgaagctggccctagccacgcctccctaccacagggtctctggaagcttggtcggcagcttcagaagagggaacttggctggtggcctgtgcagcctggcacagaagccacctttgagaaagaggggtgcagagagactcctggcaggtcctcagtgggtggggtagttcctgttctttggaagccacgccggccttgcagcagagcttctgccaccctctccttgggttgtgctgtggtctggacagcaagcagtctctctgtggacagctctgacacatggtccctgcagaggaaaagttgggatctggttgcaaagagagcctagagtgttcttagagaaggacctcagaggagctcttaattagcagaagaaaccctaccacggtttcagggccttctaggattcagattaaagccactgatgacagttcacattttttgtggctccagttaatcaaatattcatcaagcacctatcatggtaaggttctattctggccacggtgaaggaattcaaagaagtatttacaaccattcattcaaccaacatatactgaggatctgctgtacacacaggcaccaagatgtggtccctaccctcagggagctgtttaggttggttggagggaaggaatgtgggtggtgcacagggcctgacacatagaa

SEQ ID NO: 100028 - DNA, 679 bp, Homo sapiens
agtcacagactccacataggccagcaggaaccagagcaaagcacccggagcctcagctgttaaaatgactggtactgggagctggaggtctcactggccgtgactgggtcgaacccagggtgcatctgatgagtgcaggcatggtagactcaggtgacccagaatcttttggttcagggaggtcacatagcccagtaagagccaatgagatgcagcaaaactgctggagatggaaggacaaagacactgaatctttcactctggaattgagcctgagatgtgaaggctggagctgctgcaaccattcctgaagcaagagctctgcatggactctgcctccctctttgtgaggtgggttttgagggagaggaataaaatatgaatgtgtcttcatcaacattttcacctggacatcgtcttctatccattacctctttcaatcccagcaccaacccaggaaagtgggcaaggctgtgtcccctgggagcagaacagagaattggaggaccagcactcgagagctgaacaagcctgcatggccatccatcatagttactaaagagattagactaactctctgtagctccagagggcaaaagaagaaccacttggtagaatccaccagaggcagttttgaattcgaagagaagaagcactttctaatggtcacacagctggc

SEQ ID NO: 100029 - DNA, 414 bp, Homo sapiens
ccggattctgtgcagacccctcttcgctggacacccctttcttggtactctgaggtgaggggtgctgtccacccagagcgcttctccccatagctacgaacgcatccttgattttatgtccttgacttccgtgcatgaggagggggactgcggagtccaccttacttctctctcccattattctcaccccgtctcctgtgaggcgttactgcgtttgttgccaccctcttctcctgtctgacaccttggagccaggatgcgagagctaggagatgaaatggagctcccccccaaccccttcttgtcttgggtggatgccccccatttttcatcctggatctgtatctcatggaagcgggggcactaccagtgccttattaacttggggggagtcagcttctccaccccaccctt

SEQ ID NO: 100030 - DNA, 296 bp, Homo sapiens
acccagcaatccctcttctgcatacatacccaaaggaaatggaatcaccgtcttgtaaagatatctatacttcagtgttcactgaagcattagtcacaatagccaagatattgaaacagcctaagtgtttgtcgatgaggaaattttgtgtataaatacacacacacacacacacacacattttgttcaaaagaataaaatcttgccatttgtcataccatggatatgtctgggacaaattatgctaagtgaataagctagacacagaaagaacaatattgcatgatttcactaat

SEQ ID NO: 100031 - DNA, 360 bp, Homo sapiens
ggagtctggggacccatgagggccagatggatgggctcagatggagtgggaggccattgggaagtggctggtaaaaagcctcatgagggcagagccccactgaccccacacagttacccatggtgtccctttccccacgtggtaattctggactgttcacagtggcttccaaggcctttgggatgggccttgctttctacccttctgctggaaaccctcccagccatttgaggtcctgccctctgctcaccttgttccctgtgcccatgacatctccccaccttttcctggctgctatgtactggtcctataggggttccttaaagggtgcatcttccaagccactcctgttgccctcct

SEQ ID NO: 100032 - DNA, 411 bp, Homo sapiens
gggcagataatgaggtggctggtgtgcagtgacaccgcagggacactgcaaaggtcagagctgagatgagctgccggctctgccatgtgcttactctgagccacctaacctcggcgtgcttcagtttactcatccgctcatctgcagaatgggtgatgctgtcggtacttcgtggcatacaggaaagtgcccagcatggtcagcctcagtgagaggtggccagtggggagtggtggccactgtacacctggcacagcccagagatgcatgtgccactctgttgtgtgcttcaaccaaggggcgctctggcagggcttgggtgggacttcccaaagggcatggaaaagttcccagtcaatgagatccatggagacccatgggagtgggggtcagccccagcctaagaggacc

SEQ ID NO: 100033 - DNA, 289 bp, Homo sapiens
agatgattcattgctgcatgtaagcgagtacaatcagctcaaatatttgtagtcgtcatgcaattgctgtaagaaaacaggggactgtgagccgcagatcgctcccctccccaccagcccctaccctgagccgaggtgtcaggttaaaatgacaggcagctgcctggttcatcctcttctgctttgctgacttagagccacacaaagatccatccccctggagaccagcagcttctgtcaagaagatatttttgtggagagggttatgcccccaacagcctagccagga

SEQ ID NO: 100034 - DNA, 474 bp, Homo sapiens
taccatacatgagtgtggagtagctggagtaaacatactttcaggagccagactttgtgggtttaaatcccagctttgccacttactgtgtgatcttagacaagttacttaacctctctgagccttgggttcatcatctataaaacagaactaataaaagtacctactttacaggattattatgagattaaatactgtatatgaaaagcacttaggccaggcgcggttgctcatgcctgtaatcctagcactttgggaggccgaggcaggtagatcattaagtcgggagttccagaccagactggccaagatggtgaaaccccgtctctactaaaaatacaaaaattagccaggcacggtggccggtgcctgtagtcccagctactcgggagactaaggcagagagttgcttgaacccgggaggcggaggttgctgtgaaccaagattgtactactgcacgccagcctgtctca

SEQ ID NO: 100035 - DNA, 351 bp, Homo sapiens
atcatagcttgcctgtatgttactagagtagttggagagtggaaaagtatctatattctaaagactgtttcatcatttgggtgaaaaaccaaaaaaagagagtaattttgtttaatagctctttcacaaataaaaaaaagaatgttcatctgtagagacctatcgagatctcatcaggtttacaacaaactttagattagcaagctcaatttcagttgacatggattgtggaaagattttcagtggagctcagatatttaatatcctgaatttggatgaatatacaatttctaaaattaagtacttcaactcctctgtggttttaaaaccagtagtggccatatcttgact

SEQ ID NO: 100036 - DNA, 220 bp, Homo sapiens
aaattgtattatattgatattctcagaaaacgtaaggcaagtgcatcagtcagagttctccagggaaacagaaccaataggatatatataccctatgttatatcaggagctttattttaaggaattggcttacaggattgtagaggctggcaggccggcaagtctgaaagccatagggcaggctgacaggttggaaagtcaggcacgagttgctgttact

SEQ ID NO: 100037 - DNA, 571 bp, Homo sapiens
ttttgcggtgccctttccatagctgagactggtttggttttagaaagatgtacatgatctcagagggggtccactgaaaaaagaaaaagaaagaaggatggagagcttgatgctcaccccctcggggagctgcctcactgggggcctgtccgctctgtgcaccttcccaaaccctcattctgtcctgctggcttgcgactctgatcaaccagcagactctggccgctcagcctcctgcatctctgaacccgccccgaacgtctgttcagtacccagatgacttgtgattgtttagtggtgattgacactgcgggatggagggaggaagaccaggcggagctggagggctgggagttcccaggttaccattgaactcactccagaaagagacaggagcaggaagggacgatatggaacagaagcagaatgctgggtgggaacttcaaggtgcttgtgtctgggaaggagacagggaaagaggaaggaggaagaacagtgagaaaccagaattcctttctcttagagatgaaatttaaaggcaggatctcagagccaggaggggacagactca

SEQ ID NO: 100038 - DNA, 227 bp, Homo sapiens
ccttggcttaaatgaaaagatcttgaggacagagaatgtggttcgttcatcccacgattcttagcattgataagagggaaaaaacatgttggaacaaatgaactaatgaataagtgatggactggaaaacagaggcagggtcctatgacgggaaaaggcctggaccagcaggacctgcccacaacctgtgcggtgagtgcccagtgttgtctcggcagcttccatct

SEQ ID NO: 100039 - DNA, 353 bp, Homo sapiens
gtaaatctgaggtcaaggatgtcccatgatggatgatgactgagatggacggaagtttggtttgaagcggtggcattggtgcaggctggcagagggggcagttctggatagagtgtcctgatgaatggggatacccatgggaggtgatgcagatgaggattctgtgcttctgaaggaggagccaggcatttagaatggcactggagagcaaggactgactgagccccttcactgtgtccccaagaggccaggaagggaagattggaggagacaaagttgaagtgagtgttccagggaacgagtcagttaagagatggtaggatcttaagggaagatggctaagatcttaaggg

SEQ ID NO: 100040 - DNA, 749 bp, Homo sapiens
gggtcacatgcttctccccttaatgacggaaacccatgcattctcacacagaaaccacggttttctactttcttcctgcccaaggagagagaagatagcctcaaaaacagacgtagtctctggaaaattgcctgattctctacataaagtgcatgggaaactcaagccatgagtagtgtttgactcaggaactttgagtgtgcaagggcaagcctcaaggccagctgcctatgaagaaataaagatagcctcctcccagtggtctaggtcttgtggtgtccacttgatggaccagccaagactgcctggaatccctactggacacaaacgttggtcatcctatgctggagatttgaagtggtaggtgggagtaccataaatcttcgaaaagtgtgtcagggattctaagttgttttagacaggatatgtcaggtgatgccgcagtaacaacctccaccccttccaaatcttagtgacttaccaaagccaattaatgcctgtttcttattctcgcaaagttcacggtgagtttgggtgactctccaggagagcttttccttgcacagcaaatcaacaatctggaaagcttcaaccttataatacacacatgcttccacagcagggaaatgaagaatggaggatggtgacctggctcttgatttctcctgcctgaagtgacacacatcccatctgcttacataatggtgtccaacttcaagtaatcctcccatattccctgaaggaggggc

SEQ ID NO: 100041 - DNA, 358 bp, Homo sapiens
agctactcgagaggctgaggcaagagaatcgcttgaacccgggagtgggaggctgcagtgagctgggacggagccattgcactccagcctgggcgacaggatgagactccgcctcaaaataatcaaaaattaaaaaataaaagcgcaagccagatgcccaccaccaccctgcctggaaaggacccagcgacctccaccgcccttaaaatctaaggagtctaacgcagccccttattctaagtcacgtgggctacagacaggggctacaccttccaactaagccgcggaaaagtgaacaacggggggcaggttgcaaataagcaaaaacctcaacgtctctggacagttttctgggcgc

SEQ ID NO: 100042 - DNA, 311 bp, Homo sapiens
tctcttgacaggttccctctcagagccctgccaccatgctgtgcaaatcccaagcctcaaggagaggccacatgatggtggctccagcaaataatccctgctgagcctttccttccgccaccccacccaggagccatcagggaaatggatgccccatccaccagccatgggagccgcttctggcagttgaagtcacttcagtggagggccaggcatcatggagcagagagaagctggacctgctgtgtcctgcctgaagtcctagcccacagagctcacaggcacaataaaatggttttggtaatgttgct

SEQ ID NO: 100043 - DNA, 395 bp, Homo sapiens
atggcctcgctgcttgcgagagaaagtggtccctccaagctgagtttggcatgatgacgggcatgagttggccaggtcacaagagcctgagtatctgtgtatagggagaaagccaggagaggtttgaaatggaggctgctggcatttcttcactgccctagtgcacctggagtcttccatgcaccacctctgatccttccagagagtccttcccatttaaccgagagggaaactgaggttcagataatttgcccaggactgcttggctagatggggcagagcctggattcagaagcaggctttctggctcctaaggctgagctttttctacaaaaaaatgttctcgtcgcgccactgcactccagcctgggcaacagattgagactccgactcaa

SEQ ID NO: 100044 - DNA, 743 bp, Homo sapiens
agggacagacggacccggcgggagaggaggaagccgggttgtgggcgcggagctgaggcggaggcggggccggggcgggaaggggcggccccagctgggtcgggcgaggctggctgcgggaaaccgagtgagccctcgcttttcctccggggtccgcgcgcgggaccctatttctggcctgtctcgcgcttcgcctgcgcggtggtctccacgctgggactgcggcgtcctcgcagaacagccagaactccacttcttcctgtccgggaggagttgtttaaaacatgcgtatctccaccttctgcttcttagaacagaactgactgaagccgtgttcttcccgccgagaccatgccgccccatcgaccctgctgcggccagagccacccagggcgggcccactcaccgcaggctcgggccacttggttccaaacctccactcccatccaggggcccggcacacccaccacactcccactctcagaggtctttgccgcctgcttcaggagaaaagagaaacttccactttccaccggcaaaactgcacacctgctccctccatcaccgagcccccccccccaccttctgtttttccagtatcgcagaatccgatccgttgctccctctggactggaatccgtatcctcggcatttcatcattccaagattctctactccacgtacccttgctgccaccctcttctactttccatcgctgaagttggtgaaagaggcgcctgccc

SEQ ID NO: 100045 - DNA, 524 bp, Homo sapiens
atgctatagagagacgactatcattgtgctacatgttttgttgtacgttactgttgagtttttattccagactttcttttgattatttttggtcctgagcaattttaaaaggcacatagtagaaactgctggttgcttagtatccaattacccaccttttctcctccttttttaccccttcttattgtatttaaggtggcagtgtttccagtgatacatttctcagtgttttctgcagttgggtgcaaccattgaaatataagcagaggggccgggcactgtggctcacgcctgtaatcccagcactttgggaggccgaggtgggaggatcatgaggtcaggagatcgagaccatcctggctaatgtggtgaaaccccatttctactaaaaatacaaaaaattagccgggcgtggtggcgggtgcctgtagtcccagctactcaggaggctgaggcaggagaatggcttgaacccatgaggtggagcttgcagtgagccgagatcacaccactgcactccagcc

SEQ ID NO: 100046 - DNA, 279 bp, Homo sapiens
cactgttatgtgaaaagtctgtgctgggtgctaggatacagtggtgaggaagatggacatagttccttcttcctcaaggaacagaggagactttttttattttttttgagacagagtctcgctctgttgcccatgctggagtacaatggtgcgatctcagctcactgcaacctctgcctcccaggagaatcgcttgaactggataggcagaggttgcagtgatccaagaacacaccattgcactccagcctgggcaacaagagtgaaacttcgtctcca

SEQ ID NO: 100047 - DNA, 539 bp, Homo sapiens
ataacagatacgtgactcagacaaaaatactttaatgtgtgatgttgaatctcttaagcgatcagcagctgggctgaacccagtgttttaaaaatgcaataagtaggacatggaactcttaataacctcaaaccttgcttgttagtgaggcaccaacatttcagggaagaaatcatgtttgagagcaggtgcatgataaatgttacaggcaccattgccactcactgatgaccaggagctggacagaaaggaaccaagctaagccttacttcccctggggtttcatgaaatgggagggagctgacaattgcctgagattgaattagctagataagacattgagccccttgctttgcaaaccagactgtttatattccatgtactctctctctgtttatttctcttttgttctttctcagtgtttggaagtgttagaagttccagtctgtctctgctgtattcacgggtgccagaggaaaggctttttgtctagggctttgcttgactgcattaaaggggaggaaggcaatgtggtggac

SEQ ID NO: 100048 - DNA, 462 bp, Homo sapiens
tatattgtccattggaatatacttttaaaaaaattacactaggtttggcctaatcagttcaaacccaaggcagttctctcctaggctcaggagagaaggttagtacgtagagaaagccctggattagggctgtccagaccaggaatactcatgttttaaggccacttctgtcctctttcttacagtgtgaccctggacaagtcattgcttttcttttacctcataattaaaacagtttggataaagtggtctccaaagtatcttctggttctaataatattttgtgaatacataattttctgtagcttgttcattcattcagcaaatatgcacagaggagaagttgtgtgccagcaactctaaggagactgaaagaaaaatcgaatatgtgccatgtgggaagtctcaggccactaagaaagatagacacatgcacagtgacaaatgagtgtgatcagtgct

SEQ ID NO: 100049 - DNA, 392 bp, Homo sapiens
gaaaacagatagaaaccaaggtgctcagcagtgtgaggccaggaagtaggaataataagaacagtcttatagcaaaaacagcatggtcaggcctgtgggtcaggatggatgacttccatgcatccctttcttgctcctcttacccataatttaaagtatcagcacgaagtgtcctgagggggccatcggtcacacacctgtaccctgtgaaggagccaccggggaccgcttggcgtttgttgtggagagctggcacctggattaatagccctacagagaaagtgcccagcaggggagagagaatccccttaaaaaagagcgggctgctattaagattacaggcgtgagcaattgcgcccggtttgaaatggtccctcttcacattctgtctc

SEQ ID NO: 100050 - DNA, 701 bp, Homo sapiens
gttctgctgaacccagaactgaggggatgtgactcttcttctgtcttggtgctgctcgtagaggacattgtgacatctcactgaaccttgcacttagttgatggggaattgtgacatatcacttggcccagtaccaagcaagtgtgactgttctattcatcataagtcctgctttcaagggagattgggacatattgtggggctcaacaccaatgtgacattactgttttgccttggcccagaccttaaaggcactgtgacgtattgctcggctcagcaacaaggtgacgagagatcctgtgtggacattgacaacagagagcattgtgacatatctttgggagcatcagctatttgatgtgactctccttttataccaaggctttgctcataggggagaccgtgatgtatcttctggcccagaaatcaggcgatgtgtttctcctgcctgagctttgctcacagggagcattgtgacatatcactgagcccagcacccaggtgatgggactctactgcctgtcccctgctttcaggaggaaattgtaacatatctctgaccaagcacccaggtgataagtcttctgcctggtgcctgttctcagggaagattgtgacatatccctggcccagcaaccagatgatgcagatgacgtatctctcctgctcactctctatccacaggtaagattatgacatat

SEQ ID NO: 100051 - DNA, 752 bp, Homo sapiens
agcggaactgaggttaagcaaaagcacggaatcatgaaaattattctttgaaatggcaaagatttctgtggctggatcatgggatttattgactggagcgatttctcctcagaagaccagacacatgcagcataaatactttttggagaaaaacactatgaggagcattgagaaagtcctcatttggaatacttagctggacttacctaaactgaactttcccttccttgacccagggcaacctctgccaagcccaccaccctccagctcctacgccatgaaagatcgaagaagataatcagaaaaaccacccaagaaaaggaaaagggagaatcagttacatatccagcaagccagaaaacaagaaaacccaaatctgttccagttctctagtttcaccttaaaggcaaagaactgtagatgcttgtgaggagctcttcaaagcctaaattcatagcctctctacgcgggaggttaccagcatctgaagaaaaacaaccactaccagaaaagctcttctttgttttcattcttcgcagtccttcaggaaactcttgataatgtgaaatgttattactgcaaatgttggctcaagcacgtttactctagagtctgactatcagtgacttgttcgcaaaataaaatcatttttaaagcctacaaggaaagccaagagcaaaccacaaatcagaaaaccaccaaggcgggctggcctcattgccagaatttaatgtgatctaatgcgaggacaa

SEQ ID NO: 100052 - DNA, 440 bp, Homo sapiens
aagattattagcaatttgagaatttcccgtgcatattggagatgagcaaatggaataagtgctcatgtgtagcgacaggattctctattttatttcaatacttaatattgtaccaaaccaagtaagaggagcatcatgagaaaatgtactaaaggacagtcattacctatatttacacctagaaaagaaaactatattattgataaactgataaatctattttatgtatttattattttgctctgtcatccaggctggagtgtactggtgcgatttccactcattgcaacctcttgctcccaggttcaagcaattctacctcagctcccagctactctggaggctgagacatgagaatggcataaacccgggaggcagagcttgcagtgagccaagatggtgccactgcactccagcctgggcgacagagctagactccg

SEQ ID NO: 100053 - DNA, 730 bp, Homo sapiens
gacagctccagggtttcctgaggaaggcaccatccaccttcatccacctcaggcgtgtcctgcagatccctctggagaaccagcttcaggttctgccaattttgatgctgcctaacgaaacccatgaagaagtaaatgatggggttggcactgctgttaagagacgacaggaaaatggaaggcagatgaacatgagaatataagacttcccagtccatgtggatcctggaaaacagggcccactgaatgccaatgggcaggccgcagaggaggaagaccagcactgtgagcagatggtcatgtacagcctggtcagcggcatcttctgggatccacagaggatcctgaccactaggaccaggctggacacacagagaaccacaaataaaaaaatcagccacgtaactgtgatgaatctgatgtttgacaccaaacagaatcagcatcactaaacagggagtcacagaacatccactccaggatgctctacagcagggacagggcccagagcaggacacacacgaccgttgacaggtgtgtggggtggcggcagcgttaccagatgggccacaggattgacaggcagcgcttggtgctcatggcactcagaatattcaggcctgccaagtagggaaaggtcatcacaggctagaggattagagagatgggatggacgttattgatgaggtgtaacagggatgtataatgtggctgctgaggaggaggaagt

SEQ ID NO: 100054 - DNA, 847 bp, Homo sapiens
gaggggcaatccaaacttataaactggatacattacagagcactgtcattttccatctcagccaatctggttcttattcactgactgtaattacaaatgtaggtgtatgaattagttggttaaaaactccaaagtgtgtgtgcacataagtgcattacatgtaaatactctgagtgcagaatacctaatttaaatgagtgacagggagcacaacatcattggaattgtcagggaaacagaaattaggtgttttacagccccgtctttgtctctggatactgcattcatgtattagaacccagaggagcttcaaaatatgtacagaattgagtgggatcttgggtgtaacctattaccatgagaaattggcaagaaggaaatcacttgttttctgcatgttcttatgtaaccttgaacaaactgttctgttaaaaaaaaaaaaagtctttttccttgcttaaaaaaaaaatcagcttagccttccagatattttcaatagctgcacttgttagtatgccatctttttttttttaaaaactgcctgtctttttttctccttacaacttcctaagttaagcctcaagtgagaatctcagcaaattgacttttagtaatattttaattattgagattattacggtgtggtccagtgtggtgaatcctatagtcgttttactcgtgtattctaatgtcaacaggattgtgctagtttagatgccctgtttgcgtctaatcattttatgtcgaaaatagatgggggagaggtcaaggacgtagtctgtgaaaacaatgtgaaccgggacctctgatcttcattcctgttccctttttctcccaacttatttgt

SEQ ID NO: 100055 - DNA, 807 bp, Homo sapiens
tctggatctttgttatcagaaaaaaaaatgtgtgtttgtgtgtgtttctctaatatgatcttcccaaaactcctatcttttaggaggttttcttagttggagccaatgggttaccactgttatctccatagcacgtattctcatgttttccctacattgcttcaggcgaacttgttaattatgttcacagtgctctcctggttctgtcgtgcaacttgttctgcttcttcctcagtgcctcctctacagggctctgcacacagtgggctgttaaatacaatagatgctttacatttgctggtatggagttcaggctcaattattcacaagtatttgacatgtcacaataaatagttttcctggacgtgaattttaattcacccagatgctaggtcttctcacaaagctaatgagtgacatagcccatagcccaggatctcagcttcacttggatactttttgtttgtttgttttgttttgagacaaggcctcactctgtcacccaggctgaagtgcagtggcacaaacacagctcactgcagcctcgacctcttgtgctcaagtgatcctcctgcctcggctttccatgtagcatggatcacaggtgcccaccaccatgcccagctaacttcttaaaaattattttgtagagatggggtctgccatgttgcccagactggtcttgaactcctgggctcaagtgattctcctgcctccagagtgctgggattacaggtgtgagccactgtgcccagccctatatatgtgttagttcttgagaggtgattaaaatttagtttctttttt

SEQ ID NO: 100056 - DNA, 238 bp, Homo sapiens
tcaatcaaaaagtttttagtagcttcagtaggtctgaaatttcagagtattgagcaaggcctacactgagctagagcatgatctaataagattggactgtcaaaacaagaagcaccagtctgtggtcaaaaggtttttaagaaggaaatgttaaagctctgctgtgagaaactcaagatcatgaaacatgtaagctggcaggctgtttctttctcatttctactatgatggggggacc

SEQ ID NO: 100057 - DNA, 429 bp, Homo sapiens
atttctgaagtcagtggatatatcatatattggacagttgaatcacttttatattagtttgctcaaaaacatttattaagctcattctccatgccaagcatcatgtttggtgctaagattacatctttgaacaaactgtcctcatattgttcaggaaaacccctaagtagataggcagccatatatggtagaagacaggaactgtgacaagaaatatatttttataaatcccacattgagagttcagctggcagtaaataggagtagggtggggtttgtgcaggttaaagtctataaaatgccatggcaagaggttgaattagagcctgattatgaagttaggaggcccaaaacacagtgggcacatattcacagatcttgttgaggaacagatggagggatcaactgtgttcactgccctttatttat

SEQ ID NO: 100058 - DNA, 3563 bp, Homo sapiens
gcagtttgttgccttctttgccaattccccttcccggcccctcctccaggtgcctttgtgtctcccggggtgccactgacagaacctcacctggggctcctcccatggcagtgccatgtggtccaaaattgccctttccttctccgttagtcacatttcccataactcctccgagccaacataacctacagtaagatgtgagtgtcagacgttctctccctggagtctgctttccaaaggaggcagggtgagtagatttcttgatccaaaggaatccgtttttaatttttttttttttctagagatgggggtctcactatgttgcccaggctggcctcgaactcctgagtttaagtgattctcccacctcagcctcctgagtagctgagaatccctttttagggtacaatttcaggcagtgtggcatggagtcagaagcaggctgtttctcctcaggggagggcaggcttctcaggacggcctcagctcatagccccacgtgtggtgtgcacggatgtgcagggagagcctgattgttaggtggatgtattttccagaatcggggagggactgaacacgagcatttcccattaatatgtgcaataaatgtcttggggaaggggctatttgaccctcattcccatagttttggcacttcaaatgaagctcttccttgtggtcaccatctctgctgtgggcacacagcttctttttcttggtttttttttttttttttttttttgagacaccgtctcgctctgtcacccaggctggagtacaatggtgtgacctcaactcactgtgacttccgcctcctgggttcaagtgattctcctgcctcagcctcctgagtagctgggattacaggcgtgcaccaccacgcctggcgaattttgtgtttttagtagacatgaggtttcaccgtgttggccaggctggtctggaactcctgatctcaagtgatccgcccgcctcagcctctcaaagtgctgggattacaggcgtgagccactgcgcctgcttggcacgtggcttctgaatggcctgagtgagggcagggcccaggcatggaggctcctgcacccccaaggctttttggctgtgctttatggcctctggcttatactcaacccaattttacaagcatgaacttagacttctctttagtatttatatatttaaaaaccaagtttaaattaactcaaacttgacagcaactaacctctgaaagaaactttaaagaaaattgaaatcttgagccacaaacatgttctttcctcactagctcctcccaggttttatcctgcacccagcttggatgagagacccactgtttcttgtgcctacttaacattagggttccccgtggcagcttcatcctgagcactgcctgtgagccctggttctgggacttggcagtcgcctccctggagcatctttccagagccagcattagaacctgagatccccagatgtttctgcccctcatccccatcctgtgaatagagagacagaaaaggtgcaggttcccattctgcatagattctgctgtttcctctccaccggtcccaggcagcttttcctttccatcactgccgcttagcaaaaatgtgcttcttttgaagaactggtcattttttttgagtgccctcttctcagttttgtttaaacttacactcagtagagtgttgggttgtctgctgacatggagtagaacctggattctggccaaataggccagaatcggaaaggtgaaggtgagtgtgatagtaggtaatctcctcaccccagcacaggccctgggagagaggcaaagcagtttgatgggatctggaggggagggaggtaccctggcccttggtctagcatcagtgagtcctgcccttccaagcccctggaggctagtggcattgcattgtgcccctttttgccacccttctctgatgtgattttgagcgaagaggagtcagtaagcccattgagaccggctgctcccaaagcccgaggactctagctgtgtggggaagggctagcattggtcaggactctgctgacagcactgagtaggcaggaatgtatttgagatttggaagtactgttaatttggtggagtcaggtgaatggataagaggcagatcggcagaaagcatcagtgtggtcccgaggctccctctgttttccttgccatggagtccccagcgccttgtgcctgtttccatttccctctctctttgaaaagtagaaatcagtggtttcttgactcctaaacagcctcctcactatagaaggagcctgagcaggtcagaagaactagaaaagtcctcagatacccccctctgtccagccccctttcccatacacagatatcaatggatgagcaggaaaagaggaggcctggactcactgaagtacttgaagaagcacaagtgtcatagatgtgccgccctttgccctgggtgttctagatcacacagaacacgtttcagctgggactaagaatcagactagccaggggttcttctgaacagctcaggccagacctctgggctcctctgggggccctgggacatgatgccttgcagtttccattccattgtccccaggcctcctgacctggtgacagagagtgccctgcagaagtgagtctatttttcccaattcctcttcatgaccagaaaatggcagctggccggttggggtcctgtgggaaagggctaacctgggctgttaggtagacactaggtttaaaggtagacagggagatggcatcatcagggcaggccaggcccacttcctgtgaccccagaccttggcaggcgggtcgtgctgaaaccaggcatctccctcacacctggggaaaggtttagggcaacatgttgcctcttcatcccattaaccctagaaatcttctggttagagtggccccttaccccaaatctggcctaggtctgaagactgcaggatagtcatgatgggcccatcctagagcctggctagctggaagacgcggtatggcagggacaggagggcggcaggaagggctttgtggccctgctggggccaaaggcagttttctgtgctccctttagccccagcctggctggccaggtctcctgtacttcaggggaccatggggccgcccaagccagtcaccttccccttccaagctctccccccatgactgttgatttctggcgcgtggaggcagagttgtgaatccacaaatgctgtagcccatatctcgtaatgtgtctgtgtccacttagagcctcacgacctggctgtgtgtgtgcatgtgtgtgtagtatagtttgtagttgacaatatgtgtatataatagctggtgtatttatatgtgagtgcagaattagtgcccgtggcggttttctgtattttaaacccattgaattggttagttttattttagggaagtgggaaaggcggagtggggggaagtataggaagaaggattcttagcaaaatcattctctaggactattagtcgcgatctcccagtgagccatcacgatgcccttttcaaataaatgttaatgttgtcacca

SEQ ID NO: 100059 - DNA, 3808 bp, Homo sapiens
gcagtttgttgccttctttgccaattccccttcccggcccctcctccaggtgcctttgtgtctcccggggtgccactgacagaacctcacctggggctcctcccatggcagtgccatgtggtccaaaattgccctttccttctccgttagtcacatttcccataactcctccgagccaacataacctacagtaagatgtgagtgtcagacgttctctccctggagtctgctttccaaaggaggcagggtgagtagatttcttgatccaaaggaatccgtttttaatttttttttttttctagagatgggggtctcactatgttgcccaggctggcctcgaactcctgagtttaagtgattctcccacctcagcctcctgagtagctgagaatccctttttagggtacaatttcaggcagtgtggcatggagtcagaagcaggctgtttctcctcaggggagggcaggcttctcaggacggcctcagctcatagccccacgtgtggtgtgcacggatgtgcagggagagcctgattgttaggtggatgtattttccagaatcggggagggactgaacacgagcatttcccattaatatgtgcaataaatgtcttggggaaggggctatttgaccctcattcccatagttttggcacttcaaatgaagctcttccttgtggtcaccatctctgctgtgggcacacagcttctttttcttggtttttttttttttttttttttttgagacaccgtctcgctctgtcacccaggctggagtacaatggtgtgacctcaactcactgtgacttccgcctcctgggttcaagtgattctcctgcctcagcctcctgagtagctgggattacaggcgtgcaccaccacgcctggcgaattttgtgtttttagtagacatgaggtttcaccgtgttggccaggctggtctggaactcctgatctcaagtgatccgcccgcctcagcctctcaaagtgctgggattacaggcgtgagccactgcgcctgcttggcacgtggcttctgaatggcctgagtgagggcagggcccaggcatggaggctcctgcacccccaaggctttttggctgtgctttatggcctctggcttatactcaacccaattttacaagcatgaacttagacttctctttagtatttatatatttaaaaaccaagtttaaattaactcaaacttgacagcaactaacctctgaaagaaactttaaagaaaattgaaatcttgagccacaaacatgttctttcctcactagctcctcccaggttttatcctgcacccagcttggatgagagacccactgtttcttgtgcctacttaacattagggttccccgtggcagcttcatcctgagcactgcctgtgagccctggttctgggacttggcagtcgcctccctggagcatctttccagagccagcattagaacctgagatccccagatgtttctgcccctcatccccatcctgtgaatagagagacagaaaaggtgcaggttcccattctgcatagattctgctgtttcctctccaccggtcccaggcagcttttcctttccatcactgccgcttagcaaaaatgtgcttcttttgaagaactggtcattttttttgagtgccctcttctcagttttgtttaaacttacactcagtagagtgttgggttgtctgctgacatggagtagaacctggattctggccaaataggccagaatcggaaaggtgaaggtgagtgtgatagtaggtaatctcctcaccccagcacaggccctgggagagaggcaaagcagtttgatgggatctggaggggagggaggtaccctggcccttggtctagcatcagtgagtcctgcccttccaagcccctggaggctagtggcattgcattgtgcccctttttgccacccttctctgatgtgattttgagcgaagaggagtcagtaagcccattgagaccggctgctcccaaagcccgaggactctagctgtgtggggaagggctagcattggtcaggactctgctgacagcactgagtaggcaggaatgtatttgagatttggaagtactgttaatttggtggagtcaggtgaatggataagaggcagatcggcagaaagcatcagtgtggtcccgaggctccctctgttttccttgccatggagtccccagcgccttgtgcctgtttccatttccctctctctttgaaaagtagaaatcagtggtttcttgactcctaaacagcctcctcactatagaaggagcctgagcaggtcagaagaactagaaaagtcctcagatacccccctctgtccagccccctttcccatacacagatatcaatggatgagcaggaaaagaggaggcctggactcactgaagtacttgaagaagcacaagtgtcatagatgtgccgccctttgccctgggtgttctagatcacacagaacacgtttcagctgggactaagaatcagactagccaggggttcttctgaacagctcaggccagacctctgggctcctctgggggccctgggacatgatgccttgcagtttccattccattgtccccaggcctcctgacctggtgacagagagtgccctgcagaagtgagtctatttttcccaattcctcttcatgaccagaaaatggcagctggccggttggggtcctgtgggaaagggctaacctgggctgttaggtagacactaggtttaaaggtagacagggagatggcatcatcagggcaggccaggcccacttcctgtgaccccagaccttggcaggcgggtcgtgctgaaaccaggcatctccctcacacctggggaaaggtttagggcaacatgttgcctcttcatcccattaaccctagaaatcttctggttagagtggccccttaccccaaatctggcctaggtctgaagactgcaggatagtcatgatgggcccatcctagagcctggctagctggaagacgcggtatggcagggacaggagggcggcaggaagggctttgtggccctgctggggccaaaggcagttttctgtgctccctttagccccagcctggctggccaggtctcctgtacttcaggggaccatggggccgcccaagccagtcaccttccccttccaagctctccccccatgactgttgatttctggcgcgtggaggcagagttgtgaatccacaaatgctgtagcccatatctcgtaatgtgtctgtgtccacttagagcctcacgacctggctgtgtgtgtgcatgtgtgtgtagtatagtttgtagttgacaatatgtgtatataatagctggtgtatttatatgtgagtgcagaattagtgcccgtggcggttttctgtattttaaacccattgaattggttagttttattttagggaagtgggaaaggcggagtggggggaagtataggaagaaggattcttagcaaaatcattctctaggactattagtcgcgatctcccagtgagccatcacgatgcccttttcaaataaatgttaatgttgtcaccaaaaaaaaaaagctccggattatttcagggccgaaacagggcatgaatggccagtgcctacgggttctgcacccgattttgttcaagggaactgcggccctatgaaagagaattgaacaggtcacatcatgattgcccgcttacaatatctgccatgcgtgcagagacaacttcctaagagcgagagacagcacttcgtctatgaccatcacatcaccaccagagctacagttgagacatatatga

SEQ ID NO: 100060 - DNA, 292 bp, Homo sapiens
tacgggaagccaccaccccaaaaaaataaagccagaacaagtaacacagggcttaataactgcacatatgaaaaagaccaagggatttggttgattacaacctagaaattcatgtggttggaggggtcatcctgctgctcagatgtgggtggctcagaacagccaatggctggtgctgtctgcctgtgagtggacatctgcagctcacattctaaacctgagactgacaagctggcgccagtgccaggtcacctgaggagcatgtaaagagacgctgggccttgagctatcc

SEQ ID NO: 100061 - DNA, 243 bp, Homo sapiens
gaatgttctctcttactacttcatattcaacccctgcctcttctccacaccctagtaaccacagttctaaattcttttgacacctaggtgactacctgttctagaacttactataaatacagtcatatattatgtactctattgtgttcttatgctattttatgaaattatgttttgttgtatatatggattatttgtttcttattaaaatgctgaatagtattcccttatatgaatccaatc

SEQ ID NO: 100062 - DNA, 283 bp, Homo sapiens
ccaggcccaggggcgcctttctcagcatcttcccgcggaggctggtgggggcgggatggggggaagaggacgaacgcctagcgcccagggtagggcctccaggggtagggtggccaggaggaggcggagagacttgaccttgggaggcctgacttactgaccgcaggggcagcggactgggaggggaacgtggcaagcccgggactgggccgggggcgaggctgggggcgtgtcttgggctggagagggggagatcggccctcggacttcctggtcgggcccc

SEQ ID NO: 100063 - DNA, 434 bp, Homo sapiens
agcgtctgagttattttgaaaccagtgcagtaatcaggtgtctgagccctttaggtcagctaattagtggcaaactttaaaaaagaaatgttttaagtattgaaatttgtctttctaacaaaatgttactcagaaatgcaacacataagacagaaaaagcagagccactctggttagactatggatggacaggagagaacagagtgccacagtgccatcctcacctctaggccatgcccgggagatcccaacagttctaaggacatagatgaaagccacctatgaggtccaacttcattatacactcgtggcaactcacaagatccagagatgagtggtgtggccacctgtttttcctgattactggaccgatgctcttctgcagtgccaggtcccttcccctcttccacactccccacacatctcataacaaa

SEQ ID NO: 100064 - DNA, 241 bp, Homo sapiens
gacggtaaatgcaagccaggatctgaaggtggtggcaggctgacctgggctctgtcccccaccgcgaagctctactacccccagcctggcactgtctctctccctcccctgactttcccacccccatcccccaagggcttcagagacttccagatcctctaatcctgtcccagaaagaaatgaaaaaaatatgtggtcttgcaacatttctttttttatactgtaagttctagggtacatg

SEQ ID NO: 100065 - DNA, 322 bp, Homo sapiens
gcatcctccttggcttagctctcaccctacttattctcttgttgcagaggttctcaactctggccacccattagagtcccctgggaagcattgaaaaatactgatccctggccaggtgtgatggctcacacttataatcccagcacttgagaggccgaggcgggtggattgcatgaggccaggagtttgagaccagcttggccaacatggtgaaaccccttctctactaaaactacaaaaattagccaggcatggtggcaggtgcctctaatcccagctactcaggaggctgaagaaggagaattgcttgaacccaggaggc

SEQ ID NO: 100066 - DNA, 337 bp, Homo sapiens
ttccttccccgctccatcaagatgactcctctgctactgttcatggcttcctacccaccccgaatacaaacttcaaactccttccttttgccacaaagcccctcacgaccttgcttgatgcgttctcctggttctctccgatcctgccccattgagtcacttccagtttttctaaaatggcttcaagctcccattcaccccatcaggaaaacgaaaggattttctctgtttgttttcttccctgctttaccccagtgtctacaacaatgccaggtacataataagttcgcaaacatgacaataaaaggcctctggatctttattattaatattattt

SEQ ID NO: 100067 - DNA, 200 bp, Homo sapiens
aagcatattaataagggataggtaacaagtgtacatattacagacaaagactagctaaaatatagactagttatataacgtgatcagaaacaaatgtactttcattgattatactacatttcaaacacatcagagcactatctcagagtaaggtggtgaaattttataaaagtatattcactaaatgaaaattcataaat

SEQ ID NO: 100068 - DNA, 253 bp, Homo sapiens
aaattagtgatgtgcactacataatttatattagaaagcatgcccccttgacttgtagtggtaataaggggcagataaaatattcccaagctcagcagcatgaaaaagcaatcaaaggaattcagctgaaaacgaaatccttagatacatcaaaagcatcccttcaggagaggtgagcttgctgtccagacagaacactctcaccagacttgcattatggtatttgagtgtattttgccctgtaattggatag

SEQ ID NO: 100069 - DNA, 651 bp, Homo sapiens
ctttcagcttttgcacttgcttcctacatcgctgagcaaattgaagcaatcaaatgagagcttccagaaactccactgcatctattagtctactcaatctgtgttcttatgatctttatccactggaaggtacaatcttaaggttaaaacctacattcctaaataaactcatctgtttttctccactcaaaggcctggccagaacttccaaaactatgttgaaaaagagccaatatagccaagatgatcctaagcaaaaagaacaaagctggaggcattatgctgtctgacttcaaattatactacaaggaagtcagggactctgaacggagggaccaactggagctgcagcagaggaacataaattgtgaagatttcatggacattcaccagtttccaaataatactcttataatttcttacacctgtcttaatttaatctcttaatcctgttatctttgtaagctgaggatgtacatcacctcaggaccactgtgataattgtgttaactgtacaaattgattgtaaaacatgtgtgtttgaacaatatgaaatcagttcaccttgaaaaagaacagaataacagcgattttcagggaacaagggaagacaaccataaggtctgactgcctgtgaggtcgggcaaaaca

SEQ ID NO: 100070 - DNA, 2754 bp, Homo sapiens
ctgtttgctaaaggcatgcgggctacagcattcaagagagggagtcgttaacaaagggaaagagataaatgtaaataagctcacatttacagaatgagcggtttgcagtaaaaagctgcggcagcccagagtctgctactttaggctgggctaacctttccctgtaaaaaaaaaaaaaaaaaaaaaaaaaaaaaaatggataaaaatatgcacttccaaagggcgagttgcccatttacatgtttattagctaattatctacaggcatcagcacattctctcatctagcacactctttcttggggaagacagatttctggaggagtgtgaaaatcaactctccttaatattaagcacccattggaggaaatctctaactacagtgcctccaggaaactcattggttattccagtcttagataaaattggtgccaggatttggttcgaactaatgtggaggaaaatatttcctaccggtccatagtgtcagagtggtgaacccctgcagccagcaggcctcctgaaaaaaaagtccatgggtgacagaagattcattgacttccaattccaagattcaaattcaagcctcagacccaggttgggcaatgctactgccaataatacttgcattgttgatgattccttcaagtataatctcaatggtgctgtctacagtgttgtattcatcttgggtctgataaccaacagtgtctctctgtttgtcttctgtttccgcatgaaaatgagaagtgagactgctatttttatcaccaatctagctgtctctgatttgctttttgtctgtacactaccttttaaaatattttacaacttcaaccgccactggccttttggtgacaccctctgcaagatctctggaactgcattccttaccaacatctatgggagcatgctctttctcacctgtattagtgtggatcgtttcctggccattgtctatccttttcgatctcgtactattaggactaggaggaattctgccattgtgtgtgctggtgtctggatcctagtcctcagtggcggtatttcagcctctttgttttccaccactaatgtcaacaatgcaaccaccacctgctttgaaggcttctccaaacgtgtctggaagacttatttatccaagatcacaatatttattgaagttgttgggtttatcattcctctaatattgaatgtctcttgctcttctgtggtgctgagaactcttcgcaagcctgctactctgtctcaaattgggaccaataagaaaaaagtactgaaaatgatcacagtacatatggcagtctttgtggtatgctttgtaccctacaactctgtcctcttcttgtatgccctggtgcgctcccaagctattactaattgctttttggaaagatttgcaaagatcatgtacccaatcaccttgtgccttgcaactctgaactgttgttttgaccctttcatctattacttcacccttgaatcctttcagaagtccttctacatcaatgcccacatcagaatggagtccctgtttaagactgaaacacctttgaccacaaagccttcccttccagctattcaagaggaagtgagtgatcaaacaacaaataatggtggtgaattaatgctagaatccaccttttaggtatgagaaatgtgttcaggtccagatatggtttctcctataatttttcctatgctataaactaaagatttgaagctaatgatactgagaataatgcaccaaatccagtcagatacatttgtttgaaggtatactgtagagtttttattgctgttttgttcagtaattataggtcaaatctaattacaacaaccaagatggattgccaaactcttctgcttggttggaatttcattgtatcgcattatccaggtggctagtggcatttgataatatagagatgactttgaaactttcaaaaaggtatttctattccaatgatatttggtaattaggttgggcctataaatatagaacaaattcagggatttttaaaaaattgtgttactactgatatatgctagttttattttatttttttgaactgtcattgagtttattttagcacaagaatatttttagcctaacattattaataagaaatgtgtcaaatttttaacattggtaaaatatgttatgtgcattttgaaaacagaaaacaaattgcgttggcatgtacgtgggtgggaagaaaaagaaaattaacaggatttacacaattataatcaccagcagtgtgagtttaaaaaacttcgttgtttttacaccaaattaaaattttcatgtcaaacttcaaagccagaaagctgctaaatacgtgtctggcaggtaaaagctggaaaattacttaaaacaggaaagtgtcaataaaaaaacttgagcaacaccaacatattttttcttaaaatgtcacgttatcttcattttgggaaactaggttctataaaatatttatcctccctgttatactttggagcacagcacagccagaaaggggctgcatttgtgcccaggtcaggagcaaattgaaaaaaaaaataaagtaatacaaaaaaatcaaactataaagcaaaaacatttattaaaacctgaattaatcctttttggagggaggagtagagatatataacctgaaaatacttattctttcttatcgaattttggagcctaatatagccaggagctgctgaatttgtgcccctggattggaagcaaataaaaaaaaa

SEQ ID NO: 100071 - DNA, 446 bp, Homo sapiens
  misc_feature (241)..(241): n is a, c, g, or t
  misc_feature (251)..(251): n is a, c, g, or t
cgagtaaatcagtgaaggggtatgagcccgcattgccaggagatcccttgcatcagttgtcgcattgaatgtgaatcctaacggagtagtatatgggtaaccatatgtaagctgttagcagagcaacaagaaagtatacctcctgtcaacagctaccgaatgactcaagttatgcacagaagtatgcatgtcgtgagcgagatagagatatagagagagagagagagagagagagagaganagagagaganagagagagagagagagagagagagagaggcaagttaaagggagaaccaggaagatgcctcacagaaacattcaggccaagcttagctaaagcttgatctattcaattgccttttgggaaaatgcagtgagaattgttgcccttgctgtggtttgttcagcgcctaattgtgtagctaccttttgtatgtgatgat

SEQ ID NO: 100072 - DNA, 314 bp, Homo sapiens
tctctgatcttacatttccctctgacttgaagttgatctgttagcatctcttttagtgtgggtctgctgtttattatttatttacctgaattatctttattttgccttccatagtaaagggtattttatctggatataagactttatgttggcagttgttttcttttagcacgttgaaaatatgattccactgttttctggctttcattgttgtatatgagaagtcagctgtcagtctacttgcaatgcccctaatggtaacctgtttttttctttttaagattgtctccttgtgaataatttgtgcagcagca

SEQ ID NO: 100073 - DNA, 120 bp, Homo sapiens
caggtgaagacattgaaatagccatggataacttgagctgtccaggagccaggatgaggactcagctccacaaaatccaaatgccttcattatattaaactgcctatatgaatgactgct

SEQ ID NO: 100074 - DNA, 338 bp, Homo sapiens
tagctggaattacaggtgcccgccaccacgtccggctaatttttgtatttttagaagggacagggtttcaccatattgctcaggctggtctggaactcctgacctcaggtgatgcacccacctcggcctcccaaagacacatgggtaattttatattttctttttcttttctttctttctttctctccttccttccttccttccttcttgcttgcttctttccttttttttttcttttctttcgaggtggggccccactctgtcatgcacctggagtgcaatggcacaatcatagctcactgctgcctcaaactcttggacttaagcaatcctcccac

SEQ ID NO: 100075 - DNA, 781 bp, Homo sapiens
gctgggctcctgggttgcagaatttaaggcagcattcaccctcaggaccaggcaagtgcagagtcagcagtcctgttcctgggtatggagtcctgtcctgcccccgtacccagcttcattctcctttgagatttcatttgtcacaaaagcctttcactaggtgatgaccaagctccaaaggtgaccccaggtaacccacgaggggcctccgcacaccctcacatcacctccccaccatgtccaagctttgtatgtagcaaaagtctgtgaaagacagcgtgggagggaagtgagactctccacattttcaggaataaaaagtacatttttacacttacttgattacttaaaggccccatctatcgcaaatgttgcctggccttccggtggcacacgcccggggcttccagtgtttcgatataaacccagacccttaagaagatgtaatcgccggttgtcttacaagcagtcatctcatcacaggggggttggaaggagaattcaggagccaaacagccgcaagagcacctggcagatccagttccgctggatgatgtctttgaacaagactaaaaatgactgtgtcgatggcttcgccgttttccaacatttggtggaatgacagagccttaggacatgtctgtagccacaatctgccatctctgacatcaactgagtgttactaattcccattcctctcttttaatgaaggaagagttcatcagtgctggtctcatccaaagaagcaaattagggagtctgttctttgcaaatgttgggg

SEQ ID NO: 100076 - DNA, 367 bp, Homo sapiens
tgttcttaggcccgttttactgatggggatgcgaaggccctaagaggagaagcagtttgcccagggtcacagagcaagttcatgattctcaacaaagggcttctactgcttcacaggctcaggatttcttttttttttttgagacggagtcactctgctgcccaggctggagtgcagtggcgtgatctcggcttactgcaagcgccgcctgctgggctcacgccattgtcctgcctcagcctcccgagtagctaggactacaggcacccggcaccatgcccggctaattttttgtatttttagtagatacagggtttcactgtgttcaccaggatggtctcgatctcctgaccttgtgatccacccg

SEQ ID NO: 100077 - DNA, 850 bp, Homo sapiens
ctgcattagacacacacataaggatttatagggaaccaaaagggcattctctaagcagcgtctcaaaagataccattgaacatagctaagaatatccaccacaggggccctggtctcactttgttgatgagtgttatagagcaaaatgattaaattgaaactttgacagtttaatactctatgggtatattaatggcatgcttgttgctacattcatttcaaaatgaaagttgaaaagctttattaaatgaagtgagaagattctgtgcatttgacctagtgctactaggtggttcagagggtgacaatggggtgccccatatgataaatgaaacgtctatgaggataaactaagagattgtaaatgtagaactgagtgtgagggagatcacttaaaactctagtcaaggtgacctgggtataatctcaaagagaggattggagtgtggctgaaaaaatgatacttgttattacatgtaccagacattattcttaggactactttcagaagtaggtatttttattgttccctttttgtagatgaaaaaataggcttaaagaggttaagtgtaacttgcttaagatcacacacacagagtaagtggcagtactatctggttgcagagctcatgctctttcccattcaagcttatacagtcttagagaggtttgagtaagtaggaacttaactaattgtgatgtactttgtctggaaaaagaatttgaatagatattctcagtccagcgcataggagaggaaagcccaaagagctgttctcagtacctaccgcactacctgctgcacatcacagaaagggctaaatctggcaaacacagatgtagaccccag

SEQ ID NO: 100078 - DNA, 395 bp, Homo sapiens
gggtgcatgttatttttagtaatgttaacagtagcaaaaacaaaaacaaacctttgtaggtaatatctaaaatcccattagttgagaatgttactttatgatgtaggatcctttgatctgtgggtataacagccatcaagccacaatgaaattcagcatcccgctgggggaaggcaaactttaaactttagaaatcaaacagttttttcatttaagagggagaaactaaagtaaaaatgtcacatctgtcaagaaaaataaagttaaaaaaagtttgaaaagccagtaatttataataattttgaagtctactgaaacataccttgacaacatccagattaaatgtatatcaaatgaagcattctgaaatcaccacacagaaaggttaaaagttt

SEQ ID NO: 100079 - DNA, 612 bp, Homo sapiens
ccccattgttctgcagccagagagaactgtcttggtgttggaggaatgattctggcctagggtgaggatatttagttttacaacttgtgggactgtgacttaatttacccctttattggtttgtactcttggttgtaaatttcagaaattcagcccaaatcacttaagctccaaaagaaaaaggaaaaagaaaaaatgccagtggggtcacaggtacgcagctggatccaggggcttggaccttatctttcaggtcctctttcccttttctacccctctgtgttggcctcatacacaggcctgttatcttttcagcctagagattcccagcctagaaagagggctttttgccctggtggttgcagcaagtctcagaattgagcttcattggttcagcctgagtcacacgcccattgctgaaccaatcactgtgatgtaggggttccagtatgcagattggccaggcccagagcatagggtgggccctctgctttcttctcccaaacctccagatagagaaccaaggagggttattccttgagggccaattgagggggctcctacccaacaaaggagggtgggttcccagtggcagaaatgactgacgcccac

SEQ ID NO: 100080 - DNA, 307 bp, Homo sapiens
agtattcaaatatgaacttgtttctgaagttagagtctaacaaactttttagccactgtatataaagaaatcagctagcggatagaaaatacattagagataaggtttactatggaattgtctcatagaacctaagagaggaatttaattttttatttaatttagaaaagaaataaaactgatatttccaattattagtgattcacccctaattatgacatttgagattttgttctgaagttaattgattttaaaggttgacaagagactttatatatacctatgcttaacaattctttgggatttc

SEQ ID NO: 100081 - DNA, 324 bp, Homo sapiens
ctaacagaccctgcgattctacatgtatgtggaaacaacgttttatcaagagatcattcataataaaggaggcttcactaaagaaacggctaaagttttttcttttgtgcataacagccaaaacaatgaaaatttaagctctacagatattctaatatgcactgtaaaagtgtgtcccatttagtattttattttattttttatttttatttatttatttatttttgagacagagtctcactctgtcacccaggctggagtgcagtggccacatctcggctcactgcaacctccacctagcaggttcaagcgattctcctgcct

SEQ ID NO: 100082 - DNA, 255 bp, Homo sapiens
tactactaaattcgcggccgcgtcgactttttttttgcagtggattaaaccattaaaaaattgaaaaagaaaagttgaaagtagagcttggatcttgaatttctctgagtaatgaacagttattgagactccaggccatggggtgatattcagaaatcctgttacatccacctgtcaggtaagaaagccccagctccaaaaccaaatatgggattcttcactcatctgggttagggttctcaatcttggccctat

SEQ ID NO: 100083 - DNA, 386 bp, Homo sapiens
tactccacaagtttcttttgaccatcagaggttataattgagaacatattcaaggttgtactgggttttagttagaaattcagaggacaatttggacagatcccctgctttgcctctgttgcttccttgccctcttccccatcccattccccagttaataactcccaggagtgggtggtaagggggatggctatgggccaggatggagcaggagctctgggcctcacttccgttctacaagccagggaagccacagcttcttcctgcctctacgttcccacatccctggcagttgtaacttcagacagacctctggatttttactaagttttcattcaagacccttcatcatttggctccaacttacctttccaggctttccttct

SEQ ID NO: 100084 - DNA, 369 bp, Homo sapiens
ggctttgttcatttttcttcattttgtctcctcctcagactgggtaatatcatttgtcctatcttcgagttcactaattctttcttctgcctgatcaaatatcctattgaacctctgtaatacatatttaatttcagctattatgtttttcagctccagattttctattttgttccttttttttgtgagacagggtctcactctgttacccaggctggtctcaaactccaccaaatgtacttcttattcattttatggaaaagactaggctttgcttagtatcatgtccatgtttccttcacctcagtggagcttctgagttttatactgctcaagatcgtcataaataaaattttttctcattgtcat

SEQ ID NO: 100085 - DNA, 2811 bp, Homo sapiens
cttgttggcctactggctctttttgacagcccccagtgcgaaaggctgccagcatgtcatcagtgagccccatccagatccccagtcgcctcccgctgctgctcacccacgagggcgtcctgctgcccggctccaccatgcgcaccagcgtggactcggcccgcaacctgcagctggtgcggagccgccttctgaagggcacgtcgctgcaaagcaccatcctgggcgtcatccccaacacgcctgaccccgccagcgacgcgcaggacctgccgccgctgcacaggattggcacagctgcactggccgttcaggttgtgggcagtaactggcccaagccccactacactctgttgattacaggcctatgccgtttccagattgtacaggtcttaaaagagaagccatatcccattgctgaagtggagcagttggaccgacttgaggagtttcccaacacctgtaaaatgagggaggagctaggagaactatcagagcagttttacaaatatgcagtacaattggttgaaatgttggatatgtctgtccctgcagttgctaaattgagacgtcttttagatagtcttccaagggaagctttaccagacatcttgacatcaattatccgaacaagcaacaaagagaaactccagattttagatgctgtgagcctagaggagcggttcaagatgactataccactgcttgtcagacaaattgaaggcctgaaattgcttcaaaaaaccagaaaacccaagcaagatgatgataagagggttatagcaatacgccctattaggagaattacacatatctcaggtactttagaagatgaagatgaagatgaagataatgatgacattgtcatgctagagaaaaaaatacgaacatctagtatgccagagcaggcccataaagtctgtgtcaaagagataaagagactcaaaaaaatgcctcagtcaatgccagaatatgctctgactagaaattatttggaacttatggtagaacttccttggaacaaaagtacaactgaccgcctggacattagggcagcccggattcttctggataatgaccattacgccatggaaaaattgaagaaaagagtactggaatacttggctgtcagacagctcaaaaataacctgaagggcccaatcctatgctttgttggccctcctggagttggtaaaacaagtgtgggaagatcagtggccaagactctaggtcgagagttccacaggattgcacttggaggagtatgtgatcagtctgacattcgaggacacaggcgcacctatgttggcagcatgcctggtcgcatcatcaacggcttgaagactgtgggagtgaacaacccagtgttcctattagatgaggttgacaaactgggaaaaagtctacagggtgatccagcagcagctctgcttgaggtgttggatcctgaacaaaaccataacttcacagatcattatctaaatgtggcctttgacctttctcaagttctttttatagctactgccaacaccactgctaccattccagctgccttgttggacagaatggagatcattcaggttccaggttatacacaggaggagaagatagagattgcccataggcacttgatccccaagcagctggaacaacatgggctgactccacagcagattcagataccccaggtcaccactcttgacatcatcaccaggtataccagagaggcaggggttcgttctctggatagaaaacttggggccatttgccgagctgtggccgtgaaggtggcagaaggacagcataaggaagccaagttggaccgttctgatgtgactgagagagaaggttgcagagaacacatcttagaagatgaaaaacctgaatctatcagtgacactactgacttggctctaccacctgaaatgccgattttgattgatttccatgctctgaaagacatccttgggcccccgatgtatgaaatggaggtatctcagcgtttgagtcagccaggagtagcaataggtttggcttggactcccttaggtggagaaatcatgttcgtggaggcgagtcgaatggatggcgagggccagttaactctgaccggccagctcggggacgtgatgaaggagtccgcccacctcgctatcagctggctccgcagcaacgcaaagaagtaccagctgaccaatgcttttggaagttttgatcttcttgacaacacagacatccatctgcacttcccagctggagctgtcacaaaagatggaccatctgctggagttaccatagtaacctgtctcgcctcactttttagtgggcggctggtacgttcagatgtagccatgactggagaaattacactgagaggtcttgttcttccagtgggtggaattaaagacaaagtgctggcggcacacagagcgggactgaagcaagtcattattcctcggagaaatgaaaaagaccttgagggaatcccaggcaacgtacgacaggatttaagttttgtcacagcaagctgcctggatgaggttcttaatgcagcttttgatggtggctttactgtcaagaccagacctggtctgttaaatagcaaactgtaggtccaaatctcaattttttagaattttaagttatgaagtgctcaaaggtactgacacagttgattttattcacaccattaggggtatgcaagatgtccctgttttataaacataatcacaacagtaataaacctcaagtagtggctagtgtttagtatagaaatataagatgttgatttagtaaactgataaaaatcga

SEQ ID NO: 100086 - DNA, 5300 bp, Homo sapiens
  misc_feature (4925)..(4925): n is a, c, g, or t
cttgttggcctactggctctttttgacagcccccagtgcgaaaggctgccagcatgtcatcagtgagccccatccagatccccagtcgcctcccgctgctgctcacccacgagggcgtcctgctgcccggctccaccatgcgcaccagcgtggactcggcccgcaacctgcagctggtgcggagccgccttctgaagggcacgtcgctgcaaagcaccatcctgggcgtcatccccaacacgcctgaccccgccagcgacgcgcaggacctgccgccgctgcacaggattggcacagctgcactggccgttcaggttgtgggcagtaactggcccaagccccactacactctgttgattacaggcctatgccgtttccagattgtacaggtcttaaaagagaagccatatcccattgctgaagtggagcagttggaccgacttgaggagtttcccaacacctgtaaaatgagggaggagctaggagaactatcagagcagttttacaaatatgcagtacaattggttgaaatgttggatatgtctgtccctgcagttgctaaattgagacgtcttttagatagtcttccaagggaagctttaccagacatcttgacatcaattatccgaacaagcaacaaagagaaactccagattttagatgctgtgagcctagaggagcggttcaagatgactataccactgcttgtcagacaaattgaaggcctgaaattgcttcaaaaaaccagaaaacccaagcaagatgatgataagagggttatagcaatacgccctattaggagaattacacatatctcaggtactttagaagatgaagatgaagatgaagataatgatgacattgtcatgctagagaaaaaaatacgaacatctagtatgccagagcaggcccataaagtctgtgtcaaagagataaagagactcaaaaaaatgcctcagtcaatgccagaatatgctctgactagaaattatttggaacttatggtagaacttccttggaacaaaagtacaactgaccgcctggacattagggcagcccggattcttctggataatgaccattacgccatggaaaaattgaagaaaagagtactggaatacttggctgtcagacagctcaaaaataacctgaagggcccaatcctatgctttgttggccctcctggagttggtaaaacaagtgtgggaagatcagtggccaagactctaggtcgagagttccacaggattgcacttggaggagtatgtgatcagtctgacattcgaggacacaggcgcacctatgttggcagcatgcctggtcgcatcatcaacggcttgaagactgtgggagtgaacaacccagtgttcctattagatgaggttgacaaactgggaaaaagtctacagggtgatccagcagcagctctgcttgaggtgttggatcctgaacaaaaccataacttcacagatcattatctaaatgtggcctttgacctttctcaagttctttttatagctactgccaacaccactgctaccattccagctgccttgttggacagaatggagatcattcaggttccaggttatacacaggaggagaagatagagattgcccataggcacttgatccccaagcagctggaacaacatgggctgactccacagcagattcagataccccaggtcaccactcttgacatcatcaccaggtataccagagaggcaggggttcgttctctggatagaaaacttggggccatttgccgagctgtggccgtgaaggtggcagaaggacagcataaggaagccaagttggaccgttctgatgtgactgagagagaaggttgcagagaacacatcttagaagatgaaaaacctgaatctatcagtgacactactgacttggctctaccacctgaaatgccgattttgattgatttccatgctctgaaagacatccttgggcccccgatgtatgaaatggaggtatctcagcgtttgagtcagccaggagtagcaataggtttggcttggactcccttaggtggagaaatcatgttcgtggaggcgagtcgaatggatggcgagggccagttaactctgaccggccagctcggggacgtgatgaaggagtccgcccacctcgctatcagctggctccgcagcaacgcaaagaagtaccagctgaccaatgcttttggaagttttgatcttcttgacaacacagacatccatctgcacttcccagctggagctgtcacaaaagatggaccatctgctggagttaccatagtaacctgtctcgcctcactttttagtgggcggctggtacgttcagatgtagccatgactggagaaattacactgagaggtcttgttcttccagtgggtggaattaaagacaaagtgctggcggcacacagagcgggactgaagcaagtcattattcctcggagaaatgaaaaagaccttgagggaatcccaggcaacgtacgacaggatttaagttttgtcacagcaagctgcctggatgaggttcttaatgcagcttttgatggtggctttactgtcaagaccagacctggtctgttaaatagcaaactgtaggtccaaatctcaattttttagaattttaagttatgaagtgctcaaaggtactgacacagttgattttattcacaccattaggggtatgcaagatgtccctgttttataaacataatcacaacagtaataaacctcaagtagtggctagtgtttagtatagaaatataagatgttgatttagtaaactgataaaaatcgaattcttgtctttttagtgggatccttactgtccctggaaagatatagcatagtggttctcagcacagtctccagaacagaagcatctgtagtacctggtaacttgttagaaatgtacattctcaggctccacagcaggccgcctgaatcaaatcctgggaggtggggacagaaatctgtgttttaagaagccttccaggtaattctgctgcacactcaagttcaggaaccaccggtatagaccattaccttagtggatttacctgtagagtttattggatcctgaaaccaatcaattacttagaactaggcaaagatgaaagtatagccaactattcttggctatatatatatattcaagtgggccgggcgtgatggctcacacctgtaattccagcactttgggaggtcgaggtaggcagatcaccgagcccaagagttcaagacaatcctggccaacggcgaaactctgtctctacaaaaaatatacaggcgtgttagcatgtgcctgtaatcccagcttcttgggaagctgaggcacaagaattgcctgaacccaggaggtggaggttgcagtgagctgggatcgcgccattgcactccagcctggctgacagagcgagactgtctctaaaaaaaaaagactcaagtggaccctacaatgaagcctacacatcccaatagaagccccttcttatgctgagggaagcagccctcagaacatgatagcttgtatccagcagagtggcacgtgctggcacacctcacagaagcaccctggccctggatgcctgcaacctcagaagagtgcagctcccagagggaggcagccatccatctgggatggtcctaagcatggaatcctaactcctgattccgtctcctatttcttgcttggctacgccagttcccaaatctggtagatgtccatgcccatgtgctcctgctgggactcaattcaggctatgtatgactatgaagtcaggctcatctgcttactggctgtgtgaactttttgtatcttggttttcttcatccatgaaatccaagtaatactacctaattgttactgtggagattaagttcaaatgcaatgtatagtaatattaagcaatttctagttattattctagccagtaatggacttcagaatcttttattacacaatataagaatatgtatgtaaagacattttggaatttcctggatgagaaggaagtctgggctgggcatggtggctcacgcctgtaaccctagcactttaggaaatcgaggcgagtggatcacttaagctcaggagttcaaggccagcctgggcaacatggcaaaaccccatttctacaaaaaatacaaaaattagctgggcatggtggcacccgcctgtagtccagctacttgaggctgagatgggaggatgagggaggtcggggctgcagtgagccaagatcacgccactgcactccagcaccctgggcgacagagtgagaccctgtctcaaaaaaaaaaaaaaaaaaagattgggccaaaatactgtgataaaatagcaggcctgctgataaaagtttatctgaatgcattgagaggaaaagtccagacctaggactagttatggcagttggagagaaagaacatcgggatgtttgaaaatatgccattgactatcttaactactgtaattttatcatttccaacgtcatctaactggggactagaacaaactgtgaattcactttcagcaaccagagggcgctaatccacacccacatcgctctgccctgttccacccagcaggggcaacaaggatataacttggggttctcggtattcttcctttagtcctgacacaggcagccttgcactttgtagcagcaggagggcacttgctttaagcatatctttcgaaaggcatccattgagagaataatgcattctccccttgctgtgtatgacatggaacagtatgaccattgcactagctttgtttttggtttgttttgtttttttttaattccagggggttggttggttggttgaagagccaaaattttaaccatttttaagcatataatttgggggtatcagttactggatctaagcatgtccactctacacgcntttttttttttttttttttttatttttgtggagagagagtggggctctgtgtgcctctgtgtttcccccggggtgtgccctgtgaggggggcgtgtttctctcgcggcctcaccggtgcaccctctctgtgcctcccccgagtttcaggccaattctccttctgtgcccctcggccctctcccgagtgttgggctgtgggcacaccgccgggtgtgtggtgtgcccccacgcccccagccttatttgtggtgcttatttttagagtgctgagagagacacggggtttcccaccatgtgtgtggcgccgggggtggccttcaatacccccaaaaccttcagttgtctcccgggccactttgggcctcccccaatgg

SEQ ID NO: 100087 - DNA, 3477 bp, Homo sapiens
  misc_feature (3102)..(3102): n is a, c, g, or t
agccagagagtaagtgctgaatgtgacgcagaatcatgttaggtaacaaggactttgaggtaagtggctgaagtcttctgtggagtcagccgactcttgcaggattgtgtggtatcagtcacctttagcatttgccaacccaactctgatcattcttcttctttcaaggtatctcagcgtttgagtcagccaggagtagcaataggtttggcttggactcccttaggtggagaaatcatgttcgtggaggcgagtcgaatggatggcgagggccagttaactctgaccggccagctcggggacgtgatgaaggagtccgcccacctcgctatcagctggctccgcagcaacgcaaagaagtaccagctgaccaatgcttttggaagttttgatcttcttgacaacacagacatccatctgcacttcccagctggagctgtcacaaaagatggaccatctgctggagttaccatagtaacctgtctcgcctcactttttagtgggcggctggtacgttcagatgtagccatgactggagaaattacactgagaggtcttgttcttccagtgggtggaattaaagacaaagtgctggcggcacacagagcgggactgaagcaagtcattattcctcggagaaatgaaaaagaccttgagggaatcccaggcaacgtacgacaggatttaagttttgtcacagcaagctgcctggatgaggttcttaatgcagcttttgatggtggctttactgtcaagaccagacctggtctgttaaatagcaaactgtaggtccaaatctcaattttttagaattttaagttatgaagtgctcaaaggtactgacacagttgattttattcacaccattaggggtatgcaagatgtccctgttttataaacataatcacaacagtaataaacctcaagtagtggctagtgtttagtatagaaatataagatgttgatttagtaaactgataaaaatcgaattcttgtctttttagtgggatccttactgtccctggaaagatatagcatagtggttctcagcacagtctccagaacagaagcatctgtagtacctggtaacttgttagaaatgtacattctcaggctccacagcaggccgcctgaatcaaatcctgggaggtggggacagaaatctgtgttttaagaagccttccaggtaattctgctgcacactcaagttcaggaaccaccggtatagaccattaccttagtggatttacctgtagagtttattggatcctgaaaccaatcaattacttagaactaggcaaagatgaaagtatagccaactattcttggctatatatatatattcaagtgggccgggcgtgatggctcacacctgtaattccagcactttgggaggtcgaggtaggcagatcaccgagcccaagagttcaagacaatcctggccaacggcgaaactctgtctctacaaaaaatatacaggcgtgttagcatgtgcctgtaatcccagcttcttgggaagctgaggcacaagaattgcctgaacccaggaggtggaggttgcagtgagctgggatcgcgccattgcactccagcctggctgacagagcgagactgtctctaaaaaaaaaagactcaagtggaccctacaatgaagcctacacatcccaatagaagccccttcttatgctgagggaagcagccctcagaacatgatagcttgtatccagcagagtggcacgtgctggcacacctcacagaagcaccctggccctggatgcctgcaacctcagaagagtgcagctcccagagggaggcagccatccatctgggatggtcctaagcatggaatcctaactcctgattccgtctcctatttcttgcttggctacgccagttcccaaatctggtagatgtccatgcccatgtgctcctgctgggactcaattcaggctatgtatgactatgaagtcaggctcatctgcttactggctgtgtgaactttttgtatcttggttttcttcatccatgaaatccaagtaatactacctaattgttactgtggagattaagttcaaatgcaatgtatagtaatattaagcaatttctagttattattctagccagtaatggacttcagaatcttttattacacaatataagaatatgtatgtaaagacattttggaatttcctggatgagaaggaagtctgggctgggcatggtggctcacgcctgtaaccctagcactttaggaaatcgaggcgagtggatcacttaagctcaggagttcaaggccagcctgggcaacatggcaaaaccccatttctacaaaaaatacaaaaattagctgggcatggtggcacccgcctgtagtccagctacttgaggctgagatgggaggatgagggaggtcggggctgcagtgagccaagatcacgccactgcactccagcaccctgggcgacagagtgagaccctgtctcaaaaaaaaaaaaaaaaaaagattgggccaaaatactgtgataaaatagcaggcctgctgataaaagtttatctgaatgcattgagaggaaaagtccagacctaggactagttatggcagttggagagaaagaacatcgggatgtttgaaaatatgccattgactatcttaactactgtaattttatcatttccaacgtcatctaactggggactagaacaaactgtgaattcactttcagcaaccagagggcgctaatccacacccacatcgctctgccctgttccacccagcaggggcaacaaggatataacttggggttctcggtattcttcctttagtcctgacacaggcagccttgcactttgtagcagcaggagggcacttgctttaagcatatctttcgaaaggcatccattgagagaataatgcattctccccttgctgtgtatgacatggaacagtatgaccattgcactagctttgtttttggtttgttttgtttttttttaattccagggggttggttggttggttgaagagccaaaattttaaccatttttaagcatataatttgggggtatcagttactggatctaagcatgtccactctacacgcntttttttttttttttttttttatttttgtggagagagagtggggctctgtgtgcctctgtgtttcccccggggtgtgccctgtgaggggggcgtgtttctctcgcggcctcaccggtgcaccctctctgtgcctcccccgagtttcaggccaattctccttctgtgcccctcggccctctcccgagtgttgggctgtgggcacaccgccgggtgtgtggtgtgcccccacgcccccagccttatttgtggtgcttatttttagagtgctgagagagacacggggtttcccaccatgtgtgtggcgccgggggtggccttcaatacccccaaaaccttcagttgtctcccgggccactttgggcctcccccaatgg

SEQ ID NO: 100088 - DNA, 5685 bp, Homo sapiens
  misc_feature (5310)..(5310): n is a, c, g, or t
cttgttggcctactggctctttttgacagcccccagtgcgaaaggctgccagcatgtcatcagtgagccccatccagatccccagtcgcctcccgctgctgctcacccacgagggcgtcctgctgcccggctccaccatgcgcaccagcgtggactcggcccgcaacctgcagctggtgcggagccgccttctgaagggcacgtcgctgcaaagcaccatcctgggcgtcatccccaacacgcctgaccccgccagcgacgcgcaggacctgccgccgctgcacaggattggcacagctgcactggccgttcaggttgtgggcagtaactggcccaagccccactacactctgttgattacaggcctatgccgtttccagattgtacaggtcttaaaagagaagccatatcccattgctgaagtggagcagttggaccgacttgaggagtttcccaacacctgtaaaatgagggaggagctaggagaactatcagagcagttttacaaatatgcagtacaattggttgaaatgttggatatgtctgtccctgcagttgctaaattgagacgtcttttagatagtcttccaagggaagctttaccagacatcttgacatcaattatccgaacaagcaacaaagagaaactccagattttagatgctgtgagcctagaggagcggttcaagatgactataccactgcttgtcagacaaattgaaggcctgaaattgcttcaaaaaaccagaaaacccaagcaagatgatgataagagggttatagcaatacgccctattaggagaattacacatatctcaggtactttagaagatgaagatgaagatgaagataatgatgacattgtcatgctagagaaaaaaatacgaacatctagtatgccagagcaggcccataaagtctgtgtcaaagagataaagagactcaaaaaaatgcctcagtcaatgccagaatatgctctgactagaaattatttggaacttatggtagaacttccttggaacaaaagtacaactgaccgcctggacattagggcagcccggattcttctggataatgaccattacgccatggaaaaattgaagaaaagagtactggaatacttggctgtcagacagctcaaaaataacctgaagggcccaatcctatgctttgttggccctcctggagttggtaaaacaagtgtgggaagatcagtggccaagactctaggtcgagagttccacaggattgcacttggaggagtatgtgatcagtctgacattcgaggacacaggcgcacctatgttggcagcatgcctggtcgcatcatcaacggcttgaagactgtgggagtgaacaacccagtgttcctattagatgaggttgacaaactgggaaaaagtctacagggtgatccagcagcagctctgcttgaggtgttggatcctgaacaaaaccataacttcacagatcattatctaaatgtggcctttgacctttctcaagttctttttatagctactgccaacaccactgctaccattccagctgccttgttggacagaatggagatcattcaggttccaggttatacacaggaggagaagatagagattgcccataggcacttgatccccaagcagctggaacaacatgggctgactccacagcagattcagataccccaggtcaccactcttgacatcatcaccaggtataccagagaggcaggggttcgttctctggatagaaaacttggggccatttgccgagctgtggccgtgaaggtggcagaaggacagcataaggaagccaagttggaccgttctgatgtgactgagagagaaggttgcagagaacacatcttagaagatgaaaaacctgaatctatcagtgacactactgacttggctctaccacctgaaatgccgattttgattgatttccatgctctgaaagacatccttgggcccccgatgtatgaaatggaggtatctcagcgtttgagtcagccaggagtagcaataggtttggcttggactcccttaggtggagaaatcatgttcgtggaggcgagtcgaatggatggcgagggccagttaactctgaccggccagctcggggacgtgatgaaggagtccgcccacctcgctatcagctggctccgcagcaacgcaaagaagtaccagctgaccaatggtaggagcctgcacccggccaggcaggcgtgacccaggaggcggtaccttccatggcggagactggcatgagctcgagactgccagttacacatctagcaaagtacacaccgttttgaacccctgtggaaatcctagttcccatttcaggactatttgactagtgcctgaactagaaactaattcaaaaggtttattttgttttaatacgacttagagtagaatggaactgttcttccacaccctcacccaaattgtactgtccaccaatattttgaagaattcatttacccaaaacattcatttttgtttgtgactttttttttaggagaaaaagaaaacaggtttaatttttctacattaaagtccctttttcctttttaaagcttttggaagttttgatcttcttgacaacacagacatccatctgcacttcccagctggagctgtcacaaaagatggaccatctgctggagttaccatagtaacctgtctcgcctcactttttagtgggcggctggtacgttcagatgtagccatgactggagaaattacactgagaggtcttgttcttccagtgggtggaattaaagacaaagtgctggcggcacacagagcgggactgaagcaagtcattattcctcggagaaatgaaaaagaccttgagggaatcccaggcaacgtacgacaggatttaagttttgtcacagcaagctgcctggatgaggttcttaatgcagcttttgatggtggctttactgtcaagaccagacctggtctgttaaatagcaaactgtaggtccaaatctcaattttttagaattttaagttatgaagtgctcaaaggtactgacacagttgattttattcacaccattaggggtatgcaagatgtccctgttttataaacataatcacaacagtaataaacctcaagtagtggctagtgtttagtatagaaatataagatgttgatttagtaaactgataaaaatcgaattcttgtctttttagtgggatccttactgtccctggaaagatatagcatagtggttctcagcacagtctccagaacagaagcatctgtagtacctggtaacttgttagaaatgtacattctcaggctccacagcaggccgcctgaatcaaatcctgggaggtggggacagaaatctgtgttttaagaagccttccaggtaattctgctgcacactcaagttcaggaaccaccggtatagaccattaccttagtggatttacctgtagagtttattggatcctgaaaccaatcaattacttagaactaggcaaagatgaaagtatagccaactattcttggctatatatatatattcaagtgggccgggcgtgatggctcacacctgtaattccagcactttgggaggtcgaggtaggcagatcaccgagcccaagagttcaagacaatcctggccaacggcgaaactctgtctctacaaaaaatatacaggcgtgttagcatgtgcctgtaatcccagcttcttgggaagctgaggcacaagaattgcctgaacccaggaggtggaggttgcagtgagctgggatcgcgccattgcactccagcctggctgacagagcgagactgtctctaaaaaaaaaagactcaagtggaccctacaatgaagcctacacatcccaatagaagccccttcttatgctgagggaagcagccctcagaacatgatagcttgtatccagcagagtggcacgtgctggcacacctcacagaagcaccctggccctggatgcctgcaacctcagaagagtgcagctcccagagggaggcagccatccatctgggatggtcctaagcatggaatcctaactcctgattccgtctcctatttcttgcttggctacgccagttcccaaatctggtagatgtccatgcccatgtgctcctgctgggactcaattcaggctatgtatgactatgaagtcaggctcatctgcttactggctgtgtgaactttttgtatcttggttttcttcatccatgaaatccaagtaatactacctaattgttactgtggagattaagttcaaatgcaatgtatagtaatattaagcaatttctagttattattctagccagtaatggacttcagaatcttttattacacaatataagaatatgtatgtaaagacattttggaatttcctggatgagaaggaagtctgggctgggcatggtggctcacgcctgtaaccctagcactttaggaaatcgaggcgagtggatcacttaagctcaggagttcaaggccagcctgggcaacatggcaaaaccccatttctacaaaaaatacaaaaattagctgggcatggtggcacccgcctgtagtccagctacttgaggctgagatgggaggatgagggaggtcggggctgcagtgagccaagatcacgccactgcactccagcaccctgggcgacagagtgagaccctgtctcaaaaaaaaaaaaaaaaaaagattgggccaaaatactgtgataaaatagcaggcctgctgataaaagtttatctgaatgcattgagaggaaaagtccagacctaggactagttatggcagttggagagaaagaacatcgggatgtttgaaaatatgccattgactatcttaactactgtaattttatcatttccaacgtcatctaactggggactagaacaaactgtgaattcactttcagcaaccagagggcgctaatccacacccacatcgctctgccctgttccacccagcaggggcaacaaggatataacttggggttctcggtattcttcctttagtcctgacacaggcagccttgcactttgtagcagcaggagggcacttgctttaagcatatctttcgaaaggcatccattgagagaataatgcattctccccttgctgtgtatgacatggaacagtatgaccattgcactagctttgtttttggtttgttttgtttttttttaattccagggggttggttggttggttgaagagccaaaattttaaccatttttaagcatataatttgggggtatcagttactggatctaagcatgtccactctacacgcntttttttttttttttttttttatttttgtggagagagagtggggctctgtgtgcctctgtgtttcccccggggtgtgccctgtgaggggggcgtgtttctctcgcggcctcaccggtgcaccctctctgtgcctcccccgagtttcaggccaattctccttctgtgcccctcggccctctcccgagtgttgggctgtgggcacaccgccgggtgtgtggtgtgcccccacgcccccagccttatttgtggtgcttatttttagagtgctgagagagacacggggtttcccaccatgtgtgtggcgccgggggtggccttcaatacccccaaaaccttcagttgtctcccgggccactttgggcctcccccaatgg

SEQ ID NO: 100089 - DNA, 3862 bp, Homo sapiens
  misc_feature (3487)..(3487): n is a, c, g, or t
agccagagagtaagtgctgaatgtgacgcagaatcatgttaggtaacaaggactttgaggtaagtggctgaagtcttctgtggagtcagccgactcttgcaggattgtgtggtatcagtcacctttagcatttgccaacccaactctgatcattcttcttctttcaaggtatctcagcgtttgagtcagccaggagtagcaataggtttggcttggactcccttaggtggagaaatcatgttcgtggaggcgagtcgaatggatggcgagggccagttaactctgaccggccagctcggggacgtgatgaaggagtccgcccacctcgctatcagctggctccgcagcaacgcaaagaagtaccagctgaccaatggtaggagcctgcacccggccaggcaggcgtgacccaggaggcggtaccttccatggcggagactggcatgagctcgagactgccagttacacatctagcaaagtacacaccgttttgaacccctgtggaaatcctagttcccatttcaggactatttgactagtgcctgaactagaaactaattcaaaaggtttattttgttttaatacgacttagagtagaatggaactgttcttccacaccctcacccaaattgtactgtccaccaatattttgaagaattcatttacccaaaacattcatttttgtttgtgactttttttttaggagaaaaagaaaacaggtttaatttttctacattaaagtccctttttcctttttaaagcttttggaagttttgatcttcttgacaacacagacatccatctgcacttcccagctggagctgtcacaaaagatggaccatctgctggagttaccatagtaacctgtctcgcctcactttttagtgggcggctggtacgttcagatgtagccatgactggagaaattacactgagaggtcttgttcttccagtgggtggaattaaagacaaagtgctggcggcacacagagcgggactgaagcaagtcattattcctcggagaaatgaaaaagaccttgagggaatcccaggcaacgtacgacaggatttaagttttgtcacagcaagctgcctggatgaggttcttaatgcagcttttgatggtggctttactgtcaagaccagacctggtctgttaaatagcaaactgtaggtccaaatctcaattttttagaattttaagttatgaagtgctcaaaggtactgacacagttgattttattcacaccattaggggtatgcaagatgtccctgttttataaacataatcacaacagtaataaacctcaagtagtggctagtgtttagtatagaaatataagatgttgatttagtaaactgataaaaatcgaattcttgtctttttagtgggatccttactgtccctggaaagatatagcatagtggttctcagcacagtctccagaacagaagcatctgtagtacctggtaacttgttagaaatgtacattctcaggctccacagcaggccgcctgaatcaaatcctgggaggtggggacagaaatctgtgttttaagaagccttccaggtaattctgctgcacactcaagttcaggaaccaccggtatagaccattaccttagtggatttacctgtagagtttattggatcctgaaaccaatcaattacttagaactaggcaaagatgaaagtatagccaactattcttggctatatatatatattcaagtgggccgggcgtgatggctcacacctgtaattccagcactttgggaggtcgaggtaggcagatcaccgagcccaagagttcaagacaatcctggccaacggcgaaactctgtctctacaaaaaatatacaggcgtgttagcatgtgcctgtaatcccagcttcttgggaagctgaggcacaagaattgcctgaacccaggaggtggaggttgcagtgagctgggatcgcgccattgcactccagcctggctgacagagcgagactgtctctaaaaaaaaaagactcaagtggaccctacaatgaagcctacacatcccaatagaagccccttcttatgctgagggaagcagccctcagaacatgatagcttgtatccagcagagtggcacgtgctggcacacctcacagaagcaccctggccctggatgcctgcaacctcagaagagtgcagctcccagagggaggcagccatccatctgggatggtcctaagcatggaatcctaactcctgattccgtctcctatttcttgcttggctacgccagttcccaaatctggtagatgtccatgcccatgtgctcctgctgggactcaattcaggctatgtatgactatgaagtcaggctcatctgcttactggctgtgtgaactttttgtatcttggttttcttcatccatgaaatccaagtaatactacctaattgttactgtggagattaagttcaaatgcaatgtatagtaatattaagcaatttctagttattattctagccagtaatggacttcagaatcttttattacacaatataagaatatgtatgtaaagacattttggaatttcctggatgagaaggaagtctgggctgggcatggtggctcacgcctgtaaccctagcactttaggaaatcgaggcgagtggatcacttaagctcaggagttcaaggccagcctgggcaacatggcaaaaccccatttctacaaaaaatacaaaaattagctgggcatggtggcacccgcctgtagtccagctacttgaggctgagatgggaggatgagggaggtcggggctgcagtgagccaagatcacgccactgcactccagcaccctgggcgacagagtgagaccctgtctcaaaaaaaaaaaaaaaaaaagattgggccaaaatactgtgataaaatagcaggcctgctgataaaagtttatctgaatgcattgagaggaaaagtccagacctaggactagttatggcagttggagagaaagaacatcgggatgtttgaaaatatgccattgactatcttaactactgtaattttatcatttccaacgtcatctaactggggactagaacaaactgtgaattcactttcagcaaccagagggcgctaatccacacccacatcgctctgccctgttccacccagcaggggcaacaaggatataacttggggttctcggtattcttcctttagtcctgacacaggcagccttgcactttgtagcagcaggagggcacttgctttaagcatatctttcgaaaggcatccattgagagaataatgcattctccccttgctgtgtatgacatggaacagtatgaccattgcactagctttgtttttggtttgttttgtttttttttaattccagggggttggttggttggttgaagagccaaaattttaaccatttttaagcatataatttgggggtatcagttactggatctaagcatgtccactctacacgcntttttttttttttttttttttatttttgtggagagagagtggggctctgtgtgcctctgtgtttcccccggggtgtgccctgtgaggggggcgtgtttctctcgcggcctcaccggtgcaccctctctgtgcctcccccgagtttcaggccaattctccttctgtgcccctcggccctctcccgagtgttgggctgtgggcacaccgccgggtgtgtggtgtgcccccacgcccccagccttatttgtggtgcttatttttagagtgctgagagagacacggggtttcccaccatgtgtgtggcgccgggggtggccttcaatacccccaaaaccttcagttgtctcccgggccactttgggcctcccccaatgg

SEQ ID NO: 100090 - DNA, 2947 bp, Homo sapiens
  misc_feature (2572)..(2572): n is a, c, g, or t
gatcattaaccctaaaaacttttttctctccttacaggtgggtggaattaaagacaaagtgctggcggcacacagagcgggactgaagcaagtcattattcctcggagaaatgaaaaagaccttgagggaatcccaggcaacgtacgacaggatttaagttttgtcacagcaagctgcctggatgaggttcttaatgcagcttttgatggtggctttactgtcaagaccagacctggtctgttaaatagcaaactgtaggtccaaatctcaattttttagaattttaagttatgaagtgctcaaaggtactgacacagttgattttattcacaccattaggggtatgcaagatgtccctgttttataaacataatcacaacagtaataaacctcaagtagtggctagtgtttagtatagaaatataagatgttgatttagtaaactgataaaaatcgaattcttgtctttttagtgggatccttactgtccctggaaagatatagcatagtggttctcagcacagtctccagaacagaagcatctgtagtacctggtaacttgttagaaatgtacattctcaggctccacagcaggccgcctgaatcaaatcctgggaggtggggacagaaatctgtgttttaagaagccttccaggtaattctgctgcacactcaagttcaggaaccaccggtatagaccattaccttagtggatttacctgtagagtttattggatcctgaaaccaatcaattacttagaactaggcaaagatgaaagtatagccaactattcttggctatatatatatattcaagtgggccgggcgtgatggctcacacctgtaattccagcactttgggaggtcgaggtaggcagatcaccgagcccaagagttcaagacaatcctggccaacggcgaaactctgtctctacaaaaaatatacaggcgtgttagcatgtgcctgtaatcccagcttcttgggaagctgaggcacaagaattgcctgaacccaggaggtggaggttgcagtgagctgggatcgcgccattgcactccagcctggctgacagagcgagactgtctctaaaaaaaaaagactcaagtggaccctacaatgaagcctacacatcccaatagaagccccttcttatgctgagggaagcagccctcagaacatgatagcttgtatccagcagagtggcacgtgctggcacacctcacagaagcaccctggccctggatgcctgcaacctcagaagagtgcagctcccagagggaggcagccatccatctgggatggtcctaagcatggaatcctaactcctgattccgtctcctatttcttgcttggctacgccagttcccaaatctggtagatgtccatgcccatgtgctcctgctgggactcaattcaggctatgtatgactatgaagtcaggctcatctgcttactggctgtgtgaactttttgtatcttggttttcttcatccatgaaatccaagtaatactacctaattgttactgtggagattaagttcaaatgcaatgtatagtaatattaagcaatttctagttattattctagccagtaatggacttcagaatcttttattacacaatataagaatatgtatgtaaagacattttggaatttcctggatgagaaggaagtctgggctgggcatggtggctcacgcctgtaaccctagcactttaggaaatcgaggcgagtggatcacttaagctcaggagttcaaggccagcctgggcaacatggcaaaaccccatttctacaaaaaatacaaaaattagctgggcatggtggcacccgcctgtagtccagctacttgaggctgagatgggaggatgagggaggtcggggctgcagtgagccaagatcacgccactgcactccagcaccctgggcgacagagtgagaccctgtctcaaaaaaaaaaaaaaaaaaagattgggccaaaatactgtgataaaatagcaggcctgctgataaaagtttatctgaatgcattgagaggaaaagtccagacctaggactagttatggcagttggagagaaagaacatcgggatgtttgaaaatatgccattgactatcttaactactgtaattttatcatttccaacgtcatctaactggggactagaacaaactgtgaattcactttcagcaaccagagggcgctaatccacacccacatcgctctgccctgttccacccagcaggggcaacaaggatataacttggggttctcggtattcttcctttagtcctgacacaggcagccttgcactttgtagcagcaggagggcacttgctttaagcatatctttcgaaaggcatccattgagagaataatgcattctccccttgctgtgtatgacatggaacagtatgaccattgcactagctttgtttttggtttgttttgtttttttttaattccagggggttggttggttggttgaagagccaaaattttaaccatttttaagcatataatttgggggtatcagttactggatctaagcatgtccactctacacgcntttttttttttttttttttttatttttgtggagagagagtggggctctgtgtgcctctgtgtttcccccggggtgtgccctgtgaggggggcgtgtttctctcgcggcctcaccggtgcaccctctctgtgcctcccccgagtttcaggccaattctccttctgtgcccctcggccctctcccgagtgttgggctgtgggcacaccgccgggtgtgtggtgtgcccccacgcccccagccttatttgtggtgcttatttttagagtgctgagagagacacggggtttcccaccatgtgtgtggcgccgggggtggccttcaatacccccaaaaccttcagttgtctcccgggccactttgggcctcccccaatgg

SEQ ID NO: 100091 - DNA, 2076 bp, Homo sapiens
  misc_feature (1701)..(1701): n is a, c, g, or t
ccggatattttgttttcattttcagtcatctctaagtattttgtaattttccttgtgatttattctttgatccattggtttaacagtgtgttaattttcatgtatttgtgagttttctagttttccttctgatattgatttctagtttcattcaattgtggtcagagagaacgtactttatatgactccagcctggctgacagagcgagactgtctctaaaaaaaaaagactcaagtggaccctacaatgaagcctacacatcccaatagaagccccttcttatgctgagggaagcagccctcagaacatgatagcttgtatccagcagagtggcacgtgctggcacacctcacagaagcaccctggccctggatgcctgcaacctcagaagagtgcagctcccagagggaggcagccatccatctgggatggtcctaagcatggaatcctaactcctgattccgtctcctatttcttgcttggctacgccagttcccaaatctggtagatgtccatgcccatgtgctcctgctgggactcaattcaggctatgtatgactatgaagtcaggctcatctgcttactggctgtgtgaactttttgtatcttggttttcttcatccatgaaatccaagtaatactacctaattgttactgtggagattaagttcaaatgcaatgtatagtaatattaagcaatttctagttattattctagccagtaatggacttcagaatcttttattacacaatataagaatatgtatgtaaagacattttggaatttcctggatgagaaggaagtctgggctgggcatggtggctcacgcctgtaaccctagcactttaggaaatcgaggcgagtggatcacttaagctcaggagttcaaggccagcctgggcaacatggcaaaaccccatttctacaaaaaatacaaaaattagctgggcatggtggcacccgcctgtagtccagctacttgaggctgagatgggaggatgagggaggtcggggctgcagtgagccaagatcacgccactgcactccagcaccctgggcgacagagtgagaccctgtctcaaaaaaaaaaaaaaaaaaagattgggccaaaatactgtgataaaatagcaggcctgctgataaaagtttatctgaatgcattgagaggaaaagtccagacctaggactagttatggcagttggagagaaagaacatcgggatgtttgaaaatatgccattgactatcttaactactgtaattttatcatttccaacgtcatctaactggggactagaacaaactgtgaattcactttcagcaaccagagggcgctaatccacacccacatcgctctgccctgttccacccagcaggggcaacaaggatataacttggggttctcggtattcttcctttagtcctgacacaggcagccttgcactttgtagcagcaggagggcacttgctttaagcatatctttcgaaaggcatccattgagagaataatgcattctccccttgctgtgtatgacatggaacagtatgaccattgcactagctttgtttttggtttgttttgtttttttttaattccagggggttggttggttggttgaagagccaaaattttaaccatttttaagcatataatttgggggtatcagttactggatctaagcatgtccactctacacgcntttttttttttttttttttttatttttgtggagagagagtggggctctgtgtgcctctgtgtttcccccggggtgtgccctgtgaggggggcgtgtttctctcgcggcctcaccggtgcaccctctctgtgcctcccccgagtttcaggccaattctccttctgtgcccctcggccctctcccgagtgttgggctgtgggcacaccgccgggtgtgtggtgtgcccccacgcccccagccttatttgtggtgcttatttttagagtgctgagagagacacggggtttcccaccatgtgtgtggcgccgggggtggccttcaatacccccaaaaccttcagttgtctcccgggccactttgggcctcccccaatgg

SEQ ID NO: 100092 - DNA, 2571 bp, Homo sapiens
cttgttggcctactggctctttttgacagcccccagtgcgaaaggctgccagcatgtcatcagtgagccccatccagatccccagtcgcctcccgctgctgctcacccacgagggcgtcctgctgcccggctccaccatgcgcaccagcgtggactcggcccgcaacctgcagctggtgcggagccgccttctgaagggcacgtcgctgcaaagcaccatcctgggcgtcatccccaacacgcctgaccccgccagcgacgcgcaggacctgccgccgctgcacaggattggcacagctgcactggccgttcaggttgtgggcagtaactggcccaagccccactacactctgttgattacaggcctatgccgtttccagattgtacaggtcttaaaagagaagccatatcccattgctgaagtggagcagttggaccgacttgaggagtttcccaacacctgtaaaatgagggaggagctaggagaactatcagagcagttttacaaatatgcagtacaattggttgaaatgttggatatgtctgtccctgcagttgctaaattgagacgtcttttagatagtcttccaagggaagctttaccagacatcttgacatcaattatccgaacaagcaacaaagagaaactccagattttagatgctgtgagcctagaggagcggttcaagatgactataccactgcttgtcagacaaattgaaggcctgaaattgcttcaaaaaaccagaaaacccaagcaagatgatgataagagggttatagcaatacgccctattaggagaattacacatatctcaggtactttagaagatgaagatgaagatgaagataatgatgacattgtcatgctagagaaaaaaatacgaacatctagtatgccagagcaggcccataaagtctgtgtcaaagagataaagagactcaaaaaaatgcctcagtcaatgccagaatatgctctgactagaaattatttggaacttatggtagaacttccttggaacaaaagtacaactgaccgcctggacattagggcagcccggattcttctggataatgaccattacgccatggaaaaattgaagaaaagagtactggaatacttggctgtcagacagctcaaaaataacctgaagggcccaatcctatgctttgttggccctcctggagttggtaaaacaagtgtgggaagatcagtggccaagactctaggtcgagagttccacaggattgcacttggaggagtatgtgatcagtctgacattcgaggacacaggcgcacctatgttggcagcatgcctggtcgcatcatcaacggcttgaagactgtgggagtgaacaacccagtgttcctattagatgaggttgacaaactgggaaaaagtctacagggtgatccagcagcagctctgcttgaggtgttggatcctgaacaaaaccataacttcacagatcattatctaaatgtggcctttgacctttctcaagttctttttatagctactgccaacaccactgctaccattccagctgccttgttggacagaatggagatcattcaggttccaggttatacacaggaggagaagatagagattgcccataggcacttgatccccaagcagctggaacaacatgggctgactccacagcagattcagataccccaggtcaccactcttgacatcatcaccaggtataccagagaggcaggggttcgttctctggatagaaaacttggggccatttgccgagctgtggccgtgaaggtggcagaaggacagcataaggaagccaagttggaccgttctgatgtgactgagagagaaggttgcagagaacacatcttagaagatgaaaaacctgaatctatcagtgacactactgacttggctctaccacctgaaatgccgattttgattgatttccatgctctgaaagacatccttgggcccccgatgtatgaaatggaggtatctcagcgtttgagtcagccaggagtagcaataggtttggcttggactcccttaggtggagaaatcatgttcgtggaggcgagtcgaatggatggcgagggccagttaactctgaccggccagctcggggacgtgatgaaggagtccgcccacctcgctatcagctggctccgcagcaacgcaaagaagtaccagctgaccaatgcttttggaagttttgatcttcttgacaacacagacatccatctgcacttcccagctggagctgtcacaaaagatggaccatctgctggagttaccatagtaacctgtctcgcctcactttttagtgggcggctggtacgttcagatgtagccatgactggagaaattacactgagaggtcttgttcttccagtaagtatgaaaaaacaatttatatggttattttttatttaatttttgaaaattaatattatttttaaatacgggtttgccttctttctatgaaaaccttggttttaagtatatattatatttttatgcctgtaactaattcatattttaaaattttgatcaaataaaagaaaaactgaca

SEQ ID NO: 100093 - DNA, 1421 bp, Homo sapiens
  misc_feature (1046)..(1046): n is a, c, g, or t
tacaaccactaaaattcgcggccgcgtcgacgtaatattaagcaatttctagttattattctagccagtaatggacttcagaatcttttattacacaatataagaatatgtatgtaaagacattttggaatttcctggatgagaaggaagtctgggctgggcatggtggctcacgcctgtaaccctagcactttaggaaatcgaggcgagtggatcacttaagctcaggagttcaaggccagcctgggcaacatggcaaaaccccatttctacaaaaaatacaaaaattagctgggcatggtggcacccgcctgtagtccagctacttgaggctgagatgggaggatgagggaggtcggggctgcagtgagccaagatcacgccactgcactccagcaccctgggcgacagagtgagaccctgtctcaaaaaaaaaaaaaaaaaaagattgggccaaaatactgtgataaaatagcaggcctgctgataaaagtttatctgaatgcattgagaggaaaagtccagacctaggactagttatggcagttggagagaaagaacatcgggatgtttgaaaatatgccattgactatcttaactactgtaattttatcatttccaacgtcatctaactggggactagaacaaactgtgaattcactttcagcaaccagagggcgctaatccacacccacatcgctctgccctgttccacccagcaggggcaacaaggatataacttggggttctcggtattcttcctttagtcctgacacaggcagccttgcactttgtagcagcaggagggcacttgctttaagcatatctttcgaaaggcatccattgagagaataatgcattctccccttgctgtgtatgacatggaacagtatgaccattgcactagctttgtttttggtttgttttgtttttttttaattccagggggttggttggttggttgaagagccaaaattttaaccatttttaagcatataatttgggggtatcagttactggatctaagcatgtccactctacacgcntttttttttttttttttttttatttttgtggagagagagtggggctctgtgtgcctctgtgtttcccccggggtgtgccctgtgaggggggcgtgtttctctcgcggcctcaccggtgcaccctctctgtgcctcccccgagtttcaggccaattctccttctgtgcccctcggccctctcccgagtgttgggctgtgggcacaccgccgggtgtgtggtgtgcccccacgcccccagccttatttgtggtgcttatttttagagtgctgagagagacacggggtttcccaccatgtgtgtggcgccgggggtggccttcaatacccccaaaaccttcagttgtctcccgggccactttgggcctcccccaatgg

SEQ ID NO: 100094 - DNA, 485 bp, Homo sapiens
tacagttcttccaatatcatgggcaacttgtagccagaattaagtagaagataagattagaattgaatataataacttttgatttatcatagtgccttttaaatacatagtacctctttgctatattatagtgatagctaaatgatcttttcacattcctaagttttgatttctgaatggcgtcgctcctgcctcctgacatctcacactgtgaatgtgctacttgctttctctaggcgcacctatgttggcagcatgcctggtcgcatcatcaacggcttgaagactgtgggagtgaacaacccagtgttcctattagatgaggttgacaaactgggaaaaagtctacagggtgatccagcagcagctctgcttgagtaagatttggaaaattccctgtctgtcttcatactggaagagtatggaggagggttgataatcatattcaagtgatatacacagtggtgtagctttagttatgggaa

SEQ ID NO: 100095 - DNA, 819 bp, Homo sapiens
aaggctaggtacgaggctgggtttgaatcggccgaggccgatgtatgaaatggaggtatctcagcgtttgagtcagccaggagtagcaataggtttggcttggactcccttaggtggagaaatcatgttcgtggaggcgagtcgaatggatggcgagggccagttaactctgaccggccagctcggggacgtgatgaaggagtccgcccacctcgctatcagctggctccgcagcaacgcaaagaagtaccagctgaccaatgcttttggaagttttgatcttcttgacaacacagacatccatctgcacttcccagctggagctgtcacaaaagatggaccatctgctggagttaccatagtaacctgtctcgcctcactttttagtgggcggctggtacgttcagatgtagccatgactggagaaattacactgagaggtcttgttcttccagtgggtggaattaaagacaaagtgctggcggcacacagagcgggactgaagcaagtcattattcctcggagaaatgaaaaagaccttgagggaatcccaggcaacgtacgacaggatttaagttttgtcacagcaagctgcctggatgaggttcttaatgcagcttttgatggtggctttactgtcaagaccagacctggtctgttaaatagcaaactgtaggtccaaatctcaattttttagaattttaagttatgaagtgctcaggtctggccgtgattttccccttgggttgccgtgcctgttttactatccccgggtaacccgtggccggtgtgaaaaagggtcacgtgacactttcttgc

SEQ ID NO: 100096 - DNA, 5240 bp, Homo sapiens
  misc_feature (4865)..(4865): n is a, c, g, or t
cttgttggcctactggctctttttgacagcccccagtgcgaaaggctgccagcatgtcatcagtgagccccatccagatccccagtcgcctcccgctgctgctcacccacgagggcgtcctgctgcccggctccaccatgcgcaccagcgtggactcggcccgcaacctgcagctggtgcggagccgccttctgaagggcacgtcgctgcaaagcaccatcctgggcgtcatccccaacacgcctgaccccgccagcgacgcgcaggacctgccgccgctgcacaggattggcacagctgcactggccgttcaggttgtgggcagtaactggcccaagccccactacactctgttgattacaggcctatgccgtttccagattgtacaggtcttaaaagagaagccatatcccattgctgaagtggagcagttggaccgacttgaggagtttcccaacacctgtaaaatgagggaggagctaggagaactatcagagcagttttacaaatatgcagtacaattggttgaaatgttggatatgtctgtccctgcagttgctaaattgagacgtcttttagatagtcttccaagggaagctttaccagacatcttgacatcaattatccgaacaagcaacaaagagaaactccagattttagatgctgtgagcctagaggagcggttcaagatgactataccactgcttgtcagacaaattgaaggcctgaaattgcttcaaaaaaccagaaaacccaagcaagatgatgataagagggttatagcaatacgccctattaggagaattacacatatctcaggtactttagaagatgaagatgaagatgaagataatgatgacattgtcatgctagagaaaaaaatacgaacatctagtatgccagagcaggcccataaagtctgtgtcaaagagataaagagactcaaaaaaatgcctcagtcaatgccagaatatgctctgactagaaattatttggaacttatggtagaacttccttggaacaaaagtacaactgaccgcctggacattagggcagcccggattcttctggataatgaccattacgccatggaaaaattgaagaaaagagtactggaatacttggctgtcagacagctcaaaaataacctgaagggcccaatcctatgctttgttggccctcctggagttggtaaaacaagtgtgggaagatcagtggccaagactctaggtcgagagttccacaggattgcacttggaggagtatgtgatcagtctgacattcgaggacacaggcgcacctatgttggcagcatgcctggtcgcatcatcaacggcttgaagactgtgggagtgaacaacccagtgttcctattagatgaggttgacaaactgggaaaaagtctacagggtgatccagcagcagctctgcttgagctttctcaagttctttttatagctactgccaacaccactgctaccattccagctgccttgttggacagaatggagatcattcaggttccaggttatacacaggaggagaagatagagattgcccataggcacttgatccccaagcagctggaacaacatgggctgactccacagcagattcagataccccaggtcaccactcttgacatcatcaccaggtataccagagaggcaggggttcgttctctggatagaaaacttggggccatttgccgagctgtggccgtgaaggtggcagaaggacagcataaggaagccaagttggaccgttctgatgtgactgagagagaaggttgcagagaacacatcttagaagatgaaaaacctgaatctatcagtgacactactgacttggctctaccacctgaaatgccgattttgattgatttccatgctctgaaagacatccttgggcccccgatgtatgaaatggaggtatctcagcgtttgagtcagccaggagtagcaataggtttggcttggactcccttaggtggagaaatcatgttcgtggaggcgagtcgaatggatggcgagggccagttaactctgaccggccagctcggggacgtgatgaaggagtccgcccacctcgctatcagctggctccgcagcaacgcaaagaagtaccagctgaccaatgcttttggaagttttgatcttcttgacaacacagacatccatctgcacttcccagctggagctgtcacaaaagatggaccatctgctggagttaccatagtaacctgtctcgcctcactttttagtgggcggctggtacgttcagatgtagccatgactggagaaattacactgagaggtcttgttcttccagtgggtggaattaaagacaaagtgctggcggcacacagagcgggactgaagcaagtcattattcctcggagaaatgaaaaagaccttgagggaatcccaggcaacgtacgacaggatttaagttttgtcacagcaagctgcctggatgaggttcttaatgcagcttttgatggtggctttactgtcaagaccagacctggtctgttaaatagcaaactgtaggtccaaatctcaattttttagaattttaagttatgaagtgctcaaaggtactgacacagttgattttattcacaccattaggggtatgcaagatgtccctgttttataaacataatcacaacagtaataaacctcaagtagtggctagtgtttagtatagaaatataagatgttgatttagtaaactgataaaaatcgaattcttgtctttttagtgggatccttactgtccctggaaagatatagcatagtggttctcagcacagtctccagaacagaagcatctgtagtacctggtaacttgttagaaatgtacattctcaggctccacagcaggccgcctgaatcaaatcctgggaggtggggacagaaatctgtgttttaagaagccttccaggtaattctgctgcacactcaagttcaggaaccaccggtatagaccattaccttagtggatttacctgtagagtttattggatcctgaaaccaatcaattacttagaactaggcaaagatgaaagtatagccaactattcttggctatatatatatattcaagtgggccgggcgtgatggctcacacctgtaattccagcactttgggaggtcgaggtaggcagatcaccgagcccaagagttcaagacaatcctggccaacggcgaaactctgtctctacaaaaaatatacaggcgtgttagcatgtgcctgtaatcccagcttcttgggaagctgaggcacaagaattgcctgaacccaggaggtggaggttgcagtgagctgggatcgcgccattgcactccagcctggctgacagagcgagactgtctctaaaaaaaaaagactcaagtggaccctacaatgaagcctacacatcccaatagaagccccttcttatgctgagggaagcagccctcagaacatgatagcttgtatccagcagagtggcacgtgctggcacacctcacagaagcaccctggccctggatgcctgcaacctcagaagagtgcagctcccagagggaggcagccatccatctgggatggtcctaagcatggaatcctaactcctgattccgtctcctatttcttgcttggctacgccagttcccaaatctggtagatgtccatgcccatgtgctcctgctgggactcaattcaggctatgtatgactatgaagtcaggctcatctgcttactggctgtgtgaactttttgtatcttggttttcttcatccatgaaatccaagtaatactacctaattgttactgtggagattaagttcaaatgcaatgtatagtaatattaagcaatttctagttattattctagccagtaatggacttcagaatcttttattacacaatataagaatatgtatgtaaagacattttggaatttcctggatgagaaggaagtctgggctgggcatggtggctcacgcctgtaaccctagcactttaggaaatcgaggcgagtggatcacttaagctcaggagttcaaggccagcctgggcaacatggcaaaaccccatttctacaaaaaatacaaaaattagctgggcatggtggcacccgcctgtagtccagctacttgaggctgagatgggaggatgagggaggtcggggctgcagtgagccaagatcacgccactgcactccagcaccctgggcgacagagtgagaccctgtctcaaaaaaaaaaaaaaaaaaagattgggccaaaatactgtgataaaatagcaggcctgctgataaaagtttatctgaatgcattgagaggaaaagtccagacctaggactagttatggcagttggagagaaagaacatcgggatgtttgaaaatatgccattgactatcttaactactgtaattttatcatttccaacgtcatctaactggggactagaacaaactgtgaattcactttcagcaaccagagggcgctaatccacacccacatcgctctgccctgttccacccagcaggggcaacaaggatataacttggggttctcggtattcttcctttagtcctgacacaggcagccttgcactttgtagcagcaggagggcacttgctttaagcatatctttcgaaaggcatccattgagagaataatgcattctccccttgctgtgtatgacatggaacagtatgaccattgcactagctttgtttttggtttgttttgtttttttttaattccagggggttggttggttggttgaagagccaaaattttaaccatttttaagcatataatttgggggtatcagttactggatctaagcatgtccactctacacgcntttttttttttttttttttttatttttgtggagagagagtggggctctgtgtgcctctgtgtttcccccggggtgtgccctgtgaggggggcgtgtttctctcgcggcctcaccggtgcaccctctctgtgcctcccccgagtttcaggccaattctccttctgtgcccctcggccctctcccgagtgttgggctgtgggcacaccgccgggtgtgtggtgtgcccccacgcccccagccttatttgtggtgcttatttttagagtgctgagagagacacggggtttcccaccatgtgtgtggcgccgggggtggccttcaatacccccaaaaccttcagttgtctcccgggccactttgggcctcccccaatgg

SEQ ID NO: 100097 - DNA, 4381 bp, Homo sapiens
cttgttggcctactggctctttttgacagcccccagtgcgaaaggctgccagcatgtcatcagtgagccccatccagatccccagtcgcctcccgctgctgctcacccacgagggcgtcctgctgcccggctccaccatgcgcaccagcgtggactcggcccgcaacctgcagctggtgcggagccgccttctgaagggcacgtcgctgcaaagcaccatcctgggcgtcatccccaacacgcctgaccccgccagcgacgcgcaggacctgccgccgctgcacaggattggcacagctgcactggccgttcaggttgtgggcagtaactggcccaagccccactacactctgttgattacaggcctatgccgtttccagattgtacaggtcttaaaagagaagccatatcccattgctgaagtggagcagttggaccgacttgaggagtttcccaacacctgtaaaatgagggaggagctaggagaactatcagagcagttttacaaatatgcagtacaattggttgaaatgttggatatgtctgtccctgcagttgctaaattgagacgtcttttagatagtcttccaagggaagctttaccagacatcttgacatcaattatccgaacaagcaacaaagagaaactccagattttagatgctgtgagcctagaggagcggttcaagatgactataccactgcttgtcagacaaattgaaggcctgaaattgcttcaaaaaaccagaaaacccaagcaagatgatgataagagggttatagcaatacgccctattaggagaattacacatatctcaggtactttagaagatgaagatgaagatgaagataatgatgacattgtcatgctagagaaaaaaatacgaacatctagtatgccagagcaggcccataaagtctgtgtcaaagagataaagagactcaaaaaaatgcctcagtcaatgccagaatatgctctgactagaaattatttggaacttatggtagaacttccttggaacaaaagtacaactgaccgcctggacattagggcagcccggattcttctggataatgaccattacgccatggaaaaattgaagaaaagagtactggaatacttggctgtcagacagctcaaaaataacctgaagggcccaatcctatgctttgttggccctcctggagttggtaaaacaagtgtgggaagatcagtggccaagactctaggtcgagagttccacaggattgcacttggaggagtatgtgatcagtctgacattcgaggacacaggcgcacctatgttggcagcatgcctggtcgcatcatcaacggcttgaagactgtgggagtgaacaacccagtgttcctattagatgaggttgacaaactgggaaaaagtctacagggtgatccagcagcagctctgcttgaggtgttggatcctgaacaaaaccataacttcacagatcattatctaaatgtggcctttgacctttctcaagttctttttatagctactgccaacaccactgctaccattccagctgccttgttggacagaatggagatcattcaggttccaggttatacacaggaggagaagatagagattgcccataggcacttgatccccaagcagctggaacaacatgggctgactccacagcagattcagataccccaggtcaccactcttgacatcatcaccaggtataccagagaggcaggggttcgttctctggatagaaaacttggggccatttgccgagctgtggccgtgaaggtggcagaaggacagcataaggaagccaagttggaccgttctgatgtgactgagagagaaggttgcagagaacacatcttagaagatgaaaaacctgaatctatcagtgacactactgacttggctctaccacctgaaatgccgattttgattgatttccatgctctgaaagacatccttgggcccccgatgtatgaaatggaggtatctcagcgtttgagtcagccaggagtagcaataggtttggcttggactcccttaggtggagaaatcatgttcgtggaggcgagtcgaatggatggcgagggccagttaactctgaccggccagctcggggacgtgatgaaggagtccgcccacctcgctatcagctggctccgcagcaacgcaaagaagtaccagctgaccaatgcttttggaagttttgatcttcttgacaacacagacatccatctgcacttcccagctggagctgtcacaaaagatggaccatctgctggagttaccatagtaacctgtctcgcctcactttttagtgggcggctggtacgttcagatgtagccatgactggagaaattacactgagaggtcttgttcttccagtgggtggaattaaagacaaagtgctggcggcacacagagcgggactgaagcaagtcattattcctcggagaaatgaaaaagaccttgagggaatcccaggcaacgtacgacaggatttaagttttgtcacagcaagctgcctggatgaggttcttaatgcagcttttgatggtggctttactgtcaagaccagacctggtctgttaaatagcaaactgtaggtccaaatctcaattttttagaattttaagttatgaagtgctcaaaggtactgacacagttgattttattcacaccattaggggtatgcaagatgtccctgttttataaacataatcacaacagtaataaacctcaagtagtggctagtgtttagtatagaaatataagatgttgatttagtaaactgataaaaatcgaattcttgtctttttagtgggatccttactgtccctggaaagatatagcatagtggttctcagcacagtctccagaacagaagcatctgtagtacctggtaacttgttagaaatgtacattctcaggctccacagcaggccgcctgaatcaaatcctgggaggtggggacagaaatctgtgttttaagaagccttccaggtaattctgctgcacactcaagttcaggaaccaccggtatagaccattaccttagtggatttacctgtagagtttattggatcctgaaaccaatcaattacttagaactaggcaaagatgaaagtatagccaactattcttggctatatatatatattcaagtgggccgggcgtgatggctcacacctgtaattccagcactttgggaggtcgaggtaggcagatcaccgagcccaagagttcaagacaatcctggccaacggcgaaactctgtctctacaaaaaatatacaggcgtgttagcatgtgcctgtaatcccagcttcttgggaagctgaggcacaagaattgcctgaacccaggaggtggaggttgcagtgagctgggatcgcgccattgcactccagcctggctgacagagcgagactgtctctaaaaaaaaaagactcaagtggaccctacaatgaagcctacacatcccaatagaagccccttcttatgctgagggaagcagccctcagaacatgatagcttgtatccagcagagtggcacgtgctggcacacctcacagaagcaccctggccctggatgcctgcaacctcagaagagtgcagctcccagagggaggcagccatccatctgggatggtcctaagcatggaatcctaactcctgattccgtctcctatttcttgcttggctacgccagttcccaaatctggtagatgtccatgcccatgtgctcctgctgggactcaattcaggctatgtatgactatgaagtcaggctcatctgcttactggctgtgtgaactttttgtattcttatggtttttcgttacagtaccgaatgaagagtgcccaaggattaagtatgctagacctaaattggttcagctgctggacgaattaagatgtcaaagtgccaaatggtacataggtaaatagttaaggctacttgtacccagagtaattatttctagtgccacggtaatggacttcagaatcttttattacacaatataagaatatgtatgtaaagacattttggaatttcctggatgagaaggaagtctgggctgggcatggtggctcacgcctgtaaccctagcactttaggaaatcgaggcgagtggatcacttaagctcaggagttcaaggccagcctgggcaacatggcaaaaccccatttctacaaaaaatacaaaaattagctgggcatggtggcacccgcctgtagtccagctacttgaggctgagatgggaggatgagggaggtcggggctgcagtgagccaagatcacgccactgcactccaggcatacctgccaagaggcccttgccgggctgtgtgtggggtgtgtggcggtggt

SEQ ID NO: 100098 - DNA, 2755 bp, Homo sapiens
cttgttggcctactggctctttttgacagcccccagtgcgaaaggctgccagcatgtcatcagtgagccccatccagatccccagtcgcctcccgctgctgctcacccacgagggcgtcctgctgcccggctccaccatgcgcaccagcgtggactcggcccgcaacctgcagctggtgcggagccgccttctgaagggcacgtcgctgcaaagcaccatcctgggcgtcatccccaacacgcctgaccccgccagcgacgcgcaggacctgccgccgctgcacaggattggcacagctgcactggccgttcaggttgtgggcagtaactggcccaagccccactacactctgttgattacaggcctatgccgtttccagattgtacaggtcttaaaagagaagccatatcccattgctgaagtggagcagttggaccgacttgaggagtttcccaacacctgtaaaatgagggaggagctaggagaactatcagagcagttttacaaatatgcagtacaattggttgaaatgttggatatgtctgtccctgcagttgctaaattgagacgtcttttagatagtcttccaagggaagctttaccagacatcttgacatcaattatccgaacaagcaacaaagagaaactccagattttagatgctgtgagcctagaggagcggttcaagatgactataccactgcttgtcagacaaattgaaggcctgaaattgcttcaaaaaaccagaaaacccaagcaagatgatgataagagggttatagcaatacgccctattaggagaattacacatatctcaggtactttagaagatgaagatgaagatgaagataatgatgacattgtcatgctagagaaaaaaatacgaacatctagtatgccagagcaggcccataaagtctgtgtcaaagagataaagagactcaaaaaaatgcctcagtcaatgccagaatatgctctgactagaaattatttggaacttatggtagaacttccttggaacaaaagtacaactgaccgcctggacattagggcagcccggattcttctggataatgaccattacgccatggaaaaattgaagaaaagagtactggaatacttggctgtcagacagctcaaaaataacctgaagggcccaatcctatgctttgttggccctcctggagttggtaaaacaagtgtgggaagatcagtggccaagactctaggtcgagagttccacaggattgcacttggaggagtatgtgatcagtctgacattcgaggacacaggcgcacctatgttggcagcatgcctggtcgcatcatcaacggcttgaagactgtgggagtgaacaacccagtgttcctattagatgaggttgacaaactgggaaaaagtctacagggtgatccagcagcagctctgcttgaggtgttggatcctgaacaaaaccataacttcacagatcattatctaaatgtggcctttgacctttctcaagttctttttatagctactgccaacaccactgctaccattccagctgccttgttggacagaatggagatcattcaggttccaggttatacacaggaggagaagatagagattgcccataggcacttgatccccaagcagctggaacaacatgggctgactccacagcagattcagataccccaggtcaccactcttgacatcatcaccaggtataccagagaggcaggggttcgttctctggatagaaaacttggggccatttgccgagctgtggccgtgaaggtggcagaaggacagcataaggaagccaagttggaccgttctgatgtgactgagagagaaggttgcagagaacacatcttagaagatgaaaaacctgaatctatcagtgacactactgacttggctctaccacctgaaatgccgattttgattgatttccatgctctgaaagacatccttgggcccccgatgtatgaaatggaggtatctcagcgtttgagtcagccaggagtagcaataggtttggcttggactcccttaggtggagaaatcatgttcgtggaggcgagtcgaatggatggcgagggccagttaactctgaccggccagctcggggacgtgatgaaggagtccgcccacctcgctatcagctggctccgcagcaacgcaaagaagtaccagctgaccaatgcttttggaagttttgatcttcttgacaacacagacatccatctgcacttcccagctggagctgtcacaaaagatggaccatctgctggagttaccatagtaacctgtctcgcctcactttttagtgggcggctggtacgttcagatgtagccatgactggagaaattacactgagaggtcttgttcttccagtgggtggaattaaagacaaagtgctggcggcacacagagcgggactgaagcaagtcattattcctcggagaaatgaaaaagaccttgagggaatcccaggcaacgtacgacaggatttaagttttgtcacagcaagctgcctggatgaggttcttaatgcagcttttgatggtggctttactgtcaagaccagacctggtctgttaaatagcaaactgtaggtccaaatctcaattttttagaattttaagttatgaagtgctcaggtctggccgtgattttccccttgggttgccgtgcctgttttactatccccgggtaacccgtggccggtgtgaaaaagggtcacgtgacactttcttgc

SEQ ID NO: 100099 - DNA, 446 bp, Homo sapiens
ccagagcagcggcctgggagccaccatgcgacccagccctaaatgccttgcttatgatgaaatctcttgaaaatagcccaacttctgtctcctgcctgtgaagtaagcattctcctctaattctcaaagctgggattttgtgagaaacttaagttgtcaggagcacactgggggaaacataattggaaatacatgttatgacccattagaatgacaagttgtatatatccattgtaccctaaggcatccaatatattctgctgtgtttgtaagtactttaatcatgttgaagaatgacatactgaaacttgtccctgagattcacacttgatctcaagttgattgagtttagggaaaagggaaaaaaaaaacacattagcgtgttatttttgacattatatgagggttttcatgggtgtgaactgtgagggaggtgtgcaagacat

SEQ ID NO: 100100 - DNA, 223 bp, Homo sapiens
gaagggtgatgcggttggagagcaggggtgccaaatgttccctctcccccaaccagcagcctcaggagaagacataactgctgggggccccttggacctaaaccaggctgtcctacgcactccctcaatgggactggtcaccctcttcttgcctgcattcctctataacgaagggaatgtgtaagctaagaaaactcgcccggcccatggcaccgatttacta

SEQ ID NO: 100101 - DNA, 572 bp, Homo sapiens
tcatgagggctccaaccccatgacccaaatagttcccactaggtcccaactcctgacaccaccacattgaggattaaatttcaagtgagtttcagaggatataaactcaaaccatagcagcaaggaactgaatgtagccaataacctgaatgagcttggaagcagcttcttctccagagcctccagaaagaagttcagtccacctgagaccttgattctagcctcgtaaggccctaatacggttttcttctatgtacccacccaaatctcatgtcgaattgtaatccccatgtattgaaggaggggcctggtgggagatgactgaatcatgggaatgaattacccccttgctgttctcgtgatagagttctcatgagatttggttgtttgaacgtgtgtagcacttcctcctttactctctctctctcctgctctggccatgtgaagactgtgcctgcttccccttcaccttctgccttgatggtacatttcttggggcctccctagccttgcctcctgtacaccctgtggaactgtgagtcaattaaacctcttttcttttaaattaccca

SEQ ID NO: 100102 - DNA, 246 bp, Homo sapiens
ttttttttttttgatacttcacattcttaccccaaaattcatttagggtatatgttctcaccctaaaattgggcaaaaccaaaatatttcatgcaatctaaaaataatctgtatttaaccatgttcatcatcattcctaggtgggcaattaaaccactattaaaccatagtggtatggatgtaccgacataaactactaagtagtaaatagaacttgctaacaaataccgctatgcagcaattcac

SEQ ID NO: 100103 - DNA, 774 bp, Homo sapiens
ggtggctcctgctactgctcaccccacaagccctgactgctaatatctgcccaggccctgtttccttccctagtattcctgtgggctggttagcttgttactcaagagccaccgtgtggagtccatgctcctatagtagcctaaaatgaggaaactgcccttcattaacccaactctagcttgttccaaaacatggagcacagaacattgctgcctgtaacccctggaatggcacaagattatctatttatttatcctttaatcacagctggaggcctcagatatgaatattcaggattggtgaaagaactcaacaatttgactgagtgtcataattgtggcacagggaggaaggaaggacagcatacgaagcccttaatcacacgctacccagataccagcataaggcccgacattctagaacaggggccagctcatggcctacttttctttggccggtaagctaagaatggtttttacatctttaaattgttgtgaaaacaaaacaaaaaacaaagaaaatgccagagacctatgtgacatgcaagcctagaatacttactgtcaggcctctgagcccaagctaagccatcatatcccctgtgacctgcaggtaaacatccagatggccggtttctgccttaactgatgacattccgccacaaaagaagtgaaaatggcctattcctgccttaactgatgacattatcttgtgaaattccttctcctggctcatcctggctcaaaagctcccctactgagcaccttgtgacc

SEQ ID NO: 100104 - DNA, 323 bp, Homo sapiens
tatcagctggtaccttccaccagcaagaccctccagcatgtggataaggttcgggctccaaagtcagaatcacaggagtttgaatcctcagctctgccccttaccagctggctgaccttgaggaggcatcttaacctctgagctgcctcatgtagaaagtggccatatgaggttcttacagctcaaggcctgcagctgcatggaaagtaggcagggaaccaaggcatacgggtggaatttggagtcacctttggttttgaatcctggccctgcctcttagctctctttgggcaagtcacttcactctctactttagctttctc

SEQ ID NO: 100105 - DNA, 344 bp, Homo sapiens
aaaataaaataagaaataaaaagccacccacaggggaaggtgaaaacacagggctggaagctaggcctccttaaacatacctcattttatagacttgactttgcaattaaattattttcaaatttccacaacaaaatttgaaaatgaggccaggcgcggtcatgcctgtaatcccagcactttaggaggctgaggcaggaggatcacttgaggtcagaagttcgagaccagcctgggcaacatggtgaaacctcatctctactaaaaatacaaaaattagccgggtgtggtggcacacagctgtgatcacagctacttgggccttttatcacctacttgggagg

SEQ ID NO: 100106 - DNA, 356 bp, Homo sapiens
ctgagaggccgtgggcctgcgagtcctgtctctgcccctcagcctcctcctacatgagatggagacaatgatccccgtctctgaccctgcacagtctggggctgtgtgaccaggagcaaggcctggagcggagaagttgagggagtggaccctggggtcagttggacctgggtcctactcctgcttctgccatttcctggctgggtgaccttgggcaagtcagtgagctctcagagtctaatatgcggccctcgctgatgctctgcaggggaaggggaaggggaatgatctggagaggcagtgggttctctctatcttgctggctgttgttatgtcacgcccatcccatccccatt

SEQ ID NO: 100107 - DNA, 519 bp, Homo sapiens
gtggtggtggtggcggcagcagtggttgtagtagttgtggcgacggtggtggtggtggccatggtggtaggtgcgacagttgggatgatggggactgttgtggcttcggtggtggcagcaatggcagtagcatcggtactgctcacagcgcccgtcgcacccacggtagtcgggggcaatgtgggaggagctgagagggaaatgtaaaacagccgagtctggttggtttggctgtgcccagcctggacacacggcccccgcgtgcaaggcaggcagcccggtgaggagacggggcttagtcatcaggagcctccccaagcataacggactgggtcagacgggtcgcagcaacagaagacacaaccatgggagaggaagagaatgaagccctgtgtgtgtttcattttcttctcatggtctgcgtggctcgaaacacccagcatgcacccagccaaggatgcgtgaggatgagacgggaagggggcacgggctgaatcgctcagaccccagggatggcat

SEQ ID NO: 100108 - DNA, 540 bp, Homo sapiens
tccacagaaaagccacagggatctttctgaaagcctaagtcgaatcgcgccagccccagctcaaaccttccactggctttccaccacaactagcatggaatgtgacctccttccaccgccctcaggggcctgcaggatgcagctctgattcccctccctcctcgctcgcctccaagctccaccttcacttcactgcagccacagcggccttcttggagaaggaccacatgcacaccaagctcatccccacacacccctccttagagggttatgtgcccccaaatcatcaggtggctatctcctctcatcctttgggtctacgcttcactgtcaccccatcagaatgaccatccaaatcaccttcataagcagccccttcttcacccctgcaccgtccaacacaggagcctcgagccacggaagctacaggacacccaaaaagtggtccagctgagagacgctctaagtaggaaacacactctaggcttagtacagaaaactgagtgtaagttatctcattgacagtttttatatctatta

SEQ ID NO: 100109 - DNA, 297 bp, Homo sapiens
  misc_feature (14)..(14): n is a, c, g, or t
tgaccagaggatcngggatgaggaacgtactagatttaaaaaatgatcacatcattaattacgtgtaaagagatcagattaccaaaatgtaggtgaatgatgagaaaagtcagtaggagcaaaagcaataaatactcttctcccatttgctaccacttacttttgaagttgcttcttgttggtaggtaccaagaaaataaagaggtcatattaaagagacatcaccaggaattatgagtagcaatttcaaacataaaatctgacttaaaaaaagtgtattcatgaaaacacaccaag

SEQ ID NO: 100110 - DNA, 494 bp, Homo sapiens
gactctagatgaagtggccataatagagcagcacattaacagaaataggaaatagtacataaacaatttgtgaagaattttagcacatgctatcccatttaggcctagcaaaaactctgtgatgggggaaactgaagcttagagagtttgaatgaaatttccagctaaaatggtcttattttagctgatttttttaaaggtagtaacattttattttatttagttgacattttgacattccccctctaactttaatacccttaccaaatgtaaaggtaaatacaatctttaaaaagaaattagaaagaaatacaatgcctataatcaggacacacatctcatgtactagaaatgaaacggcaacacaaagccataaggagcactgaagaaagaaatagcgcgtctagaagcagactggggtattgattgcaatggagctccactgctcttgaaaaggcctgaaaaaaattctgccccattcccaagagcctcgt

SEQ ID NO: 100111 - DNA, 442 bp, Homo sapiens
ccctcctggttggttcttactgtttgagtcaaaacctcatcaatatatcattgactcctgggttccctcaggtcatttcctaatatctgtccctatccaatgcctctattttatcttgaaaaaaggaccaaaaattatttttagctatggcaaggcacaggccacatggcccctgatggcgtccctgctggttttcaattctctgaagccttgtgtagctttcagagcacacgtatcctaattaccctcctcttcctcagcagaacccatttgagattctaaatgaatactcttagtctctaaagttgcagttagaaactaaaataatgttttttaatatgtaatatgctcctcttggctaattttcttttgactttaatgtgccaatgtaacttcctttaacaggatctatgcatttattaaatctggaaaactatatgta

SEQ ID NO: 100112 - DNA, 335 bp, Homo sapiens
aagccccttgtgaatcagcctcctgctgacactcccctacccatacctaccccatatagcaatcacacacaggaaatctcttgcaagtcaaaggccccatgctctcctgggcctccgtgcctttgcacgtgctgctccctctgcctggtgccttcctgcctggctcactggatcatccttcagaatgcagttcagggagcatttctatatgacatccctgaccatcatgctctggctgaagtgcttgtctatcccttgccatagtccctgccatggctgtatctgatgagtgcgttgatctgtttagcttcacactaggtttagtggagatctgt

SEQ ID NO: 100113 - DNA, 167 bp, Homo sapiens
agaacccatcattgagatatcaaatagctgcatcaaaacttgcctgaagtgtgtttgttcccctgttcttttgccaaatggagctaggcaggcggcataccccaccctcccgggctcagcaattggtcctcaagagctgggtgcttcacttaagttcttctttcagt

SEQ ID NO: 100114 - DNA, 469 bp, Homo sapiens
agaaagagggaatgcagagtgatggaagggtagctgtgaaccttcagctttataatgaaggtagcttgatcatatacgaggtagttatggagattttaagcaaatcttgtttttgatggttacaaaaagtgttctgaattctatcaaatttggaaaacaccactttttctccctccccaatctcttccataattatattgcatataattatcttagtcttccataaattatcatgcatattatgaatctttaagagggaaataggctgggcgctgtggctcacgcctgtaatcccagtactttgggaggctgaggtgggtggatcacctgaggtcagaagtttgagaccagcctggccaacatggtgaaacccagtctctactataaatacaaaaattagatgggtgtggtggtgcatgcctgtaatcctagctacttgggggctgaggcaggagaatcacttgaactc

SEQ ID NO: 100115 - DNA, 403 bp, Homo sapiens
ataaaaaggggattaataatgggtaccggggccatcctaggttacctgtaattaaataaaattacattccacaaagcacttttggcacatagcccaaccccacagtaaacacctattagtaaccttagttcattaactgtttactgtatactctaataaatgtctgatacacacccacacccacctgcacatacacaaatgctcatagtaattatgtaaggcaagtattatctccacatttcagacaggttaacttacacagctattatagtaagtgatagagcagaacttaaaaacccagtatgattcaggtccaaactccttttctttctttatataaccataatatttcaaattaagtaagatttcctatataacgtcctgcctctcatcattatcatca

SEQ ID NO: 100116 - DNA, 380 bp, Homo sapiens
tatttgtatttatttattttgagacggattctcactctgtcactagagtgcagtggcacaatcttgactcactgaaacctccacctcctgggttcaagcgattctcctgcctcagcctcccaagtagctgggactacaggcgcatgccaccatgcccagctaatttttgtatttttagtagagacggggtttcaccaagttggctaggatggtctcaatctcttgacctcgtcatccacccacctcggcctcccaaagtgctgagattacaggggtaagccaccatgcccggccaatggtgtggtaatttctaaggaaaatcaataaaataatattttcatatacatctgaagtgtaatattaataacttttcacagaaa

SEQ ID NO: 100117 - DNA, 706 bp, Homo sapiens
tgcagtttcagtcctgaggccagcgggaccaggaactcaccggaaggaacgaacaactccagatgtgccacctttaagagctgtaacactcaccgttaaggcctgcagcttcactcctgaagtcagcgagaccatgagcccaccagaaagaagaaacccaggacacatctgaaaatatgaaggaacagactccagacacactatctttaagaactgtaacactcactgcgaaggtccgcggcatcattcttgaattcagcgagaccaagaacccaccaattctggacacaatcacaaaattaaacctcctcaaatagagattgacagtaaatgtaatctgtatttctgttcatgccatcattggtagtgaattatttaaatatataaaacattgtcgaataactcgtaacaggacaattacctatctaatttttgctcattataaaatgaaatgtaatctccgtctaataatttaaattgtttttacaagctggtctaacaggaatgtttcttattcttccatatgttcttaacagacttactttgtttttactctttgtcatctttataaaatcacaaatctctacattatgtatttatgcgaaacatacacttctcttggattgtcaaaacgaactttctcccataaaaaacattgtaatatttagctttaatagcctctccccagagtgaaagaaaaccttat

SEQ ID NO: 100118 - DNA, 687 bp, Homo sapiens
cggcatcccaccgccctacgacaagaaaaagcggatggtggttcctgctgccctcaaggtcgtgcgtctgaagcctacaagaaagtttgcctatctggggcgcctggctcatgaggttggctggaagtaccaggcagtacagccaccctggaggagaagaggaaagagaaagccaagatccactaccggaagaagaaacagctcatgaggctacggaaacaggccgagaagaacgtggagaagaaaattgacaaatacacagaggtcctcaagacccacggactcctggtctgagcccaataaagactgttaattcctcaaaaaaaaaaaaaaaaaaaaaaaaaaaaaaaaaaaaaaaaaaaaaaaaaaaaaaaaaaaaaaaaaaaaaaaaaaaaaaaaaaaaaaaaaaaaaaaaaaaaaaaaaaaaaacaaagaaaatgacaagaaaaagagacacacagacaccaacacgaagatcaggagcgagagcgaggcgcgggcgcggcggggcttccagaaagaaagaggagggacgaaaagaagagacaagaaaaactgaaaaatgaagcatagaacgacagatgaaaacaacaaactgaaaagcagtaaagatgaatatatgcagagcggagcaagaacaaagaaaaaaaaacaaaagacaagcaagtagagaaagaagaaaccaca

SEQ ID NO: 100119 - DNA, 539 bp, Homo sapiens
gcggccgcctactactactactgctcgaattcaagcttctaacgatgtacggggacatgaggctacggaaacaggccgagaagaacgtggagaagaaaattgacaaatacacagaggtcctcaagacccacggactcctggtctgagcccaataaagactgttaattcctcaaaaaaaaaaaaaaaaaaaaaaaaaaaaaaaaaaaaaaaaaaaaaaaaaaaaaaaaaaaaaaaaaaaaaaaaaaaaaaaaaaaaaaaaaaaaaaaaaaaaaaaaaaaaaacaaagaaaatgacaagaaaaagagacacacagacaccaacacgaagatcaggagcgagagcgaggcgcgggcgcggcggggcttccagaaagaaagaggagggacgaaaagaagagacaagaaaaactgaaaaatgaagcatagaacgacagatgaaaacaacaaactgaaaagcagtaaagatgaatatatgcagagcggagcaagaacaaagaaaaaaaaacaaaagacaagcaagtagagaaagaagaaaccaca

SEQ ID NO: 100120 - DNA, 806 bp, Homo sapiens
  misc_feature (524)..(524): n is a, c, g, or t
  misc_feature (556)..(556): n is a, c, g, or t
  misc_feature (564)..(564): n is a, c, g, or t
cggcatcccaccgccctacgacaagaaaaagcggatggtggttcctgctgccctcaaggtcgtgcgtctgaagcctacaagaaagtttgcctatctggggcgcctggctcatgaggttggctggaagtaccaggcagtacagccaccctggaggagaagaggaaagagaaagccaagatccactaccggaagaagaaacagctcatgaggctacggaaacaggccgagaagaacgtggagaagaaaattgacaaatacacagaggtcctcaagacccacggactcctggtctgagcccaataaagactgttaattcctcaaaaaaaaaaaaaaaaatgcgttgcctgcccttcctccattgttgccctggaatgtacgggacccaggggcagcagcagtccaggtgccacaggcagccctgggacataggaagctgggagcaaggaaagggtcttagtcactgcctcccgaagttgcttgaaagcactcggagaattgtgcaggtgtcatttatctatgaccantaggaagagcaaccagttactatgagtgaaanggagccanaagactgattggagggccctatcttgtgagtggggcatctgttggactttccacctggtcatatactctgcagctgttagaatgtgcaagcacttggggacagcatgagcttgctgttgtacacagggtatttctagaagcagaaatagactgggaagatgcacaaccaaggggttacaggcatcgcccatgctcctcacctgtattttgtaatcagaaataaattgcttttaaagaaaaaa

SEQ ID NO: 100121 - DNA, 889 bp, Homo sapiens
cggcatcccaccgccctacgacaagaaaaagcggatggtggttcctgctgccctcaaggtcgtgcgtctgaagcctacaagaaagtttgcctatctggggcgcctggctcatgaggttggctggaagtaccaggcagtacagccaccctggaggagaagaggaaagagaaagccaagatccactaccggaagaagaaacagctcatgaggctacggaaacaggccgagaagaacgtggagaagaaaattgacaaatacacagaggtcctcaagacccacggactcctggtctgagcccaataaagactgttaattcctcaaaaaaaaaaaaaaaaaaaaaaaaaaaaaaaaaaaaaaaaaaaaaaaaaaaaaaaaaatgtgtggtggcgcgcgcgcgcccggcgcccccgaagaaaacctttctcaaacacacaccccgcggggggcgcgcgcgcggggcccccctggaggcaacggaacaccaggggcgccaaggcgggtgttcccatagggagaaacccgcgggcgaaagaaagcaaagggcgcgggggagctcccccacaccaaatataaaaaaaaccgcgccgcggggagagaaacaccaggagagggttgtcttggagaaaaatcccacaagaagagggagactctagagagggggcgctcaatacagggggcagcattatacaagagagaggaggcgcgcgcacaggcgagagagcgcgcgagatatctatcacatattataaacgcgccccggaaggagcggtgggggggaggaccaaacacacacagactgaagcacacccaacgcaacccaacaaaaccgaacgagaccacgaagcataccaaacgcaatcgacaatcaccacgacagacgaccgatagc

SEQ ID NO: 100122 - DNA, 387 bp, Homo sapiens
taaaatacccttgttgctgcttttcctccaggtttcgcagtctagggaatctatagcaaagcgagctttctatcaaagcaggtattgccaggaagagatccagaggactggggcttctgttccccaagccacttagaaatgtgctccaaattggttccgttcctggagccgggtctgctttggggttgattgagcagtgaaagaatttgaggatgtgagaatctcccaaactaatcacagtctcctgctggggactgaaacccacatgcattaccatggcagtgtctgaagacatcatgaacccttgaaaactatttcctggatgaatattacactaagtcattatcagtcatttgtgcctgggtgtagatgtgactatttaattct

SEQ ID NO: 100123 - DNA, 821 bp, Homo sapiens
tctttaaccactttccccccccccagtttttcacttgacaccttgtcatgagttacagtggcttgcatcaatcattctgggttcacacagaaaatattttgtggtggttgactatcacatgcgagaaactaagtgccctttgcgggtgactgcgcaggtacctctgatttcttgccaaatcattcagaatgccgcaaatccattaaatctctccacagggaggaaaaagttcccgcattctagagagagaatttatgagttcatttcaatcaccacaaatgaaagccacccttaatattcattagagattttacagtggcaatatgcattatctattcatatgcccctctaaaaggccaatttcccttgaaaccttgcatggctccaagccactctttgtagaaacaatggcctatgtccaagtggaatcaggggaggcaaatggatgacatttccttatccattggtagtaattccactaagccactatggtggctatgagtttctgagctttaaaaattaaaggacagatttggaatgtgcagtcgtgtcattgtatcacttctctgctgtcatctgtgaccatatgtcctaaattgaatagagcttttcggttggcatcacaagagatgacttttgaaactgacatttctttcatttggagaaatgtatatgttggagacataatcctatgagcctgagagcttttcattaatctctgtctttctaccaccatagttcacgccaccatcatctttcatctatttttcccttcaaatctattttcttcactgtatgtagagtgatctttccaaaatatc

SEQ ID NO: 100124 - DNA, 326 bp, Homo sapiens
tggtacctacaaaattactttagggtcatgttatatgtggtcttttactggatggcattggaatgaattaccatttgaggtaacagaattatctttcctagagttctttaaaaataggataaatactggcagagttgtgatgctttgatttaagccaatagaggtcagattttttgatatacataggtcttttgatttagtaagatgaatttattcagaattcaaagatcttttcaaaatacactctcctatatggaggcggtaggatctgaaccaggggaattacaaatggttttaacaggctgaaagaggggttttgaagtaca

SEQ ID NO: 100125 - DNA, 415 bp, Homo sapiens
ataccatatccctgacttcagaaacagatagtgaagtatgcattattttctaactccttttcaggcaatctgtgtttcatgaagcagagtgtaagtgcttttcacagaaaaattccatctgtcttatactaagtattgtttatcccagatccagcattgaaatatctattagtcttagtttttggtcttgatgtgagttttcaccttttttagtggcttcaagggtgtttaatgcaatgttgggaaaaggtacatagaaagaatgtgtaaaggttagcaaaaccctttctctttctgtgtggacaaaatttaccttggattaactttctaattatatttccctagaaacctgtaaatggcagaatgtgaactgtgtaactagcaatgttgtttatagtaaaaataatcctgattg

SEQ ID NO: 100126 - DNA, 651 bp, Homo sapiens
acgtggtacacgcatcgcggagggagcggaggtggttgggtttctgagtttgagtctgtcgctcctggctctcccgacacaacagcggcgcccacctgcccgcaacggactcccaggagcctcgagctcctcatttccaaagctgaactgccccgtgtctgattccgatttctcttgagcgcgtttcggagccggcccagaacagagggaagccagacacaccatacccggcccaacagtggcagggcggctgcgggtgctggtcaagctgggtcacccggcactgagtgacgatcagcaaatactcagtggacgaaatatttgcagtgcagtgaggtgaggggcataaccgcggagcgtattcgaagagatgagagagactggggattaggccaggcttgaagggaagaatggtttgagcaccgaggacaagaattaattccccaggcctgggttccagccttgtgcggctatcacgtgcttgaaacctggctagtccggagtgagatgcgctttacgtgtaaaatacaggattccaaagacgtcgtataaaataatttgtatattgtttgcatgttaggtaacatttttaatgtattggattaaataaaatgcattaaaattatttttacattccttttaaaaaaaaaa

SEQ ID NO: 100127 - DNA, 625 bp, Homo sapiens
acgtggtacacgcatcgcggagggagcggaggtggttgggtttctgagtttgagtctgtcgctcctggctctcccgacacaacagcggcgcccacctgcccgcaacggactcccaggagcctcgagctcctcatttccaaagctgaactgccccgtgtctgattccgatttctcttgagcgcgtttcggagccggcccagaacagagggaagccagacacaccatacccggcccaacagtggcagggcggctgcgggtgctggtcaagctgggtcacccggcactgagtgacgatcagcaaatactcagtggacgaaatatttgcagtgcagtgaggtgaggggcataaccgcggagcgtattcgaagagatgagagagactggggattaggccaggcttgaagggaagaatggtttgagcaccgaggacaagaattaattccccaggcctgggttccagccttgtgcggctatcacgtgcttgaaacctggctagtccggagtgagatgcgctttacgtgtaaaatacaggattccaaagacgtcgtataaaataatttgtatattgtttgcatgttaggtaacatttttaatgtattggattaaataaaatgcattaaaatta

SEQ ID NO: 100128 - DNA, 711 bp, Homo sapiens
acgtggtacacgcatcgcggagggagcggaggtggttgggtttctgagtttgagtctgtcgctcctggctctcccgacacaacagcggcgcccacctgcccgcaacggactcccaggagcctcgagctcctcatttccaaagctgaactgccccgtgtctgattccgatttctcttgagcgcgtttcggagccggcccagaacagagggaagccagacacaccatacccggcccaacagtggcagggcggctgcgggtgctggtcaagctgggtcacccggcactgagtgacgatcagcaaatactcagtggacgaaatatttgcagtgcagtgaggtgaggggcataaccgcggagcgtattcgaagagatgagagagactggggattaggccaggcttgaagggaagaatggtttgagcaccgaggacaagaattaattccccaggcctgggttccagccttgtgcggctatcacgtgcttgaaacctggctagtccggagtgagatgcgctttacgtgtaaaatacaggattccaaagacgtcgtataaaataatttgtatattgtttgcatgttaggtaacatttttaatgtattggattaaataaaatgcattaaaattaaatattacagttaatgaccgcgtttacacgtgtgactgagacaccctgcgtacccactaatcgcttgagactatcccttggcagcg

SEQ ID NO: 100129 - DNA, 621 bp, Homo sapiens
acacgggaaagaccgtcgacgattcaattacctcccaccaggtccctcccacaacacataggaattatgggagctgcaattcaagatgacaattgggtggggacacagcaaaaccacatcacatgctgagctgtagcaggtgaataaaccactgagactacgaacctctgtcctctgaagaagatgccattttctcaaattctaggagtgtgggccactgttctgaggttgctgcagaggagcactgctggagaaaaggaagggggaaatccacatatccactaagacatcgtcagaatactgcacatggaattataggatattaacaatttaagagactgtagacacaggatagtcaaaatctcccattttacagacaaatcaacagaggcccagagcagtgaaggcatttacccagacactcactggatcggtgcagctggatctagatccaggtctcttgactcatttaacagctgttaaaccaaaaatgggtgtgatttagtcccattgtcatctgatacattggcaatgccctgcatatttttttgtctctatgtttaatactcctttgtaaagggtagcttttgatatttcctgaactgagcatctgttaaaatt

SEQ ID NO: 100130 - DNA, 539 bp, Homo sapiens
ccctttcctctgacccaagttaacaaaggcatagatgagaaagctaagaaatgacaggtcaaagccaaaaacacaaaacaaacaaacaaacaaacaaacaaacaaacaaaactactcaatgcccatctgagacattttcacttcatgctcagtgaagtgccattttttgccatttttcaccctttccctatgatttgaacagtctacgggtgaagattacataagagacaacactgccacttacatcttttgaatcgcaaatagaagatgcattaggaaatcacttaacctttcctaattattccttacattcactcactaggcatgctatgtgaaatgcggtagaggatgcagcaggtggccagatacagtttcaagtactgctgcagggactcggccaaatcgctgcaccgctttcagtctctgtgttatgcaaagctccctgggcagcacaaagcttctagggtcttctaggaggggaaatgacaacatagcagatagggtcttggctccccttcgatgcagcggcctcatcagta

SEQ ID NO: 100131 - DNA, 303 bp, Homo sapiens
gtgggaatgcagtttcttacatttagcataggatccagtcctcaactcttaagtatttgccgcacagaaatgaaaacttttgttcacacaaaaagctgcacttgaatgtttccactagctctattcaagattgccaacaactggaaccaacgcaactttattcctttatgactagataaaccgtggtatatccatttaaccaaactctgctcagtaataaaaacactgctgactcacccaacgacttgacggttctcacacatgctgaaagacgccagcctcaagaggttgcttacagtatga

SEQ ID NO: 100132 - DNA, 415 bp, Homo sapiens
gggctaaaaagagagagagagaaaaaaaagggcactactactaccatttcagaagtctgtcgtacataaaaggaacaattttgttatttctggctgcctgggagcaatgtattatactggcaagtgctttggagttacaccactggagtgtgaatctcggctctatcaataactagctgtataataatgagtaagttacctaacctttctttatccatttccttatttataaaaaagggattaataatggtaccggccattctaagttactgtaattaaataaaattacattcacaaaggcacttttgcacatagccaacccacagtaaacactattagtaaccttagttcatttaactgtttactgtatactctaataaatgtctgatacacacccatgcccacctgcacatac

SEQ ID NO: 100133 - DNA, 486 bp, Homo sapiens
tctctacaaaaaaataaaaaattagccgggcatggtggcacatgcttgtagtcctagcaacttgggaaactgaggtgggagatcgtttgagcttaggaggttgaggctgcactgagctgtaattgtgcctaagttcaaatggtgtcaaaggatcatgcagcagcttgctctgatagttctccagcctgggcaacagagtaagaccctgtctattaaaaaaagaaaaaggtagtataaccatcattatcatgtatttctaaattctcttgataaatacaattaatctgattttcaggaaattttttatttaaaataggctcatcgttgcattccttactgtaatttatacagatttgttgattgacaaatcactctctttgaaagtttcagtcattcaaacagtgctttacagttttaaagtttgggctctgccttaactattttgcacagagactcattacctttttataagatagcagtacacgc

SEQ ID NO: 100134 - DNA, 217 bp, Homo sapiens
agaaagagacagctccccaccaaaacagctcaatctatcaaaggccctactatggtctgaatgtgtcccccaaaattcatttgttgaaaacttcatccacaacataacagtgctgggagatgaggattttggaagatgttcaggtcataagggctttgccctcacagattggttaatgccattataaaagggcttaacagaggaagtttggtctctt

SEQ ID NO: 100135 - DNA, 683 bp, Homo sapiens
cctctccgacaaaatgagttgtatattcctcattaggggatgaatgctaaatgctttatttgtgggcagggcagggcattgaaattatttagcatttatctcctaaatgcttccccagggcttcaaaagagaagccaaatattatcctcatgtctgttgtcttcaattttagatttacagcagttcttctctgtaatgtgtgatataacaagaccagagtaaatattggcaaccttaggtgcatctataagttgggtataccctatttcatctgtttacttcaatatctgaaaattgactgcagttgacaatgtgggttcacttggctgagttcactctctgtaatatcactccaaggaggatgtcataaatcaggaagaagaaaaattagtttagaatgactgaactcatatgtggaatgatttatgttcaaatttctagttggtttagcaaacttgtatttatataaggaagtaaaatactgatgtaattacaatgctattctgatattaacaccaaactttcatccttaaggcaaatatttctgttttagtcctggtcttgatattttctttcataatcacaccctgacattgtctttaagcttctgtattgtgcatctgtttctatcgtaggcaatccacatttgattggttattattatattttaaagcagggctact

SEQ ID NO: 100136 - DNA, 238 bp, Homo sapiens
gtgaatcaaaaaagcccactctttggaaaggtggcctctgctctttcctctgctatgggccttacaccctctgctgaggccatcagtgttacaccctctggtgaggcctgagctgtgtgactttggaccagtaatttaacctctttgggcctcacttctttcgtctgtaaaatgggcctaatgcataccttacatttgtagtgggaagtaaatgaaataggaatcagggcttcatacc

SEQ ID NO: 100137 - DNA, 923 bp, Homo sapiens
tgtgcagggccctgaatgccaggacgggaatttaatctaattcaacttcagcaatgggctgagggacagcttcatgccaggcaaagggaaaaactctttacacacaggattgcctttgctttcattcaatccccgcaacaacatgtgtgcaaacctcccacctggcatcctgcgtgtgtccagcacctccctgcacccgggcaccactcatgcaggtgggcttggcatcctcacagcctctgcagcacgtgccttcagagggaagagaaccggggactcgggagactcaaggcatctccagagtcacagcctgaagacagaaccccatgctctcctggacataaaagccatgcggtccctggtagacaggatcccctccaagcattttccaaagcccgaggggctgcttacaagactctgcccatcacccccaacctggctgatctgggaccacatcagcacctggcctgactcttctaccaggatgccctccaagaccaacactgatgccttagtcaccctcaccagggaggctgggggtgcccccacatggctgctgcacctgatgttggaaacggaggctccaaaaacgtgagaaaaccgaggcccggaaagtgtcaacccaaatcacgacactccttgccccaaacccagaagcctgaggaagtaaggaagtgcggtgggatctgtcttcccgtgtgtcttcaggatcctggggcctgcccctcctggcttcctcttgaggaaggcctcagaagacccgcctttggtcacaggacagaagctgggccaagaggcaaaggttttggccgccacaggggaaactctgggctcagagctgccgaagtgactcacgggccctgctgggaagcagctgacgttccttgtctgcgccttacaaaaccacacgggctgcgagtgac

SEQ ID NO: 100138 - DNA, 450 bp, Homo sapiens
ggcttccttttattttcatacatcttcttattaaactatctcaaagagtagagattcctatttctgttgacacttaatagctttttcactacatgtaatattaagtccatataccttcagcttttttgaaccaccgtgcgcagcttgttttagcttttttaaagtgagttttagataaacctaatttgctcatccttgattaggaattccccaaattggctctaaaatggaattcagtttgcctcaatatacatttactgagcttataatatccattaaaaaaaaagcagccaggcctggtggctcatgcctgtaatcccagcactctgggaggccgagcaggaggaccccttgagccaaggagttcgagaccagcctgggcaaggtagtgagacctcatctgtaatcccatgtagttgccactgcactccagcctggggaacagaacta

SEQ ID NO: 100139 - DNA, 172 bp, Homo sapiens
tctttttctctttactcccgggttaaaaggagggaggttctgaagggaaaccccaggcagctctctttctgaatgcctgcagccccactggggtcctgctacttcctccctagggtctgcactgagaatgacggacttcaacctcggcagccttagccttccaagcgcatct

SEQ ID NO: 100140 - DNA, 431 bp, Homo sapiens
gtatatatacatatgtatatatgtatatattttgttgcctttaattacatttttttcagcccacatattagcttagagatgggaaattgattacatttaaaatttttaactctgaatttattaccaagcgttttaatctaatacatattttcttaatattttaaacaaagaataaaagtcctcattttttttaacttgcacatgaatgtacacatgaataggaaggcagatagatagatagttagacagatactttcaatatatggtagcttgaacatgacaaagactctgtccttgacctaatgttagacaggctcctctgatccctcttcttatgagggcttgtcctttggccttttcctggagcctgcccaacccagttgtagcaaaactcctgttaagtcactttaatatttaaggagaggtgagtc

SEQ ID NO: 100141 - DNA, 394 bp, Homo sapiens
gaagaattggccatctgtgattggctgagattctgttcctaagttaggttttcagtttgtttaagtgctgagttgggctgcatttaggaactcacacataggcctccttgggcccacttttaatttgttttaatagttgttcatgtgatttaaaggatttgattaaacacagtaaagaacttcctggtagtgaggacagctaaaagaatgagtgataaagagaaatttagcatctccctctctaggaagctgtataaacacactaactccttataagtctcagtaaatttctatgtaaaattcataatgtcatgggtatagtttgagctaaaatttacttctgctaactataacttctgtttttaagtttgcagagtaaataaattaagtgaac

SEQ ID NO: 100142 - DNA, 782 bp, Homo sapiens
aattagccgggcgtggtggtgggtacttgtaatctcagctacccgggaggctaatgcaggagaatcgcttgaacccaggaggcggaggttgcagtgagccaagattgcgccattgcactccagcctgggcaacaagagcaaaactctttcaaataaacaaacaaaacctaagcatttgaggggtttggcctgggcagtggagcttgtgagctatatgagctggaatctgagtcaaggctgggctggtgaaaggagttcactcaagttcccaaggtattctgtcctccaggactctgaatcacctgggaggagaaggaattgtggcgggcctaacaccttttctttcccaaacaccaagagcaggttctttctgttacatccattgaggtcacattcttgaagtgcattttgaggaagtcattattttcgctacagcagggactgatgtatcagtctattagaattcagaaaaaagtaagcaaacaaaaaacgtgttggaattattctcttctagcattttgaaatgtacaatggttaatgttaactatagccaccatgatgtattgaagaccaggtcttattctttttatctaactgtacatttgtacccattaacctaatgctcatagcatcaagaaaagatcaatatttaaggtgacaaatatcccaattatgctgatttgattatatgaatgtgttgaattatcatatgtactcccaaaatatgcacatctaagatgtatcaataaaaataaagacaaaaattaaagcttttacagtag

SEQ ID NO: 100143 - DNA, 681 bp, Homo sapiens
tagataccatttccttttcattttaaccaacaactcataattttatcttccaatagtctccaatgacctaaaacttcttcctagtagtaactcatttacattcttaaatagataattaatgtactttcagtaattaagtgctaggtacatgaagtcaaagtattgttcactatgaaatatccaatcactttgccaatatagtcaaatattaattgtccaggtgctaatccaccagttgatagattcttcatgggctctgcttcctcccttccacttagtgaccactcctcagctatgagcacatctgccaaagcaggtagacaggtacgtcaaaaatgctttacaactcaaatcaggcaattctattagtcaagttgctgttagcaacatttgccaggatttcctgtgtagatcattgaaactggttggcttgcaaagctattaaatgtctctgtggattataggtacatggacttggtgtcatcctccataaccatgctgcctgccagatgcaaaggacttaacatataacagacggtttcacatacattatcacatttgagctttacagtaatttgttatatactcattacatttccatattcaaaattgtttctctacaaccagagtgactcaatttctgctaacattaacatatcattttctttacctgccaaaaaa

SEQ ID NO: 100144 - DNA, 371 bp, Homo sapiens
gctggaggagaaaacactggctgtgcagaacttgactgggtggagggggaagggccgggggtggccagaggcggcttctgttgcacagaggtccggcttgctcgccagacaaagagccctcagaaagcaccttccccacctccgccacacacagagaaggcgcagagggcctggcctctttcttacaaggagcccggctgaccctgttgctgtgaggggcagaaagagaggcaggcagctgcttggagacgcgggagtcactgagcagggcccgcggagtctgacaacggaagaaaagaggcaacccttctattattagtggctgctttccacgtatgtgtaaatcagacagcctatgcaaaaagaggcct

SEQ ID NO: 100145 - DNA, 953 bp, Homo sapiens
gaacctgggaggtggaggctacagtgagctgagatcatgccactgcactccagcctgggcaagaaagtgagactccatctcaaaacaaagaaacaaacaaagtattaatatgttccccttgatcagtggggtggttcacccttgtaatcccagcactttgggaggcagaggctggcggatcgcttgagtccaggagttcgagaccagcctgggtgaactagcaaaaccctgcctgtactaaaaatacaaaaattaactgggcttggtggtgcgagcctgtaatcccagtggaggctgagacaggagaatccttttgtaatgcctgaccttgtttttttactaaccctattttaaccttgtttttactaaccctatttttaaattttccctttttgtctccttaattacctagccttgtttcccatatgagtagactctcccttagctgggaaagcctgacgaacgccatctggccccttgatttacaagacattaagggctacttacccaacccccttcctcaaagagttaacctgcgtaagcagatcctcagcatttcaaaggagcccaattagctgataaggtactggaacaaacaatgtacgaagttcccaggattttgctcaaaagcataacaacataaagccttgagtctgtgtctggcatagcatccatatctaactcttatgaaggatttagagcccggcacctggttccgttgctttttttgtaaccatttgtcttttaaattgtttatttctctgtaaccatttgttttttgattcttgcatgtttttacttctgtagaattattgcatttgagctccgctccccttccgaaccaaggtataaaagtaaatcaagccccttcctcggggccgagagaattttggaaagtcaagccttctcttggctgccggcttaaataaaggactcttaattcgtctcgaagt

SEQ ID NO: 100146 - DNA, 308 bp, Homo sapiens
ggagctcggtcccgaatctcgacagtgtgcagaaagtagtttcctaaactttaaattatgtccttaggacaagatttcagaagcagatgacagaatcagggagaaggaacattttaaagactcttgacgtctattgccaaatcactttttttcctcatactagaaatagctttaaacataaaacaatcattgctttaggaaggtttaaagagattttgaaactctactcttatcagccacctccagaacagtctcaaagcacaggctttggagtcagccagcctgggttcaaatctcagcttccccac

SEQ ID NO: 100147 - DNA, 376 bp, Homo sapiens
ctttttctttgagtcagggtctcactctgtcacccaggctgggcctggtcagcacccatgctatggagagctcttcatggtctggtgtggacagagtgggagtggaagatctcctcccacacaggtgctcagtgtcttacctcacctacgggcagcagctgtcttcacctgagtgtgtgcacacaggtgtatcagccccatgggcagtgatggacgagggctgaggcactcacagggcagcccatgccccggtcaggtccagtgggggagatatcaagaaaacccagcgccaaaatgcaatgagctgtgatcgcgctactgcactccagcctgggcgacaaagcaagttgccgtctcaaaaaacaaaaacaaaact

SEQ ID NO: 100148 - DNA, 374 bp, Homo sapiens
tccacattccgtctcccatttcatcctctcagagctgtcctctgtgcttttcctttgtaattcttgccactatttactttccttcaaagcaaaactgccaccaagaaccattaagatgtgtagcctccacgtcctcacctcgctggctcttcaactcactcccattgggccaccgcaccaacactccactggaaccacccattgaggttactaatcagttgaccaaatccaacaatgacttctccgtcctcattttatccaacttcccagtaacctttgtgataccctctgtgaaaggaagaacaggaaccccaaagatatacacaccctaatccccagaacctgtaaataaataacatcacaaggcaaagggg

SEQ ID NO: 100149 - DNA, 151 bp, Homo sapiens
ctgccgcaactccagcctccccaggctgcctggctgggggctttctgtgacactcattcgccttgctacaacctcaacactcatcttcaccttctttgtcccctagccctaaataaaaatatattgtttagcatgttcagaatgctttcat

SEQ ID NO: 100150 - DNA, 335 bp, Homo sapiens
tactaaattcgcggccgcgtcgacgggagggaggcagggatcattgtgccctaactgttcagaccgttagagagtgtgcagagggtcaaccagagccaagtgcgtctggcttgtcaactcagcctcacaagtgcgtcctgagacccttcccaggggtctgctctggagaaatcaggacagccatcggcacttatctcgtcccttgggaggcaggaggagactagttatgagggtggtgagctgagacaggacgtggcctttggtaacagggccagcttgtgatgaggtcacatttgtctctgtggcacctccacctgagtcctctggcttaccca

SEQ ID NO: 100151 - DNA, 542 bp, Homo sapiens
agatgatgcaggatattttcctggtggtaatgctgagcagtgttaaaatctggggaagggaagagaagtttgagatggaactaaaggtgtgatggagaaagcagaacttccagtattcggttaggcaaacatgaccgcctggggctggcggcagaggaaggccaggtaagttgacactactgctgtttgtttagaagtggctggaaacaccaggggctgaaacctttgcagaaaacccttttattttctgaaatgatcactcagttcacgcaattccagtgttcccattgcaatgtttagctctcacttataagtgtacccaatatttagctctcacttataaatgagaacatccagtatttgcttttcagttcctgcattaatttgcttaggcctagttgagaagagagctcagtggagctcagctaaagtttggtcaaggagggagtctttatcagagctaagagggcaacccacttgggtccccttccacactgtgcaagctttgttcttttgcccttcacaataaatcttgctgctgc

SEQ ID NO: 100152 - DNA, 589 bp, Homo sapiens
ggccggcggcctgctgggggagggggccgcggggggcgggggagctcacctccgccattcttgtagcacaggctgcagccgtctcctcccggtgctcgctccttccttgagctctgtccaccgctgcccactgggggctagagcttcccggctaccctggaagctggaggctgggaccagctcttcaggtgacaggcctctgtgtctccacagtggccagaggggagcctgcctgactgatgagcaaggctccactttgtcaccaaggcagagaaggggcccggctccctgatctgatcgtggacactgcagtccccagatggctcatcccgttaagctaagccctcggccatccctccagctttaggaagaaaagcagttctggcccaagccagactgagcttcctggggtcttctctggcccagcctttgactgaagctggtctggagacaggggcgttagagaagtgactcatagatggcctaaataagcggggccactcaaggacccaggacagggggaagagggccaacccatctggaccgcaggcaaaccccatggcctttgagagaagagagaagaggaccc

SEQ ID NO: 100153 - DNA, 711 bp, Homo sapiens
tatctaccaaatcactttggatatataaggactcaaaattactcatgcaaaaagtagtattgggtaaaagagactgggaagtcttgtagtcacctgaatgtcacaattttcaaacattttggtgttctttctaaataaaatgtgtgtgtgtgtgcgtgtgtgtgtgtgtgtgtgtacatgtgagatgaaagcatcttgtatatatgagttagtgccaaatatttgttcttagaattttaatgtgagcattgaccagtgacaaatcccacataaacaccacttcagtggccgccttgtattctattatagggatctatgtcatttgtttcaccattcttttattctttgatgtttaggtttccaagtttttaaccattataaaaatgtgacaagcatctttgctttctttatgtccacacttttaattatttttttggaattgtgtctaagaaggaaatttcagattattttttatcctcttgatacatattgcaaaattactttccagaataagcttgtaaccgtttatactcccaccagttgtgtaggaagttcccacttcataacatccttgccagcatgggcactctcatttaaaaaaaaatattttacatttgaggcatagacttcaaagatgagagtcttagatgccatttagtgtaaccttttattcaataatttgtcctcccaatgctctaaccgtaaattcct

SEQ ID NO: 100154 - DNA, 717 bp, Homo sapiens
agagtcagaagacctgagctctagttccagaagaaagatcttggggaagtcattgcagggtaataatctagtcatttcagaataatctggggagagaataatagttttaaaataagggtggagtatgcatgactccagggtcatctcctgcccttcagtcctgtctcaactgaagcttcttttcactcacctgcttgatatgacaaaaatgatgaaaacatttattgccaacttcaggatggttgcaaaaaatgaatgaaataatgaatgtgaaattgtattcaaatattaatcaataacactgttgcttagaaacggatatataaaatagacaccaagatttatcgagatttataccgggaaatttaaatctgctttacggagaaagataaagcagttctaattaacatgttccaaagcaattcaaaatatctgctgtgctcttggccactggatgtctatttcgatagaagggtgcttagagtttttgtccagggtggaaaaaagaaaatagtatgtcctttagaattttttttagtcttctgggatctactttttgtaattgagagaccaaaaaaaaaaagatagatatttaaaacttatctttggaaaggaagatgaaatgtcataatgttgtcagtttttctaataataagtggtgtatcagatgcaatcttatttgaaactcagtgggatttttctcataatgtcatatat

SEQ ID NO: 100155 - DNA, 414 bp, Homo sapiens
tcccaaagtgttgggattacaggagtgagccaccgtgccctgcaattcttgtaaagtgtattgtaatggaaggaatgatagccttgtctctacagctagattatgaattaccagaatattgtgcttccagcttctagcatggtgtctggtgttattgtgataatagaaataaacatttaagtgcttactcctaagtgcttacctgtattttttctcaataatcttagaggtctctgccttacaggtgagataactgaatcattgagattaagtagttcacacggtgtatagtgctgtaattcaaaaccagactcaccccaaagccacttatgtttataccatctcccatagttgaatgaataatacaatttgtgtaacaatgaaacttttgaaaatcctggtcatttgtttctt

SEQ ID NO: 100156 - DNA, 690 bp, Homo sapiens
ctattacctcagggggatgggaagagagatggttataggaggtcgagattattaagtttttctctaccgatcttggcattatctctctggttacaataatatgcattgctcttgtaatttgaaaaaataataaattaaacttgaaaaacagaggaaatttttcccatcagaataagactgcaacagatgaagaaatagtttactaaatgtggctgagggtttaaagttgcatttgtgtacctggtgaataaatatgcctaccaagatcaaagcccatagagatgacatatctcttcttcttccagaccagactaggtcctgcaggatgttgatatttcagatcatcactctaagagcaaacattcatgcaagatatgaagaggacataattaccttagcagggaggggtctgtacaaactcctttgactttagagccctaagaatagaatatgttggaggcagattatctgtactacccttgaaaacaatgctctctaaaaccaaagtccacagtactgagtggattagccactataaattacctgtgcaggaatgtgtgtgtgtgtgtgtatgcgtgtgtgtgtgtgtgtgtgtgtgtgtagaaatgttgtgaataataaatatattgaaataggaattctgtgtacattaattttgctttaattctaccttctgaagatatctcatta

SEQ ID NO: 100157 - DNA, 378 bp, Homo sapiens
agtgatttaaaggagtatacaaaggaacaggataaaccatctaatttggttctgaaagataaagtaagcccaaataggaggcaaaatataatgttgtactagatgagcaggcagaagactccaagtcaagtcactcacacacaagtaaaaatcacaagaagaaaacccatcactgctctgaagtaaaagaagatgaagactacataccaatcaaaaatattaatccagataagtatgagaaagtttggagtttggtcactacgaagaagaagaaagctgttgggagaaatgaaagagtaaaaagagagaccgaactcagaactgaagtcgtagctgatcgcaagagaggaatggccattatagtaatagtcacaaatc

SEQ ID NO: 100158 - DNA, 325 bp, Homo sapiens
tacccagggtggagtgcaggtgcaatcacggctcactgcagctgcgaactcctgggctcaggtgatcttcccatctcagcctgccaagtagctgggactacagatgcacaccaccacatgtggctaatttttatattttgtagagacggggtctggctattttgcccaggctggtcccgaactcctggaatcaagtgatccacccaccttggcctcccaaagtactagaattacaggtgtgagccaccgtgcccggccctatgttatatttttgagaacttcctagctgtgaagtcattcttaagttcttcctaaataaaaaaaa

SEQ ID NO: 100159 - DNA, 403 bp, Homo sapiens
gctggctcctgggaccgcagcacagtgagcaacgcgcagctgctccctccctccgtgtccctcggccaccgcccttcactgctcccttccgtgtgatgacagcccgtttgttctcctgtctatgtgatcctgggcatgcgaccacgcgtccctgcccaacctggctcagttcagctggagacagggccgacccgcttgttggagtcgtcacgaggactgaggtgcgtcctgagatgcctgcttgccaggtgttagtgtcggtttgctggggccgcggtgacagagtgccatagaccaggcagctgaaacagagttcatcgtctctcagtcctggaggccggaagtccatgatcaaggttctgtcggggctcgttccttgtgaggacgtgagggcaatctggtg

SEQ ID NO: 100160 - DNA, 213 bp, Homo sapiens
agctgccccagtgagggcccaccctgccttcacctctgagggccaactaggccacagcccagtgattcttaacaatgcttccttttgcccccaccccagattggatgatttccaaatgacctgttttctagttcatcaatccttcttctgcttgttctacttggctgttgaaaccctcttttgaattgttattattatattcttcagctcaat

SEQ ID NO: 100161 - DNA, 482 bp, Homo sapiens
taaagcaactgtacagttgtcctatattctccaccttcccttggtttcatttctcttcgcttcctgaatgagaagtgcctgagataccttcatttctcttgaaagtattgatccaagtttagacaaatatctcccctcttgttgagagaattccttatatgtgaaaataccaagacattcttgatatttagcaggcactcaaatatttgtctcctcttttttagcataattaagccagactgatgtttgcatttgagtatcatcagcatgagtaaccattttaatctctcttcccttaactacttgttctacactagagtctagggtcagggtacgtacagtgataaagattgagataatgggaaatatagtcttctgtttgggaagctggattgtagtgttgattttctgactccttgtggtaattaaattctgaagcacagaatctacttttgagaagaaatattttacttttgaaaaaa

SEQ ID NO: 100162 - DNA, 283 bp, Homo sapiens
acaagtaagaaaaggcatttttactcggcctggtggcttatacctgtaatcctagcactttgggaggcctaggcaggtagattgcctgagcccaggagtttgagacgagctggctcaacatggcgagaccccatctctgaaaaagaaaaggcatttcatttggagagaacagtacttgcaaaggcttggtgaggatgtgagaggaaaaaaaattattttaaatctcagaaatttgtcccaaacaggatgtgtggtggggaaactgctaggaggtgagactgaa

SEQ ID NO: 100163 - DNA, 419 bp, Homo sapiens
tgagacagtcttgctttgttacccagactggagtgcagtggtacaatcacggccgactgccacctcgatctcccagcatcaagcaatcctcccacctcagcctcctgtgtggctgagtctgcaggtgcatgctgccatgcccagctaattctttaattttttgtagaaatgagggtctccttattttttgtagagatggagtctcatcatgttgcccaggctggtcttgagctcctgggctcccccttttggcctctcaaagtgctgggattacaggtgtgagccaccacacccagccagctatgtgttttttaaagatgttacagttaattgtaaaatactaacaaatatcttgatttaattatctcatattttctttttaaaagcttttggaaatatatatagtaattttaaatgct

SEQ ID NO: 100164 - DNA, 348 bp, Homo sapiens
atattcaacatacttggtatattccaatctattgcaatgatctttgttgaggctcaaattgttccatctttggccagtgggaatctctctttgtgatggtttctgagtccttctgacataatgcctatactctttgatatgttccttgctatctggtatgacaagatgttccaggctcatcttgaacatttcctgctcagacctggaatcagccatttctccacagagccgtttatttttaaaagtaataaatggtattttaagaccacaaactcggtgctagggatacttattgttttcaggcctttcagtggacacagcgaggaaacatatatatatatttaaaga

SEQ ID NO: 100165 - DNA, 116 bp, Homo sapiens
aatgttctttttgcttttaacaaggaagaaaagggatgcatcaatcacgactctccttcctcccctaaaaatactgaaatacgaaacaataaaatttgaaattagagctgtacaaa

SEQ ID NO: 100166 - DNA, 258 bp, Homo sapiens
gctaaagacccgactcccacccctgcccccgcccaggccaggcttcccgtagctgacgcagatcccctcgaggagggtcaaggggcggccagggtatggttgtgggagtgcccctcctctgttcccgccccggaggagaaatgagggtggcctcccaagaaatgacctccaccccatgacagcagaacagggcagcccccttgtgtggaaggaaggggacccctgggagcccctttcttccagagagtctctctctcc

SEQ ID NO: 100167 - DNA, 436 bp, Homo sapiens
  misc_feature (49)..(49): n is a, c, g, or t
ccaaagtttcgctcttgttgcccaagctggagtccaatggcgtgatttnggttcaccacaacctccccctcccgggttcaagcaattctcctgtctcagccacccgagtagcttggtttacaggcaacagcaggccaaaggttttacaagtctggttacaaaatccaagtccacccagaccacagctgaagatgagtgtaacccagaactgaacattcataaacactgatgaagcagtgaggattaaaaagggtattttagaacaatatgacaatcctgaaagatagctgaatcctgaaagatccctcacatacggtccacacatacaatcctgaaagatgcctcacatatcaaatgcaatcctgaaagatacctcacataccaaattcacatgattttaagaccagtaaaagaaaataaaatgttatttcaacag

SEQ ID NO: 100168 - DNA, 397 bp, Homo sapiens
tgagacaaagtcttgctctgtggcccaggctggagtgcagtggcacgatctcagcttcctgcaacctccacctcccgggttgaagcaattctcctgcctcagccaccaagtaaatgggattacaggcacacgccatcgcactcggctaatttttgtatttttagtggagatggggtttcgccatgttggccaggctggtctcgaactcctaacctcaagtgatctgcacgccttggcatcccaaagtgctgggattacaggcgtgagccaccacacccagccaacaactataaacttttaatagcatatattcactatataagcctaccacaatcacaaaacataaatatttttcagaataaaattaaactagcttctagggaaataaaactatcat

SEQ ID NO: 100169 - DNA, 632 bp, Homo sapiens
tgcagtggctcacacctgtaatcctagcactttacgaggccaaggcaggcggatcacgagatcaggagatcaggagatcaagaccatcctggctaacacagtgaaaccccatctctactaaaaatacaaaaaattagcccgatgtgctggcgggtgcctatagtcccaactattcgggaggctgaggcaggagaatggcgtgaacccaggagggggagcgtgcaatgagccgagattgtgccactgcactccagcctaggtaacagagcaagactacgtctcaaaaaaaagaaagaaagaaagaaaaagtagaggaactaatctgagtcactaaatacaaaacagtaaggtaaagcagtgagaaaggttagggagtaaactattgttgccttttttgcattatttttcttccatccagaaggaaaccaacccctgtaacttcaagtgtaattcattaccagccaaagcagtggcttgtgcctgtaatccctctgctttaggaggccaagggaggaggactgcttggagccaggagttcaagaccagcctgggcaacacacagagacctgcctacaatgcttttgaaaattagctgggcattgtgatgtgcacctgcagtcctatctactcag

SEQ ID NO: 100170 - DNA, 798 bp, Homo sapiens
ttctgtccagtaacagctctcatttcttgggcacgtattttatgccaggcgctaagagatgcaatgcatacatctcatttatcctcatgaccaccctgggagttaaatactattattttccccactttttacatgaggagattgattatttaaaagacagagcaactgcctgaggtcacacatcttgcaactgatagaactgggatttgaaccatggattctagtgttaaagctctcccctagccctgcagtgatcatgcttccagagattctgagatgaaaatctctgcaatgggtctggagaaagtatgggtatgtgtttcttgactttctccaatctgatttcatgtttctgtgttacggaaattacaatgaaatgaaggtcattacactaagaggttgatctgaataggcatcccattccaaggtgtatatcattgtccacagctataaaaagacattccaatacctgcacagtgacctaggagcttttctctgaggactctttggagagagatttaaggaagagactaagaacagctgttttttccagtattaggatatagtcctcgagatgaactgtcaactagagaaatcctagctcaatttgccttttagatctgaaaacataacttcagttattagcactattaaatataatttaacctcattgacatttaaaaacagaatgaatttaatattcactaagtataaactttttgttgtaatataacactctaagcaatatgataaaagataccaaccatcctcctcacattccctgatagttatttatgg

SEQ ID NO: 100171 - DNA, 514 bp, Homo sapiens
tcacagaccggaaaactgaagcccagggaaggcaagtgacttaggcaagatcacacaactgcctcccaggcaaaccaggaaaagaaacaaaatcacagatacttgtgctaccaaagaattattcttgttaccccaagttttgatatcccggaatgccaaagagttttccccaagagcatcattcctgggctcagcttgcagtttgaccacctggatcctgtcatcagcatgacccggggccgtggtccttcttgggaggtgtcatgacatcacagggaaaagcataggcttctgacgtcatgatataattcctggttcctcagtttactagctggatgacttgaaaaactgctcaacctctctctggcctctatgttctcatctataaaatggaacccacctgacatgacaacctcacagaactgttgtgaggaactaatgagattatgtaactaacatgcttgctatttagaaagtgttccattgttttggccaggcacggtggctcatgcct

SEQ ID NO: 100172 - DNA, 520 bp, Homo sapiens
atagtcctatctctcccctcaaaattaagtaattctttaacaaataactttaaccggtacagtcctacctcaggggtttagaaatagcccacatttattcagacaagttctagtgaaaatctaactgagcaaactcttgagcgggggataacttctgcagtaggtagataacccccttatctgctccccctccacaggactcacatagcaacatgtggtacaaaccttaactttctaaaagaaggaaaatgacttttgtctaattcaaaggttataaaggtaaagtggtatttctggtaaggaaggctataaagaagagatattgtagaacaaaaaaaaatcttgtatggtaaattcttgtcctaaagtaaaatgactggtggtttaaaaagagggatgtttaggacaagtaaaaaagtccaagcatgttgtaggtggtctgtgtaagttgttaaaaaagatttgtgaaagggaatttatgaaagaactactacacaattttaaaggttactatgccatc

SEQ ID NO: 100173 - DNA, 798 bp, Homo sapiens
ggtgagtttggctacacccatcctgtatttcagtgagtcattttggatctgaatcttctctgtttgccgagaatgcctggtgtaaatatgcatcctcaccaagtactctttggtaacctgacagtgctctagtggtagatccaggccctaagcctttccagagagaaagtatttcttattcttctgggaagatccagaacaggggaaagtatgagactttttaccttttttctgtttaaaaacatattttaaaattatgtaaataatacttggttgttacagaaaaagtagaaaatgaagaaatttatcccaaactttattaaccagggtaatattgcttagtatatactcttttttcccccctactgtctgtgtaattgcagaaggtacatattcttacagatttttttctgtgttttcacaaacacatatacaaatacagtttttgcttttctacaaaaacagtttatattgttttgttatctgttgtttttcctctcatttaataattatatcagaggttgcggtgagccaagatggcaccattgtactccagcctgggcaacaagggcgaaattccatctcaaaaaacaaaaaaaaaggatcatgatgaacgtatagtattgcaatttgcttagtgagacattatagacatctttctatatcaataaggtatctatattatcattttaatggctatataatgccgctctattctactgacatgtacaatttattttaccaaacccctattattgaatattgaagttatttctaatatattgataatataaaaca

SEQ ID NO: 100174 - DNA, 102 bp, Homo sapiens
cagcctgggcaacatagtaagaccccatctctacaaaaaagagaaagaaaaaaattagtggggtgtgatggtgtgtgcctgtggtccctgctacccaggagg

SEQ ID NO: 100175 - DNA, 570 bp, Homo sapiens
cttgaggacccggtcaggaagagagaactgttaggtatcaagtataggcctttcatggaggctgtaatcaaatacttggaatgcggcaatagttacattaaccagaaatggaaatactattcctatcatcatatacatgtgctgaaaatactgctttcttttctttattttttaagacggagtttcgctctgtcgcccaggctggagtgtagtggcgagatcttgggtcactggatgctcagcctcctgggttcacaccattcttctgcctcagcctccccaaagtgctgggattatgtgtgagctaccgcacccagctccccaactttgtttctaaaaggtttggctattgttggttttttgctgttccataaaaattttagagtgaaatctggcaaatttcaacaaaagctgtcctgaaatttttattgagattgccttggatctgtggatgcatttggagagaatgaacatctttaatgtcaattcctgattatttcttgctaatatagagaattgccattgttcacttatctcttgaacgtgtagtttaatccagctagtcaaagc

SEQ ID NO: 100176 - DNA, 448 bp, Homo sapiens
tttttttttgagatggagactcactctgttgccaggctggtgtgcagtggcgcgatcccggctcactgcaacctccacctcccgggttcaagtgattctcctgtctcatcctcctgagtagctggcactataggcatgcgccaccacaccaagctaatttttgtatttttagtagagacagggtttccccatattggccaggatggtctcgatctcttgaccctgtgatccgaccaactcacccggcctcagtatatttttaaaacagagggggaaaacaccaaagtggcccaggttggagtgaaagcttttttcactgagatggcctcacagaccagcacacaacatggagtcccagaggtcttcagaccctggctgaaagctgctttctctatgccaatcaaatctgtaaagtacaagatgtcctgtacccaagtggagatgcttt

SEQ ID NO: 100177 - DNA, 651 bp, Homo sapiens
cctgaggctcacgggcacagccgagcgccgtgctccgactgggtggtctaggaactggaggtcaccgtaggcagggtttctctctcacgtggctcctcctgcctgaagcctctaggagcccgagatggagggatccttctgagaagtgaagccatttggactttctgggcatgtggcgtcatagtagaattaatcaaaagcaagaaaatggctggaagagctgtcttgttggcaggacctcctggaactggcaagacagctctggctctggctattgctcaggagctgggtagtaaggtccccttctgcccaatggtggggagtgaagtttactcaactgagatcaagaagacagaggtgctgatggagaacttccgcagggccattgggctgcgaataaaggagaccaaggaagtttatgaaggtgaagtcacagagctaacttcgtgtgagacagagaatcccatgggaggatatggcaaaaccattagccatgtgatcataggactcaaaacagccaaaggaaccaaacagttgaaactggaccccagcatttttgaaagtttgcagaaagagcgagtagaagctggagatgtgatttacattgaagccaacagtggggccgtgaagaggcagggcaggtgtgatagc

SEQ ID NO: 100178 - DNA, 190 bp, Homo sapiens
tctctctctacagatacatcagcccacagcaaggcgggctccagcagcccggagccatgggcccggccctcctgcactccccaggaagggggctgcccacggcccaaggagcgtgagtcaccacccccttcggccctgcagccggtccagctgcctcgcctggccttgtctccaccacccccagcccctc

SEQ ID NO: 100179 - DNA, 725 bp, Homo sapiens
gggtattgcagacatcagagcatgtgacttacgaggctagaccataaaaatattgaggcttctgccttactgatgtggatcattcactctaggaaaagccagctgccatgttgggaggatactcaagcatacccgtgtagaagaactgagcctcctgccaacagccatgtgagtgaaccacgttcgaagttgattctgcagccctagttaagccttgaggtgattgcagcctttgctgcaatcttgactggaactttatttgagcccctatctagaaccaccgagctaagctgctcacaagtttctgcaccacagaaattcttgtgcgagataataaaagttaattattgtttcagcccacttagttttgggataatttgttatacaacagtggataactgcccattcaaagagtctaaaccattaactgttcagcattaggtaagaaaaccagttaattgttactttcttaccacctacccccagcaccccagcaccccagcatgaccaccatttagagggagctgcgcttttgcaaaggtacataggacactgtctgttgcttctgtacctcttgcctcatcagttagtggtgtgatgtgtttgcctgacaaataccatctaggaccctggctgcatgagcttgttgagacagctaaattttacaggtagttggggtttcaccatttaacccagttaactcttctataagtgccgtattaaag

SEQ ID NO: 100180 - DNA, 542 bp, Homo sapiens
cggcacgaggagcggcggcaaatgttaagccttgaggtgattgcagcctttgctgcaatcttgactggaactttatttgagcccctatctagaaccaccgagctaagctgctcacaagtttctgcaccacagaaattcttgtgcgagataataaaagttaattattgtttcagcccacttagttttgggataatttgttatacaacagtggataactgcccattcaaagagtctaaaccattaactgttcagcattaggtaagaaaaccagttaattgttactttcttaccacctacccccagcaccccagcaccccagcatgaccaccatttagagggagctgcgcttttgcaaaggtacataggacactgtctgttgcttctgtacctcttgcctcatcagttagtggtgtgatgtgtttgcctgacaaataccatctaggaccctggctgcatgagcttgttgagacagctaaattttacaggtagttggggtttcaccatttaacccagttaactcttctataagtgccgtattaaag

SEQ ID NO: 100181 - DNA, 561 bp, Homo sapiens
gttttatttagtacacaggcaagcagcataatccagtttgtattttagaaagatcatatcagttgctgtatggaaactagattggaagggccaggagaggacccaaggaggccattctgttatttagggaagagatgatggtggtgtggatcgggttgtggttggtggaggaggagagaagtgcacagattgtagaagtgttttataagcagtcaagatttgtcgatggagtacatgtgggcagtgctcaagattgtgtcccacatttctttttttcttttttttttttgtttgattgggatggagtctcactgtattgcccaggctggagttcagtggcaccatctcggcttactgcaacctccacctcccgggttcaagcgattctcctgcctcagcctcccaagtacctggggctacaggcgcccgctaccacacccagctaatttttgtatttttaatagacatgaggtttcaccatgttggccaggctgttctcaaactcctgacctcaaatgatctgcccgcctcagcctcccaaagtgctgagattacaagtgt

SEQ ID NO: 100182 - DNA, 769 bp, Homo sapiens
caacagtgtgcaaacctgtctcaaaaattaaataaataaaatgactggtaataagatgtcaatatgatgcacatcacttttgtgatattctttccaaaaatatgtaacctcattctaatcataagtatcagacaaacccaaattgaggaacaatctagaaaataactgatattcctcaaaaatggcatcatcatgaaaaataaggaaagactaaggaactctcatattggaagaaactagagagacaaaacacatgtaatgttgaatctggggttggtgaaatgaaagaaataacggaaaaatgatatcagtggaaaaacggtaaaatctgagtaaagtccataatttagtgaatagcatcgtgccagtgttaatttcttagtactgatcattgtactatttgcaagctgttaacattaggggaatttaggtcaaaggtatacaataactctactatttttgcagttttttttgtaaatctaaaactatttcaaaacagaaagttaaaaaaaggaaattaacagtacaggtattagaagtacatgtgggagaattataatcccagaggtaatgaaggcctttctgagtatgacatatccagaagaggttgataagaataaaaatctctacatgtaaaaataatttccaaaacaaagactcatgtaaaactgaaaaaacatatgcaaaacctgacaaatgaaacgctggtttctttaatgtatgaagcgcttatataaataaacatgtaaaggaccagccagtaaaaaaa

SEQ ID NO: 100183 - DNA, 274 bp, Homo sapiens
ggagcctagggagaacctggtaagatggcaccaagttgacaccataagggactgtgagggtgaagccacctgggaaggaagaagagaaggaagatgccagacagtcctggaggttaggcaggacttaaatgactttgagactggtcactcatccaaatatgaaaactctcgggactcagaaaatgataggactaagcaaaaatccagcaccagggcgggtggctcatgcctgtaatcccagcactttgggaggccgaggtggatggatcacctg

SEQ ID NO: 100184 - DNA, 733 bp, Homo sapiens
gaagccttgattttgtatgtccatcttgagtctaggtttggttgccttacttgtattgcatctaataactttgtactgatatttttattttattaaaactgatatttctagataatttttttcttttaagggatagggtcttactctgtcacccaggttggagtgcagtagtagcatgatcatagctcactgcagcctcctgggctcaaacaatcctcctgcctatagcatcccaatgtactgggattacaggtgtgagccaccacgcctggactcttttagttatttttaccacagtaatacatgcaggcagttttagaagtcaaagaatatgacaagatttaaaatggaaaaaaaattagcagcacccatccatttcctccctatattggtactgttgaggatggcagctagtagccactgtggctcttgagcacttgaaatgtcctttgtcctaactgagaagtattggccaggagtggtggctcacacctgtaatcctagcagtttggaaggctgaggtgggaggatcacctgagcccaggagtttgagaccagcctgggcaatatagtgagaccctttctgtatttaaaaataaataggctgggcacggtggctcatgcctgtaatcccatctctcagggaggcagaggcgggaggatagcttgagcccaggagtttgagacctgccttgggcaacatagcaagactctgttctccacgaaaaggaag

SEQ ID NO: 100185 - DNA, 772 bp, Homo sapiens
gacttcttttttgttgttgttgttgttttgagagggagtttcgctcttcttgcccaggctagagtgcaatggcgtgatcttggctcactgaaatctccgcctcctgagttcaagcgattctcctgcctcagcctccctagtagctgggactacaggcgcccgccaccacacccggctaattttcatatttttagtagagaaggagtttcaccatgttagccagtctggtctcaaactcctgggctcaaacaatcctcctgcctatagcatcccaatgtactgggattacaggtgtgagccaccacgcctggactcttttagttatttttaccacagtaatacatgcaggcagttttagaagtcaaagaatatgacaagatttaaaatggaaaaaaaattagcagcacccatccatttcctccctatattggtactgttgaggatggcagctagtagccactgtggctcttgagcacttgaaatgtcctttgtcctaactgagaagtattggccaggagtggtggctcacacctgtaatcctagcagtttggaaggctgaggtgggaggatcacctgagcccaggagtttgagaccagcctgggcaatatagtgagaccctttctgtatttaaaaataaataggctgggcacggtggctcatgcctgtaatcccatctctcagggaggcagaggcgggaggatagcttgagcccaggagtttgagacctgccttgggcaacatagcaagactctgttctccacgaaaaggaag

SEQ ID NO: 100186 - DNA, 588 bp, Homo sapiens
tattgatttttatgccacaaattccatttttatttatagtgtgcccattaacatagatttatgatgactgttttgtttaactgtttttttaaaatcaagaaggacaagaaaaagaattacaaaccgaaattatattaatactgaattttatatttacctgtgtagttgccttttgtgtggattgcctttattcttttgtgtggatttcagctacagcctagtgtactttcactttagtttaaaggactccttttagtatttcttataaggcatatctaccagaaacacacttttagtttgtgtgtctgtgggaatatcttacttccttcttcatttgtgaagtcggttttagccaaatacagaattctttgttgattttttttttcctttcagcgctttaaatatgccttcccacagtcttctggctttcatatttttttttttttttttaatgagaattcagctgttaatcttatggtgaatcccttgtatatgatgagtctctgctctcttgctggttttaggtttctttttgggtttattttcagttttgatctttttgcgtttatgcaccttgacattaattaa

SEQ ID NO: 100187 - DNA, 342 bp, Homo sapiens
tccatttgatcaaactttacgatctaaggagaaaacacacaacttacatttaactgttttcacattacataagctgcttggtctgaaataagctactccaccattgctggaagctgaaaatctgctgaagatacagttggccctctaaattcatggcttctgcgttgagtgatctctgctggattgaactggatgcagaacatgtggatatgcagggccagctgtgtttttgatctgcagttgttggaacctgcagatgctggacctggggatttataacccagcgataccatgggctgactgtaagagacttaaacatccacagatgttggtatttgtggg

SEQ ID NO: 100188 - DNA, 484 bp, Homo sapiens
tggaagacagtttccttgttgcccaggttagagtgcaatggcacgatctcagctcactgtcacctccgtctcccagttcaagcaattctcctgcctcagcctcccaagtagctgggattacaggagtgcaccaccatgcccagctaatttttgtttttaatagagatggggttttcaccatgttggccaagctggtctcaaactcctgacctaaggtgatccgcctgcctcggcctcccaaagtgctgggattataggcatgagccaccaaacccagcccatgaaaaacatcttgataaatgtctagtcatgataaaaaaaaaaaaaaaaaaccttagaagcaaactagaagtagaagggaacttgctcaacctgataaaacagcatcaccaaaaatccccgtgggtaacatgatacataattgtgaaagcaagaaagctttccccaagagtgggaatgaggaaaggctatagactcttaccat

SEQ ID NO: 100189 - DNA, 804 bp, Homo sapiens
ggaagtactttttttttttaaatcgacttgtgcctcaatatactttttttttttttaaggaaactattgcttgggaataattttcagtttacagaaaaattgcatagatagaaaagagaatattcatggtacccacacccagtttccctgcacattaataactgatgactaaactcccaggctttatccaaatttcacctatttttctgctccagaatccagctcaggctcccacattgcacttggtggatttaacttttgagccaccactcccagccccgtttgtttcttgaatagtcctttgcagaaaactggagacttatggactaggggcccagctgccttcaaaagatgtttggggtccctttacaagtgagaggctatataggaatctgcaatttaagacaggcaattcttgcttacaaattggcatttctggaagtcagtgtgcctctagattatttataaaggacagtttgaaaccaattaagacagtcacttaatatgtcatatcaggtccgggtacactggcccatgcctataatcccagcactttgggaagtcgaagcgggaggatcacttaaggctaggtattcaagaccagcctgggcgacataatgagacccccgttgctacagaaaaattttaaattagctgggcatggtatcacacacctgtaatcctagctactcaggaggctgaggctggaggatcccttgagcccaggaattggaggcttcagtgagctgtgatcatgccactgtactctagcctagatgatggagcgagaatgtgtctctcttt

SEQ ID NO: 100190 - DNA, 434 bp, Homo sapiens
ggtgatctagaggatcccaatcagtttacacaaaaaagaaatactaagtcctcaggacacagcctggaatgcaagaagcactcaataaatagtacctgttgctacgaattaccacatttttttaaatggtattttgggggtttgacgtgtagtttggggtaggaggcttttcgttttgttttttgtttttggatagtaccaggtttgggaagaatattctgagtcatacttaccttctaagctgcaagatgtcttttttaatttttctttgtcccctgaggtgcgggatgaaggggtttttttcttcctcctacctttttattctttttaatactgtcttgcttgtgtaacatcaaaatgaggcaagaaagagaaatcaatgaagtcatcttctcatcgatttagtctattcccaggtggccgaaaaggcagga

SEQ ID NO: 100191 - DNA, 879 bp, Homo sapiens
gccagtgcttgctagaactctctagagccaggttgcactctcagcctaaaagaaaagtcttggctgaaacaaagaacagaaggatgggtggggacagaaaacctccctaaatgtgagaaaaggagtcattatttctgagaccaggccttgaaaccgaggtgcttgtctggttcacttgtttctttctttttgtttttgtttgttcagagacagggtctcactacgtcgcccaggctggaatacagtggtgccatcatagctcactgcagtctcgacctgctgggctcaagggatcctcctgcctcagcctcccaaagtactcagattacagacttgagccaccactcccagccccgtttgtttcttgaatagtcctttgcagaaaactggagacttatggactaggggcccagctgccttcaaaagatgtttggggtccctttacaagtgagaggctatataggaatctgcaatttaagacaggcaattcttgcttacaaattggcatttctggaagtcagtgtgcctctagattatttataaaggacagtttgaaaccaattaagacagtcacttaatatgtcatatcaggtccgggtacactggcccatgcctataatcccagcactttgggaagtcgaagcgggaggatcacttaaggctaggtattcaagaccagcctgggcgacataatgagacccccgttgctacagaaaaattttaaattagctgggcatggtatcacacacctgtaatcctagctactcaggaggctgaggctggaggatcccttgagcccaggaattggaggcttcagtgagctgtgatcatgccactgtactctagcctagatgatggagcgagaatgtgtctctcttt

SEQ ID NO: 100192 - DNA, 813 bp, Homo sapiens
gtgagccgagattgcgccattgtgctccagcctgggcaacaagagcgaaactccagctcaaacaaaagaaatactaagtcctcaggacacagcctggaatgcaagaagcactcaataaatagtacctgttgctacgaattaccacatttttttaaatggtattttgggggtttgacgtgtagtttggggtaggaggcttttcgttttgttttttgtttttggatagtaccaggtttgggaagaatattctgagtcatacttaccttctaagctgcaagatgtcttttttaatttttctttgtcccctgaggtgcgggatgaaggggtttttttcttcctcctacctttttattctttttaatactgtcttgcttgtgtaacatcaaaatgaggcaagaaagagaaatcaatgaagtcatcttctcatcgatttagtctattcccaggtggccgaaaaggcaggaactgtgaactgaaaacttcatctggcatcagattttctttaattgtctctcgaacactcaccagtaagccagtgcttgctagaactctctagagccaggttgcactctcagcctaaaagaaaagtcttggctgaaacaaagaacagaaggatgggtggggacagaaaacctccctaaatgtgagaaaaggagtcattatttctgagaccaggccttgaaaccgaggtgcttgtctggttcacttgtttctttctttttgtttttgtttgttcagagacagggtctcactacgtcgcccaggctggaatacagtggtgccatcatagctcactgcagtctcgacctgctg

SEQ ID NO: 100193 - DNA, 599 bp, Homo sapiens
tacggtttggggccatgataggagatcaaaatgcgggtgaagacctagaaggcatcagaaaacagacaaggaatactttttagggtggccttattaacatctcctgaagaaggaagtccccagaatacagatttagcatgatgatgctcctgatcaagcatcccctttggctcagcccccaccaaatgccctgagaccactctcactcagcaagctccttcctcagctcctcactctcccatctctgaagacatcagatcagggccaccatggatcagtcccttcttcttatgtcagagctaatgagggcgacgtcaacagtcatagggacaggtagattcacactctgcctggaccaagaacgtcctggccactctccagcctgcacttcagagactgaccttgaactcccaaaccccatggcctaaccaatcacccatacttgtctgtcccgctggccagcactgttccctcaacctcaactgggatgctgctgcttctcggcaatctcaagtcccccagcccttccttctcctgtcttcaccttctcagccctccctgcttcagttcccactgcgttttcttgtaacaagctgacc

SEQ ID NO: 100194 - DNA, 240 bp, Homo sapiens
ttgatgatgtgatttgtaagaggctgtttctggaacaacacgaagaattgtgctggagtgtgagcgtggtgtgagctcaggtagaagggacttgctaagctccactcagggctctccacagcctcaccccgagtggagagatcactgtgcctcccaaccttagtgcagctcctttggggagctggggactgtagagaagccatgctccccaaatattgcctgctgatagctcctggtttg

SEQ ID NO: 100195 - DNA, 391 bp, Homo sapiens
aatgaaaagacacataaaaaaccactaggaaatagtaaagtctcaattttctgccatatctagaaaactgtgtccccctgcttaggttggcaaaacaaggtttgaaattactttacaccagttagattcctttccagattaaaacaaacacaaaataaagaaatttggggccgggcgcggtggcacatgcctgtaatcccagcactatgagaggccgagacgggcggatcacgaggtcaggagatcaagaccatcctggctgacacggtgaaaccccgtctccactaaaaatacaaaaaattagccaggagtgttggtgggcgcctgtagtccctgctactctggaggctgaggcaggagaatggcgtgaacctgggaggcggagcttgca

SEQ ID NO: 100196 - DNA, 400 bp, Homo sapiens
  misc_feature (323)..(323): n is a, c, g, or t
ggactttgaggcactgctgtaaagaaagtgcaaaaatcaacatattcagatttgtgccaaagaaagacttgagtttgagaacatttacatctgttttcaataattcctcgcatatgttgcagaatgtacgttatccatcttgttatccaggaaataacatttgttgcaaacagtttgccaattcgtaattttattgaatttgtttatcatgctgtggcttcatatgaggtctgaaagatggtgatctttggtgttccagctgttgtaacattctgcagtggggccttaattccaggatgagctggaattctttggagggtctngggctttctgagaactacagcataagagccggcattgctgaatggggcaattatcctttgggggaacgcagtaaact

SEQ ID NO: 100197 - DNA, 218 bp, Homo sapiens
ctgctcacgagccacagtacaatccgtatcgtcaccttttttccccaccctaattgtaaatttgtgaaatagcacaaagccaagttgaagacaatatcttccctaataacagtagtgcaatgacagccagccagaaaagttctccaccttggcagcaatgagactaagacttttatgcctgaattgctatcttttttttccaggtcagtaaatttctt

SEQ ID NO: 100198 - DNA, 724 bp, Homo sapiens
atccttgattgaatattggggggcagggaggagtacattaaagggtacctaaatactaggaagctaccttggaggctgactaccacatgccctctatcccattttgaatattaagctttcaaatgttgtaattatttaccaggctcggtagagtggctatagaatacagaagagatggatagaaattacacatttgatttagatgagtccatgtgagtgggccatcttgaaagtggatcctccagcccaagtcaagccttcagatgcctacagaccaagctgacatctacttatcctcaggagagatctcaagccaaaaccacccagccaaactgctcctgaactccgacatgcacaacccgactgagacaccactatatttaagataaagaaatcagacaacttgaagcatacacaaaaccagaaggcaatttaacatatctgcctggaggcaagaagagaaaccaaagaacttctaacacctgttcttctagctagaaaatagagaagagatgacaatattaacaattgcttgccagcttcaaattcccacaaatttatgaatatgaagccagtttccaaaagaaaatatagttcaataaactgtgtaacatatgatcactaaagtgatcttttaccttaatgatataaaaataagccattaagaagttctaaaacccaaatgcatcaacactgatggcaattaaaaattaattactgaacc

SEQ ID NO: 100199 - DNA, 299 bp, Homo sapiens
gagagggctgaaattgagaagagaagagagagaagtatgaaatgtcgggaaatatcagtgtttaatggagagagggagaaagaggaatcaaaaaagtctgattacaggccgggcacagtggctgacatctgtaatcccagcactttgggaggccgaggtggaagtgagccaagattgcctttgctctccagtgcatggctgacatactgagactcctttctaaacaaaaaaaaaaggcggcggggggtggggccacgccctgttgtccccccacctttttgggaggcccaggggggaag

SEQ ID NO: 100200 - DNA, 377 bp, Homo sapiens
agaggttttctctctgaaatcatcagggaaaacaaacaaactcaaagggcaaatgtgtgcatagcaaaagggaagtcgtggaaagaggtctgtggcttgtgcctttgagagctggcagaatgagtgagcagcacaggcttggtgagtgttccaaatttattcagagatccctcagatttggtttggtatgtatgggctctttttattacttcctttgttagcggttcggtgttcaaaagtttcaaagagtcgccacagagtttcttcatcattcttggggagccaggcaggtgggcaactctttctcttaagcagccatctgaaagacctcttaagcagccatctgaaagaccttacctcaggattacacttggaga

SEQ ID NO: 100201 - DNA, 536 bp, Homo sapiens
gtccccaccactgcagacacaggaattgggcagcaggtggagagtctggttgcctgaggcagccagtgctgtcctaggtcatctgtgagctctttatgctgtcccagagtggaatgcaagaggtggccactgagagtgggggaggagcaggcagcccaaggcagccgttcctgtttccctccagaggtactctatcagagccagcccaccctcagccagccacagagggccgtgctataaacaacacgtggcctgttgtgagagggtggcccgtattatggtgcaatatggggaggatatgtcaagcaaaagctgaactttctccctgcaacctccatccagaggtgaagaactgtggggaaactgtggcctactttttgaaggaatgcttcaggttagtggagaaaaagggtagtttgggctcattgcttgcatggaaggcccttgtctttcagaaaatgctgcaatgtctaatcctaaatttcttctgtagaaacttttcctaaattcagatttccttttcctcctggaatctt

SEQ ID NO: 100202 - DNA, 491 bp, Homo sapiens
ttgagattttttaaagcagcccaactgatgctaaggtacaggcgaatttggagtagtactgatttagaaaatagtctgaagggtacctgtaaatgatgaataagtaataactagatgtaaagtcacatcacagatcaatagagtccagctctaattcaaggtgtgaaagaactgtcaagaataaggacttaaaatagttaaaccacgtaagaaatgatgtagtaacatgtgttactagatcatcaggacaacctccatcaacaggacaggaccaagaattactactgaaattattggagaaagatttgttgagcaagaagagtcctctggaccacttacagtgtttagagatttttcttcgaatcaggaggtagtaatttctaattctatatgggaatatattgtttatctgtctttaaactacattacctaattcaaatcttccaacagccccagggaaaataggcaaagaaaatgcctgttccataggt

SEQ ID NO: 100203 - DNA, 534 bp, Homo sapiens
caaatgctgagcccagatccaaagttgtcttctgtccacgagcaccacagtcaggccttgaggggatcttctagggagacaacagccctgtctcaaaaccgggttgccagctcccatgtaccagcagctggaatctgaaggcatcagtcttcatcttagggcatcgctcttcctcacaccacgaatctgaacatgcctctctcttgcttacaaatgtctaaggtccccactgcctgctggagagaaaacacactcctttgcttagcccacaattctccatttcacttgacccctgcccacctctccaacctaactggcttacttcctagtctacctgaggctgcaatcacactgaggaactcacaattccaaacatacaagaggctgcctcttaacacagcacttagacacgtgctgttccacctcccttcagactatctttcagccttctgccagcagtaaaacttataaattttttaaataatttcaatgtagttttcccgccttcaaataaacatgtctgccctcatggtt

SEQ ID NO: 100204 - DNA, 286 bp, Homo sapiens
tccccgcactgacgaggctctgggtacagggacccttcgatggcccatgtggcgaaaaagaggctgcgggggacagacacgtttcccaggctaacgtctgcccaggctatgcagaacagccgctcccgtccaagccagatcctggctggagcaaggagggcgcagcggtcgccagcgcgggccccgaatcctcgacgccggcgccccctggtgttcctagcgccgcggccactggcacccgcgggaggcggaacccgggctgcgggtggtggcaggaccagggagg

SEQ ID NO: 100205 - DNA, 631 bp, Homo sapiens
cttattgcctgcaaagctgcctgaaaaagtagtttctcaagaaaagcagtttctcaagaaacatttcagtaataaatgaatgagtgaaatggtgtgtaagccataaccatcttagaaacagctgtgaaatcaagcatgctcgctgggagatgtggctcctctccgcggcacagtgtctatatcactgatcaggtggacagatagtcccagaaggaggccctcaccaacccatttccccagacacagtcagaactggggtcagctgcagagatgggaaccgcaagaggaaggagacccttaacaaggaccaggaaagtggtgtatgcataaagaaaggaagctgttcttgaaatgtgccagtgacctcatccctgtccctgaggccagcatgagtgcttgcagtgcaagtgacccatctgccagggtgacctcaggcctcggactaacagcaaataaagccatgaacacactgttctctggacacttttgcaatttttcctttccagggcctacagctctagacttgagacctgcaactcttcccctttgttcactatgactctaacaaatttaaaacatgtcagttctctccaaccccaagaaatgtgaataaatgtttccgaaaaccaga

SEQ ID NO: 100206 - DNA, 133 bp, Homo sapiens
agaactataaccttccccaaactctattgctgaggaaattgccttttagaacaggggcctggtatgtttttccataaaccacgaattattttcaggccaaacaaacctcatgaagacatatatgtttcacaag

SEQ ID NO: 100207 - DNA, 339 bp, Homo sapiens
tgtctatgtagagaagtggctagaagcttcttcaaattgagaaagaccaaagttctttattgtgtttggtgaaggagaagaagaaatattcctgcttccctggtcttaatattatcaaaatctctctcacagtttctcaacagcttttatgaaaacaaattcaaaatattggaagaagtgactgacacaccagatgtacagatattaatgcaaggacacaggaaatacaaaaaagcaagaaaatatgacacatcctaagggatacaataattatccagcaatagatcccaatcaaaaagaaattaacacattctgggaaaagtaatttaaagtattgat

SEQ ID NO: 100208 - DNA, 177 bp, Homo sapiens
tggttctggggccagacagctggggtttggatggggctgctgatgtctgcagttttctgcagtcacgccatcagtttcctggtctgtgcaatgggtattctaagccccagttcccgtcagtgtgttaggaagttcagtccaatgaagactgacaggctcctggctcctggtggcttg

SEQ ID NO: 100209 - DNA, 358 bp, Homo sapiens
ctacaaactaatgattaatgatatgtacatataatcatatctgtgatttatatctagtataactcttgttattacatatatcttattacactggaatagctcgtgctctcagtctcttgcctcggcacttgggtggcttgctgcccacagaagcctcattaccaggccaaacaggcagaaggttgagagccccacagcagggctgaacagagacagagttgagggcctcattgctgggctgatacaggcggaaggttgagagccttacagcagggctgaggaaagacaggagggtctggccatgatagctgttgatgatatatttcggttggagtttgctggtttggggaaagatcat

SEQ ID NO: 100210 - DNA, 179 bp, Homo sapiens
tcattaagttatacttttggataggaacactgaggaaaaatgaaagatgagatttgcaatagggattctctaattctcatgttaatctgttttgtaccatttttactttgtcttttgtggatctcttctttttattagatgatattaaaggggattaaagttgtattgtatgaaatgtc

SEQ ID NO: 100211 - DNA, 234 bp, Homo sapiens
gactctgaccaccccttggttctcttatcaaaaaccgccaaaacccgccatcgaaactcccagcctcctgacccccatgccccacccggctccacccgtcttcccaacctggcatccagtgccccaaacctgcctattccgttcctgggaagacccagaagggagcagagctggcaccaggaggccaacaacccaggccccctccgtccctagcccctcctggccctgggccct

SEQ ID NO: 100212 - DNA, 128 bp, Homo sapiens
cacgggtgctcaacagattgcttcctcctatcctcagacggtctttgcatgcatgcagccgttggctctcccattgtatggaaggaaaccagcccagggtcacacagctggtcagcagcaacgcagct

SEQ ID NO: 100213 - DNA, 452 bp, Homo sapiens
tgagtggggggagggcgggtctttcctgtgctgttcttatgatactaaatgagccttacaagagccaatggttttaaaaaacgggagtttccctgcacaagctttgcctctgccattcacgtaagatgtgacttgctcctccttgcattctgccatgattgtgaggcctccccagccatgtggaactataagtccaattaaacctctttcttttgtaagttgcccagactcaggtatctctttatcagcagcattaaaacagactaatacatctcctattctattttttgcaaaaacttgagaggaagtggtgttaattctttagatctttagtagaatttatcattgaaagcatcttgtcttaggcttttctttgttggaagtttttattattatctttactatttactacatctatttaaatagatcttgtaatcagtactggtcatgtt

SEQ ID NO: 100214 - DNA, 381 bp, Homo sapiens
gagctcaaggccagggcggcctggctgatactgatgcaaccacttcccaggccctgagtgtggtcccagcatctcgtctgggaaaagttaaaatgatggaggtctgaatttcccagaaaagaaaagaaacccctgggctgcaggctcctctaaccccacttggaaacacaaagatatgttctggcaccaaaagacgctataatcatccttaaacatccctgcttgggccccagcctcccccgggccagttaggactttcaatagcagggattgagggcaatcagcttcatttcttctttgccacgaactatggcttagcacttggccaagtcctttccccctcaaggtctgtttcctcatctgtgcaatggggactgggag

SEQ ID NO: 100215 - DNA, 350 bp, Homo sapiens
cttagatgtaatagctgaaattataaaactactagaagaaaatatatgaaaaagatccaagacattggcctgggcagtgatgttttggatgtcatcccaatggcggacaggcaatgaaagcaaatgtagacaaatgggattacatcaaaccaaaaagcttctgcacagtaaaggaaaaaatcaacagagtaaaagaataggctacagaatgaaagaaaacatttgtaaaccatacatctgataagaggttaatatccaaaatatataagaaacccaaacaactcaatagtaagaaaaaaaaacagattaaaaaatgggcaaaggatctgaatagacatttctcaagagaa

SEQ ID NO: 100216 - DNA, 302 bp, Homo sapiens
gcagcttccacctcaggtgtgatgtgagtactggacaagttaattcatctgatgtgttaaatgagctcaggctttaaagcatttagaacaatgcctggcacataggaaatactcagtaaatgttgatggttgttgtttcatgccctgtccctacctttccccttcattcttctactatatcacaagaatttctcttctcatgtatgtcctttaagtacccccaacctggtctgcctccagactctgatttattacctatcttgaccacaattttctaaaacaaatgaacaaacgaaagtaaa

SEQ ID NO: 100217 - DNA, 437 bp, Homo sapiens
agatgctccccatgccttgcagcagggaaatttaaattgcctctgcttagagcgtttccagacctgaaagaccagtggtttagggaagcactctacatgagggaaacctgcattagaaggagcttcttaatccctgggatctttccaagctaaactggatgtctacagtggggagaaagaaaagcagagaacaggacatgaggggggctcaaggccccgaagggttgacataggtgtcccttaaagccgaatgtagctccgcagaaagaagaccaggactgagtcaagcttctgctttcccttcaaaatcggccagattttttaaataacttgactctgaggaggaggacctgatttaagtgatggtcccatcactgttgaatcctctgtttttaaaactccccttttgatttttttgggccagagccaattttatt

SEQ ID NO: 100218 - DNA, 456 bp, Homo sapiens
gaacataaatttgttttttgtagtgttggaggatgcgaagtccaagatcgaggcatttgcatctggtgagggctttcttgctgcatctgtacatggtagagggcacaagggcaagagaaagcaaactcactgctgcaagccctttttattatagcattaattcattcatgagggcagagcactcatgacctgaacagctcccaataggcctcatattccaacactgttgcactagggattaagttgccagcacatgaatattgggggacacatccagaccgtaacactgaggcatctagtttggttatctgggcagataatgacgtctcattcaagattggaaacaggatgaaaagatttgggatcctgccaaggagtggaggaatggatgagggaaaactgattattgtttaggacttgttgagtttgaagtaactgtgagacgtctctatatag

SEQ ID NO: 100219 - DNA, 525 bp, Homo sapiens
ttggccacaaccatgcccagtttatttaaaattttttttttgtagagacagggccatgctgtgttgctcagtctggtcttgaactcctggcttcaagtgatcttcccatctcagcctcccaaagtgctgggattacaggtctgagccatcacacctggcctatcagttttgttataaccctcctactatcctagtgggtttgaagtggtacctcattgtggttttaatttgtatatccctaacagtgatgttgagcatctttgtacacgcttattggccatttgtatatctatagtgaaatgtctattcaatgcctgcccatttaaaaattgtgttatttggttgagttgtaacaatttttttttccttgggagacaaggtcttgctctatgactccagatggagtgcagtggtgccatcacagctcaatatagccttgacctcccgggttcaagtgatcctcccacctcagcctccccagtagctaggagtatagacatatgctgccacacccggctaattttt

SEQ ID NO: 100220 - DNA, 803 bp, Homo sapiens
accctgttaaaacaacaaaaatccccaccagtatggctttgagagaaggccccggctttgaatctctgctctgtggcctggggcagttactcagactcatctgtagaaagtgtggggcccttaggactgctgggggatcaaatggtggggggcactagtctgcatggagaggggagcagcactggcagccccccagtcagcgctggcacagccttgccccggccatccacccctgctggagcttcggagtggagctccgtcctcctggctccatccccgccggctgccctgtgatggggtgccctatctggggtgtgcccagagcttcctggcagcacagcagggcagaggttgggacgctcggagctggtcagagtcttcgggtaccccttggacatccctggtcccaaccatgacgggctgcttggacaaggccacctcacatttgcaggtgctccaagggcagcccccagtgggctgggcccctgccagagtgggggctgctgtggccagggctcaggtggcccagaccctggctctgctgctgctcctggtgtgacctcagacaagccccgagcccctcgccgcctcttcacggggaaagggaaccggcctgattctgtagggtaggggtgagagagggtctcggtctcggctcttttctggaagaacctttcggaggtcgtttcagaggtctccactggcgccgacactttcttcctgatgtggccctgccttgaggggccagtgaccttccccagggtgtgtggggccccatttcctctgctggggtgcagaggctg

SEQ ID NO: 100221 - DNA, 364 bp, Homo sapiens
aaccatcaagtttaaagactgctttgtggctaggcgaagtggctcacgcctataaccccagcactttaggaggccaaggcagaaggatcccttgaggccaggagtttgagactcacctgggcaacatggtgagacccccatctctacaaaaaataaaaacaaaaaattagccaggcatggtggcatgcctccatagtcccagatacttgggagggtgagacaggaggattgcttgagcccacagatataagcccagacgcctaggcgagagtgagactgtgtctcaaaaaaagaaacaaagaaagagaaagagaggaagggaagaaaagaggaaggcaggaagggagggagggaagccaaagaa

SEQ ID NO: 100222 - DNA, 145 bp, Homo sapiens
gtacgaatgaatcagttgcttatttgctctcacttctctgagctttggatgctcaggaagaaaggatttgagccaatggatgaccatggggtccgtggaacgcaataagccctgccttcttgtggaagagaggacggggctgtgg

SEQ ID NO: 100223 - DNA, 472 bp, Homo sapiens
gcaatctatcttagaatcttgtcaaaggtaaatacaaggttcagggtttacggagccaccttctagccctttaagccaccagaattgctggtgtcttatggactcctgagaagtttgtggtggtgattcttagagctcagctcccaactgctggactgccggtcactgggcagaaacagaactcagttctcatcacctggatgccatttcatactctccaccctctcctgggcttcagttgccccacacaatgtcagtctctttgtgatggttagttttatgtgccaactttgctagggcatggtacccagatatttggtcaaacattatcctggatgtttctgtgaaggcactttttagcagattaacatttaaatcagtagattttggcaaagcagagtcataatgtgggtgggcctcatccagtcagttgaaggccttaatagaaaatgatgggctgggcgcggtggct

SEQ ID NO: 100224 - DNA, 301 bp, Homo sapiens
ttctggctgtgtctatgagggtgttgctggatgaaattagtatttgaatccatagactgaataaagcaaaaacctccctcaatgtgggtgagcctcatccaatccactgaaggcctgaatagaataaaaggctgggtaagaaagaattctctctacctgtcttctcctgcctttgggtagcccagcactcacatcatgggctctcctggttcttgggtctccagactaggactggaatgacaccattgtctctcctgggtatccagcttgtcaagtgtggatcttgagttggggcttggcc

SEQ ID NO: 100225 - DNA, 259 bp, Homo sapiens
accttttttttttttttggcccaaatcaaatatagtcctaaaaaattttcatactctcgaagtctaaaaacaaagtagataacttaggtctcgaattcaggtttgagttttacttaaaagggtcatattcaccacactgtcttgcaacactaaactagctgggaaaatccgggggcatggaagaaaaaataattaggggcatggtagaaaaaataactagattacctagagttctcgtgtctttcagttcatgtcattt

SEQ ID NO: 100226 - DNA, 732 bp, Homo sapiens
ctcatgtgaatcaattatgtaaagaaatttcagagcttccaagagcacaaacttaaaataagtaaagaagacagtaaaattcttaaaaaggctcagaaagatggatttttgcatgagacgcttctggacagaggaccaaattgaaagccaacagatactgcaaatgactgggatttttgtttctgccttatctttttgtgttttttttctgaataaaatattcagaggaaatgcttttacagagttcttgagttgttgtgaacttattgtttagctagtagctagtttaaccaggattaaacaagtttaatcaggattcttcatggatgtactttttagctaactacagtttttcacatggaaatgaaacttacagtaaacacttaacgtaccacagaatttttttctggatttctggtcctgaagcatgaagtgtactagaaaccaattcttcctgcgctacttgtggaatctttcttactggatcataatcttactttactttatacaatagatgcttaatcagtgcctttaataggaagttagaaactcccaatccaatcaacaaggctttgattctacctcctaagtactacccagatcacagacaatccaaatatcagaactagggggctgggcagagaggacaaatcatctattagggagtgggacagaaagtggaaacattacaaaggagcaagtaggctcagaacagaggggagagtaatactg

SEQ ID NO: 100227 - DNA, 2486 bp, Homo sapiens
acggaggcgggttctggacagacgtacgctgtcagggagtgtttactttgcctccacttctgttcctccccgccctggtgctgctccgggtcacatactcgtcctgagccggcttcagcctctctgcgcagaagtgtcccggagccatggccgagtaatcttatgcgaagtctaccaagcttgtgctcaagggaaccaagacgaagagtaagaagaaaaagagcaaagagaagaagagaaaaagagaagaagatgaagaaacccagtttgatatgttggaatctggtgaacagtaacaaactttgatgaaatttcaggaaccatagccattgaaatggatgagggaacctatatacatgcactcgacaatggtctttttaccctgggagctccacacaaagaaggggaaaatggctttgttggcctcaaatggctgctttattagatgcaatgaagcaggggacatagaagcaaaaagtaaaacagcaggagaagaagaaatgatcaagattagatcctgtgctgaaagagaaaccaagaaaaaagatgacattccagaagaagacaaaggaaatgtcaaacaatgtgaaatcaattatgtaaagaaatttcagagcttccaagagcacaaacttaaaataagtaaagaagacagtaaaattcttaaaaaggctcagaaagatggatttttgcatgagacgcttctggacaggtagctatttatttacttattttcactgttttcagtagccaatagaaatggcatgtagaaaacctatattctcttaaattactgtagttttcacatttttgtcttcatttctaatttatgagtgtggcaatattacctagagaggacatcatgagtttgggaaaagactgtcaacaaagaatatctaaaaattataaccgattctaagtatatactttaagaaattcaggtttgactgtatctacttcataaatttatcattatctttttataactattagaaccagagttagaaagaagcagtttggctaatataaaaattatgtggattctgttagagtagttcagcttccttaaaataagcatatatcaactaacaaactaaatataaaagctaaacaagtgaaactgaagcagatttattgtaagatttggaagagtgcaggatgtttatcatagcacattattaatatttattattcttcctatgtagataagtaatgtcctagatttataccatagaaaaacaggtagagacgtttagctgtgagtgtacaagtataaatcaattaagtgccagattttgatcatcaccagttgctcattcaagtcctatgttgcaaagttactcttacccttttttacattacttgataaaggcaatgtttaattacatatttcctgttaactagctggtagagtacatacgtaaagtcagtaaataatgttacaaattttttccagctgagtaagtgaatatgtatctagttgtaagaaatcaagaagaggataaaaaatataatcaggatgtggactctaaaacggaataaactctatgtcctgtaacttttctcacttgtaataatacagcattctcaccctgttaaatggaaatttagagcacccttaaattccggaataaaattgctatttggatagaaaaaacccttaggcaacatttattgaatattaggaaataacttttatgggattagaatccattttttatagaaaccaaatttaaaagtatacatattttaatataagtgttgtgataatacagtaaccaaaattgaacacacagttttatagctttttatatttagtagcagttgaatatatatggcatgttttacatagattaattttactatttttctttgtttaaacaagaggaccaaattgaaagccaacagatactgcaaatgactgggatttttgtttctgccttatctttttgtgttttttttctgaataaaatattcagaggaaatgcttttacagagttcttgagttgttgtgaacttattgtttagctagtagctagtttaaccaggattaaacaagtttaatcaggattcttcatggatgtactttttagctaactacagtttttcacatggaaatgaaacttacagtaaacacttaacgtaccacagaatttttttctggatttctggtcctgaagcatgaagtgtactagaaaccaattcttcctgcgctacttgtggaatctttcttactggatcataatcttactttactttatacaatagatgcttaatcagtgcctttaataggaagttagaaactcccaatccaatcaacaaggctttgattctacctcctaagtactacccagatcacagacaatccaaatatcagaactagggggctgggcagagaggacaaatcatctattagggagtgggacagaaagtggaaacattacaaaggagcaagtaggctcagaacagaggggagagtaatactg

SEQ ID NO: 100228 - DNA, 806 bp, Homo sapiens
acggaggcgggttctggacagacgtacgctgtcagggagtgtttactttgcctccacttctgttcctccccgccctggtgctgctccgggtcacatactcgtcctgagccggcttcagcctctctgcgcagaagtgtcccggagccatggccgagtaatcttatgcgaagtctaccaagcttgtgctcaagggaaccaagacgaagagatttgcctgaggttgactgtacatgcaaatattgagcatttcctcctggtctccgtgataaacaaaggttttgatattgttaggcgagatggaaagaaagtatcaaggagtgagctgaagccactgcccttgagaaccctctcgaggagtctggcctcatgaagatgccagaataaacggcagtaagaagaaaaagagcaaagagaagaagagaaaaagagaagaagatgaagaaacccagtttgatatgttggaatctggtgaacagtaacaaactttgatgaaatttcaggaaccatagccattgaaatggatgagggaacctatatacatgcactcgacaatggtctttttaccctgggagctccacacaaagaagttgatgagggccctagtcctccagagcagtttatggctgtcaaattatctgattccagaatcaccctgaaatctggctatggaaaatatcttggtataaattcagatgaacttgttgttgggcattcagatgcaattggaccaagagaacaatgggaaccagtctttcaaaaccgggaaaatggcttgtcgaactcaaatagctgtttattagaatacg

SEQ ID NO: 100229 - DNA, 2338 bp, Homo sapiens
cccgtggccccgtacccacgagtttcagtcctctgaggcatctctgcaggcctctgcctgtaagaagaaaaagagcaaagagaagaagagaaaaagagaagaagatgaagaaacccagtttgatatgttggaatctggtgaacagtaacaaactttgatgaaatttcaggaaccatagccattgaaatggatgagggaacctatatacatgcactcgacaatggtctttttaccctgggagctccacacaaagaaggggaaaatggctttgttggcctcaaatggctgctttattagatgcaatgaagcaggggacatagaagcaaaaagtaaaacagcaggagaagaagaaatgatcaagattagatcctgtgctgaaagagaaaccaagaaaaaagatgacattccagaagaagacaaaggaaatgtcaaacaatgtgaaatcaattatgtaaagaaatttcagagcttccaagagcacaaacttaaaataagtaaagaagacagtaaaattcttaaaaaggctcagaaagatggatttttgcatgagacgcttctggacaggtagctatttatttacttattttcactgttttcagtagccaatagaaatggcatgtagaaaacctatattctcttaaattactgtagttttcacatttttgtcttcatttctaatttatgagtgtggcaatattacctagagaggacatcatgagtttgggaaaagactgtcaacaaagaatatctaaaaattataaccgattctaagtatatactttaagaaattcaggtttgactgtatctacttcataaatttatcattatctttttataactattagaaccagagttagaaagaagcagtttggctaatataaaaattatgtggattctgttagagtagttcagcttccttaaaataagcatatatcaactaacaaactaaatataaaagctaaacaagtgaaactgaagcagatttattgtaagatttggaagagtgcaggatgtttatcatagcacattattaatatttattattcttcctatgtagataagtaatgtcctagatttataccatagaaaaacaggtagagacgtttagctgtgagtgtacaagtataaatcaattaagtgccagattttgatcatcaccagttgctcattcaagtcctatgttgcaaagttactcttacccttttttacattacttgataaaggcaatgtttaattacatatttcctgttaactagctggtagagtacatacgtaaagtcagtaaataatgttacaaattttttccagctgagtaagtgaatatgtatctagttgtaagaaatcaagaagaggataaaaaatataatcaggatgtggactctaaaacggaataaactctatgtcctgtaacttttctcacttgtaataatacagcattctcaccctgttaaatggaaatttagagcacccttaaattccggaataaaattgctatttggatagaaaaaacccttaggcaacatttattgaatattaggaaataacttttatgggattagaatccattttttatagaaaccaaatttaaaagtatacatattttaatataagtgttgtgataatacagtaaccaaaattgaacacacagttttatagctttttatatttagtagcagttgaatatatatggcatgttttacatagattaattttactatttttctttgtttaaacaagaggaccaaattgaaagccaacagatactgcaaatgactgggatttttgtttctgccttatctttttgtgttttttttctgaataaaatattcagaggaaatgcttttacagagttcttgagttgttgtgaacttattgtttagctagtagctagtttaaccaggattaaacaagtttaatcaggattcttcatggatgtactttttagctaactacagtttttcacatggaaatgaaacttacagtaaacacttaacgtaccacagaatttttttctggatttctggtcctgaagcatgaagtgtactagaaaccaattcttcctgcgctacttgtggaatctttcttactggatcataatcttactttactttatacaatagatgcttaatcagtgcctttaataggaagttagaaactcccaatccaatcaacaaggctttgattctacctcctaagtactacccagatcacagacaatccaaatatcagaactagggggctgggcagagaggacaaatcatctattagggagtgggacagaaagtggaaacattacaaaggagcaagtaggctcagaacagaggggagagtaatactg

SEQ ID NO: 100230 - DNA, 347 bp, Homo sapiens
tcgagcctttgactattctttccatataggaagataggactagagttaagttgggaggcagatggggaaactgcctgattgttctgcgtcagaaagcagaattcattcctttgcccctgagaaggcaggaaagagaggtaaaatgggaaatggagagaagggagagaggagatgagagcttagccacatggcagggaaattgagcagctggactttttttgcctgtcttctcaaacctctccatagcactgcatgtgagtagttttctgtgaaaattagggaaacttgaactccagggctgaatagatgtaccctgaagaaaaaacatgagattatccatccaccac

SEQ ID NO: 100231 - DNA, 730 bp, Homo sapiens
aattcatgaaattaaacagatattattgcctttgggaaacatgtttttattgtcatttaaatcacatattaagaaaataatattgctataatttttagtccctcctttgagttctttctagctaagcactttcaatgtgtaaaatatctatccttcttacagagagacaagtatacaaatagttaaaagttaggattaacaatgccatattaatggtggaaaaagccctacccttcttttaacagggtattttatacctgttgttttgatattcatttattaatgtattaaatatgccatataattttctggatcttagtttacttttctgtaaaattttacttctacaattatttgagattttatatctatttttggaatatataactgttcacttacagtcctctaacatctattacatttatactttttgacaggcattgttcaaagaactttagttatattaaacatgactaaaacctgatgacaaactatttctgtctctattatgacaggcattgttgaaataactttagatgtatcatagtaaacatgacaaaaacctgatgacaaactatttctctccatctatggcaacaaaagtggcccatagagagtttgctccagatcagaaagctagtggttccagtgctagagagggaaagatcatacacttaattgacacacttatttatggcatactatgtgccagtaactactcaaactgctg

SEQ ID NO: 100232 - DNA, 404 bp, Homo sapiens
ggacaacagcagtgcaggactgtgatccctaaaagaagggaaacaaacaaagtgagctttacaggcacccacccaccctggctttttgcctggggcacattctaaattgtagatctgggacagggaatcttgagcaaagaacaagatgaagagatagagatcagaatttatggaagctgaggcagcaagaagttgtagggcaaagttcagcaggaaggacactttgtcaaaattaatgctatccatagaagtctctgactttttgctgaattctagaatgaacatacatggagtaaaactgtaaagccagacaaagagcaaccagattgatgtgaactgacagacatcagaggtcacagagggctgggaagcatttgaggttttactagctagaggggaaagtc

SEQ ID NO: 100233 - DNA, 243 bp, Homo sapiens
aacagagactgtgtatgttgcccacaaaggctaaagtattgactggccttctaagaaaacgtttctcttcctctgctctatatattaacatgcacatatgactatgcagagcttgttttgttccactggggctcttataataaaataccatagactgggcgacacagcgagcccctgcctcaaaaaaaacaagacaaaaaattcatttttactgttgtatatttgacagttgttctttgggtc

SEQ ID NO: 100234 - DNA, 412 bp, Homo sapiens
gaaaaaatcaggcacgtcatgtcatttaattatttccaaggagtggacgttggcatgtagttttgattgatacttggaaaagaaccaacaaaaccctacacgaaacaaacaaacaaaaaattatactatatggcaacgcactgagagaagccaggtggaaactggttaggtcacaggatcagagccgcttcaagaggggcacggtctcactctgtcacccaggctggagtgcagtggcgcgatctcggctcgctgcaacctcacctcctgtgttcaagctgttctcctgcctcagcctcacaagtagctgggattacgggcatgctccaccacgcctgactaaattttgtattttttggtagagacgggatttcactgtgttggccaggctggtcttgaacgcatgacctca

SEQ ID NO: 100235 - DNA, 216 bp, Homo sapiens
tagagaaccagaagctgggacgatggaacactccctttggaattagggtcagctctcaataaacacgaaaaacacaaaaagcaaaagagggcttaatttaaaagtcagaatcatagcaacaagaaagtaaggtcttcctctaagacctaagcattagattctaggactgtagactcttaaagaggaagtcaaggaagagggagaaatggagggaag

SEQ ID NO: 100236 - DNA, 439 bp, Homo sapiens
aaaaacagtgtgtgaaaataaactcagactagctgagaatgatgtaataaagactgtcaagtaaaaataaaagtgtaaattataatacaggtcattaatcagtcattatttctttttttaatcctccctttctagaaatatgagggaaaatattcacagaagcaactaatctagagtcacgtaagtagtttcaagttctaccttaaccagactttggctatgtcttttaattatgggaatttgagttaatctttaaacagagattctatggcattctcccctgcatcccactctactgcacactcactggcctccttgctgttccttgagcccaccaagcactcaaaggccttaggacctttgtactggctgctctctgcttggacttcccatagctctctgcctcaccttcttcaagttggctcaactataatctcat

SEQ ID NO: 100237 - DNA, 297 bp, Homo sapiens
gcctttgtcagctcccctaagtgtgtgatcttgcaaactgaggtcacgccagatgccgaaatctccatcccccccaggagccctcacgctgcatgtcacagccacgcccacttctccgcctggaaacctctctacatctgtgctccctttagtttcgtcattttgagcacattctatggacaggatcttgctatttgcgacctcggggactggcttttatcaccatcattccctgcagatccatgcagggtgctcagccttttaatcccgagcagtatctgccctttgcctttcaac

SEQ ID NO: 100238 - DNA, 533 bp, Homo sapiens
ctccaaccaatggagtgtgaggagatgggatgtgtgctcaggctggtccaggataagctcccatgcccttgcttcatgctctttccccttctactgtcttgcggcaatatggctggactatagctcagctctcctaccttccctttcacccaccacagtgctatgccatgttgctatctctcactttagcagaacaattcacaccagaaacctaccccttaagaatgtgtcttaaatgtccttcaatgctgggcacagtggctcatgcctgtaatctcagcactttgggaggccgaggcaggcggatcacgaggtcaggagatcgagaccatcctggctaacatggtgaaaccccgtctctactaaagatacaaaaaaaaaaaaaaaatagctgggcgtggtggcggttgtctgtagtcccagctactcgggaggctgaggcaggagaatggcgtgaacccgggaggcagagcttgcagtgagcagagatcaggccactgcactccagcctaggcaacagagcgagattccgt

SEQ ID NO: 100239 - DNA, 306 bp, Homo sapiens
cctgaagtaatacactctgtattcatttgcaatcattaaaaatttagagtcagtttaccatcctaccaagtagctaagtaacaacacctcgctttcccagaggtcagtcttcttgcaacttcagcctcttaaaacaaatccaagagttgaaaaaggatgctgagtgtcgaatattactgtacaaatctcatgcactaaaatctcttcaaaaatgagccctgggatctctttcacatcctatttgttttcttttacatataatccagataagctttcttatttggcttttgaatgtacgttgaatat

SEQ ID NO: 100240 - DNA, 214 bp, Homo sapiens
gtgacagcccatcccatgggatgaagcattcatagcagccgatagtgaaatcctggccatcctttctgagtctcaggcccaggcagcacgccagctcctggcacacgtgagctcattactgtgggcttaggtgttgcagaggaatggagtttgcagggctgcagctctggtaaaggccacccagcccgagtggcaggtctgtgtgcagagccta

SEQ ID NO: 100241 - DNA, 111 bp, Homo sapiens
tgtgtgcagggaatagcaggcagttccatttctctccaggaagaggtatataaagaggtggaaggagagtctatattcattccataaatgtgagatgcacagaacaaccag

SEQ ID NO: 100242 - DNA, 768 bp, Homo sapiens
attaggaccaggcagtcagtcatctgttctgggagacaaaccagtccaggacaagtagcgtttggacaatatgccaaatcctgtcacatcacattgttgctctaaaatgggtggatggattgggttgatggcatacgctaagctccatgagggcagggattgtggctggactaagtctagtggcaattaaatagagctcaaattaaatagagcttttgctttgaggtctgaatccatctccatgatttgtcactagactagtgacaaacagtggctgggatagcatatgttgtttagacagcttttgcttgttctaaaagtttgaatgtgaattggggtttgcaactcaaaatttgtgtttaatatttgcaccttatgtttaatgaacataaagtttgtgtaggccatgtgaaaatcagagactgtatatttggctgaattgctctgtaatacatatattttaatttgggagctctctgtattaccgaggacccaggatagagactcttactgtttctgacctgatcatttaagggcaggtttttgcccaggttatgagactgatgcatcatgccttgaccagttaagattagtgacaatttaaattttctgcttttgatttaagtaaaaattcaaattaaatagagcttttgctttgagggctgaatccatctccataatttctttctacatgcacatgtgtagacaatttccctttatctgttcttacagataaacttctccataattgcacacttatctggggat

SEQ ID NO: 100243 - DNA, 373 bp, Homo sapiens
ccttgtaagcactgtacaggcaccaagggtgaatacccacccctccaccgaggagaccacgcctcttgaaatgacccagtgtttcccctgtcctgcaaaagtgtgagtagtacatcatcacaatcacagaccccgtcaccctccccttctctgcttcttttcctgttgccctcttaaatcacatataatctggctgccatgacatgattaaagacgctgaaccctcattccaagggcacaagtccttctggagacagactgactggcatatagtgtttgactattgaccacctccatgctcttctctcctgctgttctcacctccggctgtcctagctctcctctgcctctccaagctctcctggaagggttc

SEQ ID NO: 100244 - DNA, 931 bp, Homo sapiens
agcggcttccttctctccccccaagcctccatatttatttccttcctactaaaattttcttccacattccctctcatccagtcctcaatgaatcctgaggacagctatcagtggtcactctcttgggcttgaaatggaacagatcttcttgttccatctctttctgatagcgccagttcctgctgaggacagaacattgtcttcttttctccctgcctcaggcagatggcagggagtgttgtgtgttcccacaaaggagcgtgctgtccccgctcccgagtctctcagcgagccctgtcatggaaggcatccaggagaatgtggaactccgcacccgctttctcagaacagaggagcatccatgaccctcagaatcacagcattgagaggtatgtatcaactccaggtctctgcatttgtccgcgttcttcactgtcatgtggctcctcccgatgtgatagcaaagatgcccgtggacaaaccaggcttgggtccatcatgttggcaatctggaggaagccgagcactttttctccaactgactcagtcccaggactggctctcatttgcccagcttgtgcagaatctcattgtcctaatgttaaatatatatcatcagtgctcaatgttacagcttcaaacatagaagatacaagaagtaaatgctgagatttcgctatttgttaacctatcatgtgatgaacctatacaaattgtgtaaagcaaatgttttcaggcattggatgtccaagcagcacaggactatcaacctgaaggacaagagaatccccaagatgagcctcatatttatcctggctttccgcttcggagcactctctcaacttcaacacagagaagtgaaacccaagtgaaagagtattgctaaaccaaggaggcagacctcatgtttgttcaagagtacccaagagat

SEQ ID NO: 100245 - DNA, 82 bp, Homo sapiens
ttcatggtgacaggatgcaccaccctgggaagtaatatatctaaagctctctaccaatgagcttctacatgtaaacttactt

SEQ ID NO: 100246 - DNA, 373 bp, Homo sapiens
ttcatggtgattggttgaagggagaacatgtgacttgagctgggccaatcacagccagtaggagtctgtcctgggacttttttggtttggtttctttttggagagggagtctagctctgtcacccaggctggagtgcagtgacacaatctcggctcactgcctcccgggttcaagagattctcgtgctttagcctcccgagtagctaggattacaggcgagcgctaccgtgcccggctaatttttgtatttttagtagagacggggttttgtcatgttgctcaggctggtctcgaactcttgacctcaagtgatccacctatgtcggcctcccaaagtgttgggattacatgcttgagccaccgcgcccggcc

SEQ ID NO: 100247 - DNA, 501 bp, Homo sapiens
tcataattttctacctgtactgtagtttactgaacatttcagtaaagtgttctctttcctgctattttataagcccctcagtagacattcactaaattattgttatttctagatttggatctctacttggatatctaataggcacctcagatctactatgtctaaaatctagctcttgatttcctcctacagccttccgcatttcagtaaatgacaatgccattcttccagctgcttaggcctaaacctctctttctttcacacccttcatccaatccacaagcacatcctgtcaactcaaccttcaaaatatattcaagtccagccatttctcaccacctctaccatcatctctctcctgtgttcccacaaaagcctgccaactgatcttcttgcttccacccttgcctctactagtcattcccaacacagcagccagagtattgcttttgaaacatacgttgccactgggcacagtggcccatgcctgtagtaccagct

SEQ ID NO: 100248 - DNA, 239 bp, Homo sapiens
aggtgaatgactgttatacctatttaggaaaacagacgaaaccaataaaaccaaactatttctatacagtgattattagcagagatgccattggcattttagatgcattttgggactgttccacacatttaggacattacattcctttccctttgcactaaatgccagtagcacttccctagacactgacaaacaaaaagtgcccctgtagatttctgaaaaggccagggtgtggattg

SEQ ID NO: 100249 - DNA, 409 bp, Homo sapiens
tggctttaaaagataaaccaaaaaagattaattgcttaagcaaaatggtgtgtttccaattagtgtcatcctttctgttaattggagacaggttaataaaacatgggtcagtaacactacgacttttttcccccaacatccccgaaataaaatttattgttccactaggaaaatgtaagcggtgcattatcttttcctcaagtgcttaagcattatgtcctgtgatggatgggtacgacaggcagtggcggggtaggcaaaggaagtgggcaggcttgtttccagctgatgacctttgaaaagttcacgaccagcaaacattcatcctgctgccaaaatagcggatgatttcaaagtcacggtgttaagcgggttgctaaggaagtgttacggtggaggctattgtgta

SEQ ID NO: 100250 - DNA, 766 bp, Homo sapiens
tgtttgatctatatttatttgactttgacaatctgatattatttagcattatttccagtcccccaaataatgtcaaaattttgttatgttagataggaatatcttgttattcaacttgaaggtaaactgcttgatcaatgcatgtaattccttgacagatcatcagcacctctaagacaacatgtagatattgctcattattaactcatttcatcttttcatgataaattacataaatctaattttcgtttttaaaatgcaaaccattatgcctcgtattatggcattcttgcattactataaaggaatacctaagcactacgtaatttatacagaaaagaaaggttgacttggctcacagttctgcaggctgtacaggaagctttgcattggcagttgcttggcttcaagaagggtcctcagggaggttttacacatggcagaaggtgaagcaaaagaaggtatgtcacatggccagagcaggagcaagcagggagaggtgccacacacttttaaacagccagatgtcatgagagctcactcactcttgcaaggacagtgccaagaggatggtgctaaacatgagaaatcagccctcatgaccccatcaccttccaccagaccccacctccaacactgggaattacaattcaacatgagacttaaagggtacaacatccaaactatttcattccatccctgggcccttcaaatctcatgttcttctcacattgcaagatacaatcatcccttctcaatagtcccc

SEQ ID NO: 100251 - DNA, 747 bp, Homo sapiens
agccgagaactggggcggcgcggcgcggcgcggtgcatttccaggcgctgctctccgtcgcagagaaccctgagctcggcgcgccgagagtcccagcagggcaagggggcgcggcgtcctggtcctcgagcttgggagacagatgcgcatgggcgtgggggcatgcggacctaagctcgggtgaagctctcgggaagggcaagactgcggcgacgagatgcgagcagaggagccctgcgcccccggggcccccagcgccctgggagcccagcgcacgccgggccccgagctgcgcctgtccagccagctgctgcccgagctctgtaccttcgtggtgcgcgtgctgttctacctggggcctgtctacctagctggctacctggggctcagcataacctggttgctgctcggcgccctgctgtggatgtggtggcgcaggaaccgccgcgggaagcttgggcgcctggccgccgcctcttcgaattccttgacaatgaacgcgagttcatcagccgcgagctgcggggccagcacctgccagcctggatccacttcccggacgtggagcgggtcgagtgggccaacaagatcatctctcagacctgccctacctaagcatgatcatgggaaagcagttccgggagaaacttgaccccagatccgagagaagagcatccacctgaggacctttacctttacaagctctacttggacagaggggggtgtgtctcgggaagggcagcctga

SEQ ID NO: 100252 - DNA, 211 bp, Homo sapiens
tggcatgttgagttgagccatgtgagttgtgagttacaggatccctctttctaaccttctttcagggtcctctagacgttaccactcaagcagaagcaaggaaggggaacccaagggagagaagagggtggtgcatttattctcttcctgctaaagctactgccctgactaattggatttagccctgccttatctttggcctaaccaaaga

SEQ ID NO: 100253 - DNA, 1012 bp, Homo sapiens
ggcgcgctgaggctgcttctggtcagggaaaccattctcctacaccgaccccagcaggcagctgcgcccccagagctttaccctgtctctgcactgaccttggggaaggaatttagggaggggtaaaacaaggctagagctggtaccattactgccccgggagagtcccctctgccgccaccagagacagccaccaaagcgccccacgcactttcctgagcacctggaccactttacggagaacatggaggacttctccaatgacctgttcagcagcttctttgatgaccctgtgctggatgagaagagccctctattggacatggaactggactcccctacgccaggcatccaggcggagcacagctactccctgagcggcgactcagcgccccagagcccccttgtgcccatcaagatggaggacaccacccaagatgcagagcatggagcatgggcgctgggacacaaactgtgctccatcatggtgaagcaggagcagagcccggagctgcccgtggaccctctggctgccccctcggcacagtggcatgcacgggaggtcgccattggtcaatacctacactctgatgttgggcctcatggtcgcgcattggtactcgagggctggccattccacacacagcgccagtgccccactggggaggagatgatgtcatgttgccaagttggatcaaacacaagtatggcgtctggtaggtgaaccagggtcgctacacaagatggatcgagccggagggaacctgggttgacatgatgcgctgcccgcacctggctcgccaccaggacgagacccagtggacaggatggagggatggggaaggacttcgctcagagtcctcccgatactctgcacacccacctacacatgtgcctgatacgggggctcggcaaggtgcgcttcctccgcatggaacatactcgcagctccggcaaattcttgccattggtcaccttcttaacattactgggggaccatcaagggcaatgg

SEQ ID NO: 100254 - DNA, 2106 bp, Homo sapiens
ggggcttcgccccggacctgccccccgcccgtttgccagcgctcaggcaggagctctggactgggcgcgccgccgccctggagtgagggaagcccagtggaagggggtcccgggagccggctgcgatggacgccgtcttggaacccttcccggccgacaggctgttccccggatccagcttcctggacttgggggatctgaacgagtcggacttcctcaacaatgcgcactttcctgagcacctggaccactttacggagaacatggaggacttctccaatgacctgttcagcagcttctttgatgaccctgtgctggatgagaagagccctctattggacatggaactggactcccctacgccaggcatccaggcggagcacagctactccctgagcggcgactcagcgccccagagcccccttgtgcccatcaagatggaggacaccacccaagatgcagagcatggagcatgggcgctgggacacaaactgtgctccatcatggtgaagcaggagcagagcccggagctgcccgtggaccctctggctgccccctcggccatggctgccgcggccgccatggccaccaccccgctgctgggcctcagccccttgtccaggctgcccatcccccaccaggccccgggagagatgactcagctgccagtgatcaaagcagagcctctggaggtgaaccagttcctcaaagtgacaccggaggacctggtgcagatgcctccgacgccccccagcagccatggcagtgacagcgacggctcccagagtccccgctctctgcccccctccagccctgtcaggcccatggcgcgctcctccacggccatctccacctccccactcctcactgcccctcacaaattacaggggacatcagggccactgctcctgacagaggaggagaagcggaccctgattgctgagggctaccccatccccacaaaactccccctcaccaaagccgaggagaaggccttgaagagagtccggaggaaaatcaagaacaagatctcagcccaggagagccgtcgtaagaagaaggagtatgtggagtgtctagaaaagaaggtggagacatttacatctgagaacaatgaactgtggaagaaggtggagaccctggagaatgccaacaggaccctgctccagcagctgcagaaactccagactctggtcaccaacaagatctccagaccttacaagatggccgccacccagactgggacctgcctcatggtggcagccttgtgctttgttctggtgctgggctccctcgtgccctgccttcccgagttctcctccggctcccagactgtgaaggaagaccccctggccgcagacggcgtctacacggccagccagatgccctcccgaagcctcctattctacgatgacggggcaggcttatgggaagatggccgcagcaccctgctgcccatggagcccccagatggctgggaaatcaaccccggggggccggcagagcagcggccccgggaccacctgcagcatgatcacctggacagcacccacgagaccaccaagtacctgagtgaggcctggcctaaagacggtggaaacggcaccagccccgacttctcccactccaaggagtggttccacgacagggatctgggccccaacaccaccatcaaactctcctaggccatgccaagacccaggacataggacggacccctggtacccagaagaggagttcttgctcactaacccggatccgcctcgtgcccctgcctcctggagcttcccattccaggagaaaaggctccacttcccagcccttccttgcccctgacatttggactcttcccttgggccgaccactctgttctcattctccttcccaccaacatccatccgtccttctcagacaaaccactcactgggtaccccacctcctctctcatatgcccaacacgaccactgcctccctgcccccacacctgcacccaaacagacacatcaacgcaccccactcacagacaccccttacccatgcctccagctacaaaacaattcaattgctttttttttttggtccaaaataaaacctcagctagctctg

SEQ ID NO: 100255 - DNA, 1881 bp, Homo sapiens
  misc_feature (577)..(577): n is a, c, g, or t
aaaaatacaaaaattagccggcatggtggcgcacgcctgtagtctcagctagtcaggaggctaaggcaggagaatcacttgaacctcggaggcggaggttgcagtgagtcgcaaacgcaccactgcactccagcctgggtgaaagagcgagactctgtctcaaaacaaaacaaaacaaaaaacctaacaaaaacaatagctaccatttactagacactcactacataccaggcactgtgccaaacagctccttcttatcagctcagggtgctgggggtgccagggagggaaggtcagtgaaactgtggcaggtgtcggttaagcaaaagaaggctggcatctgtgcagctgggggcaggccttccctcctccaacccccttggccaggagcatcacagggcaggcctgagcttccacaaggtgacccagccagtcaccatgaggcaggccccaggcgccaggccactctgcagaggagccacgcaggaggtgacctttcctatcttgactgaaacgggcacctggcgtggaggccaagtctggagccagccccctaggagagctccaggaggcaganatgcctgcggggtcaaagcctgccagctgactgctgtgccctcctcaggaccctgctccagcagctgcagaaactccagactctggtcaccaacaagatctccagaccttacaagatggccgccacccagactgggacctgcctcatggtggcagccttgtgctttgttctggtgctgggctccctcgtgccctgccttcccgagttctcctccggctcccagactgtgaaggaagaccccctggccgcagacggcgtctacacggccagccagatgccctcccgaagcctcctattctacgatgacggggcaggcttatgggaagatggccgcagcaccctgctgcccatggagcccccagatggctgggaaatcaaccccggggggccggcagagcagcggccccgggaccacctgcagcatgatcacctggacagcacccacgagaccaccaagtacctgagtgaggcctggcctaaagacggtggaaacggcaccagccccgacttctcccactccaaggagtggttccacgacagggatctgggccccaacaccaccatcaaactctcctaggccatgccaagacccaggacataggacggacccctggtacccagaagaggagttcttgctcactaacccggatccgcctcgtgcccctgcctcctggagcttcccattccaggagaaaaggctccacttcccagcccttccttgcccctgacatttggactcttcccttgggccgaccactctgttctcattctccttcccaccaacatccatccgtccttctcagacaaaccactcactgggtaccccacctcctctctcatatgcccaacacgaccactgcctccctgcccccacacctgcacccaaacagacacatcaacgcaccccactcacagacaccccttaccccacccccactgtacagagaccaagaacagaaattgtttgtaaataatgaaccttattttttattattgccaatcccctaagatattgtattttacaaatctccctcttcccttcgcccctcccttgttttatattttatgaagttagtgcgggctttgctgctccctggcccaggaaagagggactacctgaccctcacctggcacccccctgctgctgcccaagccgctgggcctttttaattgccaaactgctctcttcatcagctcagcacatgctttaagaaagcaaaaccaatccccctttcgccagctggcgtaatagcaaaaaggcccgcaccgatcgcccttcccaacagttgcgcaacactgagggg

SEQ ID NO: 100256 - DNA, 597 bp, Homo sapiens
  misc_feature (547)..(547): n is a, c, g, or t
  misc_feature (561)..(561): n is a, c, g, or t
  misc_feature (574)..(574): n is a, c, g, or t
atatgcgtctccaagccccagccccaccctggcagagatattgatctcagcccaggagagccgtcgtaagaagaaggagtatgtggagtgtctagaaaagaaggtggagacatttacatctgagaacaatgaactgtggaagaaggtggagaccctggagaatgccaacaggaccctgctccagcagctgcagaaactccagactctggtcaccaacaagatctccagaccttacaagatggccgccacccagactgggacctgcctcatggtggcagccttgtgctttgttctggtgctgggctccctcgtgccctgccttcccgagttctcctccggctcccagactgtgaaggaagaccccctggccgcagacggcgtctacacggccagccagatgccctcccgaagcctcctattctacgatgacggggcaggcttatgggaagatggccgcagcaccctgctgcccatggagcccccagatggctgggaaatcaaccccggggggccggcagagcagcggccccgggaccacctggcaganatatatgatcgggntgccaagaacttncataccttgatgttgacctggat

SEQ ID NO: 100257 - DNA, 2375 bp, Homo sapiens
ggggcttcgccccggacctgccccccgcccgtttgccagcgctcaggcaggagctctggactgggcgcgccgccgccctggagtgagggaagcccagtggaagggggtcccgggagccggctgcgatggacgccgtcttggaacccttcccggccgacaggctgttccccggatccagcttcctggacttgggggatctgaacgagtcggacttcctcaacaatgcgcactttcctgagcacctggaccactttacggagaacatggaggacttctccaatgacctgttcagcagcttctttgatgaccctgtgctggatgagaagagccctctattggacatggaactggactcccctacgccaggcatccaggcggagcacagctactccctgagcggcgactcagcgccccagagcccccttgtgcccatcaagatggaggacaccacccaagatgcagagcatggagcatgggcgctgggacacaaactgtgctccatcatggtgaagcaggagcagagcccggagctgcccgtggaccctctggctgccccctcggccatggctgccgcggccgccatggccaccaccccgctgctgggcctcagccccttgtccaggctgcccatcccccaccaggccccgggagagatgactcagctgccagtgatcaaagcagagcctctggaggtgaaccagttcctcaaagtgacaccggaggacctggtgcagatgcctccgacgccccccagcagccatggcagtgacagcgacggctcccagagtccccgctctctgcccccctccagccctgtcaggcccatggcgcgctcctccacggccatctccacctccccactcctcactgcccctcacaaattacaggggacatcagggccactgctcctgacagaggaggagaagcggaccctgattgctgagggctaccccatccccacaaaactccccctcaccaaagccgaggagaaggccttgaagagagtccggaggaaaatcaagaacaagatctcagcccaggagagccgtcgtaagaagaaggagtatgtggagtgtctagaaaagaaggtggagacatttacatctgagaacaatgaactgtggaagaaggtggagaccctggagaatgccaacaggaccctgctccagcagctgcagaaactccagactctggtcaccaacaagatctccagaccttacaagatggccgccacccagactgggacctgcctcatggtggcagccttgtgctttgttctggtgctgggctccctcgtgccctgccttcccgagttctcctccggctcccagactgtgaaggaagaccccctggccgcagacggcgtctacacggccagccagatgccctcccgaagcctcctattctacgatgacggggcaggcttatgggaagatggccgcagcaccctgctgcccatggagcccccagatggctgggaaatcaaccccggggggccggcagagcagcggccccgggaccacctgcagcatgatcacctggacagcacccacgagaccaccaagtacctgagtgaggcctggcctaaagacggtggaaacggcaccagccccgacttctcccactccaaggagtggttccacgacaggccatgccaagacccaggacataggacggacccctggtacccagaagaggagttcttgctcactaacccggatccgcctcgtgcccctgcctcctggagcttcccattccaggagaaaaggctccacttcccagcccttccttgcccctgacatttggactcttcccttgggccgaccactctgttctcattctccttcccaccaacatccatccgtccttctcagacaaaccactcactgggtaccccacctcctctctcatatgcccaacacgaccactgcctccctgcccccacacctgcacccaaacagacacatcaacgcaccccactcacagacaccccttaccccacccccactgtacagagaccaagaacagaaattgtttgtaaataatgaaccttattttttattattgccaatcccctaagatattgtattttacaaatctccctcttcccttcgcccctcccttgttttatattttatgaagttagtgcgggctttgctgctccctggcccaggaaagagggactacctgaccctcacctggcacccccctgctgctgcccaagccgctgggcctttttaattgccaaactgctctcttcatcagctcagcacatgctttaagaaagcaaaaccaatccccctttcgccagctggcgtaatagcaaaaaggcccgcaccgatcgcccttcccaacagttgcgcaacactgagggg

SEQ ID NO: 100258 - DNA, 1983 bp, Homo sapiens
  misc_feature (1933)..(1933): n is a, c, g, or t
ggggcttcgccccggacctgccccccgcccgtttgccagcgctcaggcaggagctctggactgggcgcgccgccgccctggagtgagggaagcccagtggaagggggtcccgggagccggctgcgatggacgccgtcttggaacccttcccggccgacaggctgttccccggatccagcttcctggacttgggggatctgaacgagtcggacttcctcaacaatgcgcactttcctgagcacctggaccactttacggagaacatggaggacttctccaatgacctgttcagcagcttctttgatgaccctgtgctggatgagaagagccctctattggacatggaactggactcccctacgccaggcatccaggcggagcacagctactccctgagcggcgactcagcgccccagagcccccttgtgcccatcaagatggaggacaccacccaagatgcagagcatggagcatgggcgctgggacacaaactgtgctccatcatggtgaagcaggagcagagcccggagctgcccgtggaccctctggctgccccctcggccatggctgccgcggccgccatggccaccaccccgctgctgggcctcagccccttgtccaggctgcccatcccccaccaggccccgggagagatgactcagctgccagtgatcaaagcagagcctctggaggtgaaccagttcctcaaagtgacaccggaggacctggtgcagatgcctccgacgccccccagcagccatggcagtgacagcgacggctcccagagtccccgctctctgcccccctccagccctgtcaggcccatggcgcgctcctccacggccatctccacctccccactcctcactgcccctcacaaattacaggggacatcagggccactgctcctgacagaggaggagaagcggaccctgattgctgagggctaccccatccccacaaaactccccctcaccaaagccgaggagaaggccttgaagagagtccggaggaaaatcaagaacaagatctcagcccaggagagccgtcgtaagaagaaggagtatgtggagtgtctagaaaagaaggtggagacatttacatctgagaacaatgaactgtggaagaaggtggagaccctggagaatgccaacaggaccctgctccagcagctgcagaaactccagactctggtcaccaacaagatctccagaccttacaagatggccgccacccagactgggacctgcctcatggtggcagccttgtgctttgttctggtgctgggctccctcgtgccctgccttcccgagttctcctccggctcccagactgtgaaggaagaccccctggccgcagacggcgtctacacggccagccagatgccctcccgaagcctcctattctacgatgacggggcaggcttatgggaagatggccgcagcaccctgctgcccatggagcccccagatggctgggaaatcaaccccggggggccggcagagcagcggccccgggaccacctgcagcatgatcacctggacagcacccacgagaccaccaagtacctgagtgaggcctggcctaaagacggtggaaacggcaccagccccgacttctcccactccaaggagtggttccacgacagggatctgggccccaacaccaccatcaaactctcctaggccatgccaagacccaggacataggacggacccctggtacccagaagaggagttcttgctcactaacccggatccgcctcgtgcccctgcctcctggagcttcccattccaggagaaaaggctccacttcccagcccttccttgcccctgacatttggactcttcccttgggccgaccactctgttctcattctccttcccaccaacatccatccgtccttctcagacaaaccactcaaatgatcctnccacctggcctctcaagatatctcatgcagcaggtaacatcgactgggat

SEQ ID NO: 100259 - DNA, 1376 bp, Homo sapiens
ggggcttcgccccggacctgccccccgcccgtttgccagcgctcaggcaggagctctggactgggcgcgccgccgccctggagtgagggaagcccagtggaagggggtcccgggagccggctgcgatggacgccgtcttggaacccttcccggccgacaggctgttccccggatccagcttcctggacttgggggatctgaacgagtcggacttcctcaacaatgcgcactttcctgagcacctggaccactttacggagaacatggaggacttctccaatgacctgttcagcagcttctttgatgaccctgtgctggatgagaagagccctctattggacatggaactggactcccctacgccaggcatccaggcggagcacagctactccctgagcggcgactcagcgccccagagcccccttgtgcccatcaagatggaggacaccacccaagatgcagagcatggagcatgggcgctgggacacaaactgtgctccatcatggtgaagcaggagcagagcccggagctgcccgtggaccctctggctgccccctcggccatggctgccgcggccgccatggccaccaccccgctgctgggcctcagccccttgtccaggctgcccatcccccaccaggccccgggagagatgactcagctgccagtgatcaaagcagagcctctggaggtgaaccagttcctcaaagtgacaccggaggacctggtgcagatgcctccgacgccccccagcagccatggcagtgacagcgacggctcccagagtccccgctctctgcccccctccagccctgtcaggcccatggcgcgctcctccacggccatctccacctccccactcctcactgcccctcacaaattacaggggacatcagggccactgctcctgacagaggaggagaagcggaccctgattgctgagggctaccccatccccacaaaactccccctcaccaaagccgaggagaaggccttgaagagagtccggaggaaaatcaagaacaagatctcagcccaggagagccgtcgtaagaagaaggagtatgtggagtgtctagaaaagaaggtggagacatttacatctgagaacaatgaactgtggaagaaggtggagaccctggagaatgccaacagcttctccagcgggatccagccactcctctgttccctgattggcctggagaatcccacctgaccccccaccccacccctctgtctctggctggggttcctttctggcccaaagtaggtccaagcccttgtagttatttcgccacctgctgtacattgtgggaactgcaacccctacgtgcccgtttgggtggagagagattaaacatttgcccaccaagcc

SEQ ID NO: 100260 - DNA, 942 bp, Homo sapiens
ccaagcaacgggggggcttcgccgttggttctttcctgggcggccctttaaaactgcagcatgatcacctggacagcacccacgagaccaccaagtacctgagtgaggcctggcctaaagacggtggaaacggcaccagccccgacttctcccactccaaggagtggttccacgacagggatctgggccccaacaccaccatcaaactctcctaggccatgccaagacccaggacataggacggacccctggtacccagaagaggagttcttgctcactaacccggatccgcctcgtgcccctgcctcctggagcttcccattccaggagaaaaggctccacttcccagcccttccttgcccctgacatttggactcttcccttgggccgaccactctgttctcattctccttcccaccaacatccatccgtccttctcagacaaaccactcactgggtaccccacctcctctctcatatgcccaacacgaccactgcctccctgcccccacacctgcacccaaacagacacatcaacgcaccccactcacagacaccccttaccccacccccactgtacagagaccaagaacagaaattgtttgtaaataatgaaccttattttttattattgccaatcccctaagatattgtattttacaaatctccctcttcccttcgcccctcccttgttttatattttatgaagttagtgcgggctttgctgctccctggcccaggaaagagggactacctgaccctcacctggcacccccctgctgctgcccaagccgctgggcctttttaattgccaaactgctctcttcatcagctcagcacatgctttaagaaagcaaaaccaatccccctttcgccagctggcgtaatagcaaaaaggcccgcaccgatcgcccttcccaacagttgcgcaacactgagggg

SEQ ID NO: 100261 - DNA, 692 bp, Homo sapiens
tctagtgatccctgtcaatactacatcgcgtgccggatccgcctcgtgcccctgcctcctggagcttcccattccaggagaaaaggctccacttcccagcccttccttgcccctgacatttggactcttcccttgggccgaccactctgttctcattctccttcccaccaacatccatccgtccttctcagacaaaccactcactgggtaccccacctcctctctcatatgcccaacacgaccactgcctccctgcccccacacctgcacccaaacagacacatcaacgcaccccactcacagacaccccttaccccacccccactgtacagagaccaagaacagaaattgtttgtaaataatgaaccttattttttattattgccaatcccctaagatattgtattttacaaatctccctcttcccttcgcccctcccttgttttatattttatgaagttagtgcgggctttgctgctccctggcccaggaaagagggactacctgaccctcacctggcacccccctgctgctgcccaagccgctgggcctttttaattgccaaactgctctcttcatcagctcagcacatgctttaagaaagcaaaaccaatccccctttcgccagctggcgtaatagcaaaaaggcccgcaccgatcgcccttcccaacagttgcgcaacactgagggg

SEQ ID NO: 100262 - DNA, 629 bp, Homo sapiens
  misc_feature (20)..(20): n is a, c, g, or t
tagggctcggcgtggtagcngtacctacattcccagcccttccttgcccctgacatttggactcttcccttgggccgaccactctgttctcattctccttcccaccaacatccatccgtccttctcagacaaaccactcactgggtaccccacctcctctctcatatgcccaacacgaccactgcctccctgcccccacacctgcacccaaacagacacatcaacgcaccccactcacagacaccccttaccccacccccactgtacagagaccaagaacagaaattgtttgtaaataatgaaccttattttttattattgccaatcccctaagatattgtattttacaaatctccctcttcccttcgcccctcccttgttttatattttatgaagttagtgcgggctttgctgctccctggcccaggaaagagggactacctgaccctcacctggcacccccctgctgctgcccaagccgctgggcctttttaattgccaaactgctctcttcatcagctcagcacatgctttaagaaagcaaaaccaatccccctttcgccagctggcgtaatagcaaaaaggcccgcaccgatcgcccttcccaacagttgcgcaacactgagggg

SEQ ID NO: 100263 - DNA, 1031 bp, Homo sapiens
ggggcttcgccccggacctgccccccgcccgtttgccagcgctcaggcaggagctctggactgggcgcgccgccgccctggagtgagggaagcccagtggaagggggtcccgggagccggctgcgatggacgccgtcttggaacccttcccggccgacaggctgttccccggatccagcttcctggacttgggggatctgaacgagtcggacttcctcaacaatgcgcactttcctgagcacctggaccactttacggagaacatggaggacttctccaatgacctgttcagcagcttctttgatgaccctgtgctggatgagaagagccctctattggacatggaactggactcccctacgccaggcatccaggcggagcacagctactccctgagcggcgactcagcgccccagagcccccttgtgcccatcaagatggaggacaccacccaagatgcagagcatggagcatgggcgctgggacacaaactgtgctccatcatggtgaagcaggagcagagcccggagctgcccgtggaccctctggctgccccctcggcacagtggcatgcacgggaggtcgccattggtcaatacctacactctgatgttgggcctcatggtcgcgcattggtactcgagggctggccattccacacacagcgccagtgccccactggggaggagatgatgtcatgttgccaagttggatcaaacacaagtatggcgtctggtaggtgaaccagggtcgctacacaagatggatcgagccggagggaacctgggttgacatgatgcgctgcccgcacctggctcgccaccaggacgagacccagtggacaggatggagggatggggaaggacttcgctcagagtcctcccgatactctgcacacccacctacacatgtgcctgatacgggggctcggcaaggtgcgcttcctccgcatggaacatactcgcagctccggcaaattcttgccattggtcaccttcttaacattactgggggaccatcaagggcaatgg

SEQ ID NO: 100264 - DNA, 403 bp, Homo sapiens
ctcctatgatgtctatgccaagggcgagcttgtaaaggagctgggcgtctgtggtgtcagatgaggcagcacccaggaattggctacccagatgtcaactgtctttctgaccctgcagaggggcttctgatgtcatagctgagaccaagcgcctggcagtccgtgtcccacaatgtcagggctggtgcaagcccatgctcagctgaactcatgatgtccaagtggagctgatgtgcaacgttgctaactcggtttcccctgctctccccagaggacctggtgcagatgcctccgacgccccccagcagccatggcagtgacagcgacggctcccagagtccccgctctctgcccccctccagccctgtcaggcccatggcgcgctcctccacggccatctcca

SEQ ID NO: 100265 - DNA, 362 bp, Homo sapiens
aggtcacacacacagccaatcaagaggagtgtgaatctggtgcccaagctcattctgtaagctgctgaatgaagaggatgtcctcacctcttctggccccagacaactcctcctcacctcacaaccaccctctttcctgcctgccccctggtctaccctaacagctctcttcagttcagcctagggtagctcccagggggcaggcagggggctgagacctctgccctagagtcccctgagcctttccccttcccctagatgcagagcatggagcatgggcgctgggacacaaactgtgctccatcatggtgaagcaggagcagagcccggagctgcccgtggaccctctggctgccccctcg

SEQ ID NO: 100266 - DNA, 672 bp, Homo sapiens
gcatctggtcaggaattcaaatcctttcgccctgcctcatggtgagcaggagactattgcagagccaggactagaacttgacattcctgacctccaggggatgacccaggctgcctccaaggagcgctgtgtgaggggaagtgcccagatggtccagaatccccaggaaacatggagctaggccctgagccctgggatgggtgtggagtctcccaagccaagattgtagggaggggtctgagggagatgctgtttggggcaccctggacaagtaagctttgagggtgcagtctcagggatgggatccaggaagccctcccgaacaatgcactaagagcctaacacctgagctctcagcatggccctggcacctgacacatgttactgaatttcacccagatccactccctttccagatgaggaaactgaggcatagagcattgtgtgccttgcccaggtcatatagatagcacatggcagagcttgaatttgaacccagggctgcctggctcctaactaccacatcatacttcctacagaaattacaggggacatcagggccactgctcctgacagaggaggagaagcggaccctgattgctgagggctaccccatccccacaaaactccccctcaccaaagccgaggagaaggccttgaagagagtccgga

SEQ ID NO: 100267 - DNA, 2412 bp, Homo sapiens
ggggcttcgccccggacctgccccccgcccgtttgccagcgctcaggcaggagctctggactgggcgcgccgccgccctggagtgagggaagcccagtggaagggggtcccgggagccggctgcgatggacgccgtcttggaacccttcccggccgacaggctgttccccggatccagcttcctggacttgggggatctgaacgagtcggacttcctcaacaatgcgcactttcctgagcacctggaccactttacggagaacatggaggacttctccaatgacctgttcagcagcttctttgatgaccctgtgctggatgagaagagccctctattggacatggaactggactcccctacgccaggcatccaggcggagcacagctactccctgagcggcgactcagcgccccagagcccccttgtgcccatcaagatggaggacaccacccaagatgcagagcatggagcatgggcgctgggacacaaactgtgctccatcatggtgaagcaggagcagagcccggagctgcccgtggaccctctggctgccccctcggccatggctgccgcggccgccatggccaccaccccgctgctgggcctcagccccttgtccaggctgcccatcccccaccaggccccgggagagatgactcagctgccagtgatcaaagcagagcctctggaggtgaaccagttcctcaaagtgacaccggaggacctggtgcagatgcctccgacgccccccagcagccatggcagtgacagcgacggctcccagagtccccgctctctgcccccctccagccctgtcaggcccatggcgcgctcctccacggccatctccacctccccactcctcactgcccctcacaaattacaggggacatcagggccactgctcctgacagaggaggagaagcggaccctgattgctgagggctaccccatccccacaaaactccccctcaccaaagccgaggagaaggccttgaagagagtccggaggaaaatcaagaacaagatctcagcccaggagagccgtcgtaagaagaaggagtatgtggagtgtctagaaaagaaggtggagacatttacatctgagaacaatgaactgtggaagaaggtggagaccctggagaatgccaacaggaccctgctccagcagctgcagaaactccagactctggtcaccaacaagatctccagaccttacaagatggccgccacccagactgggacctgcctcatggtggcagccttgtgctttgttctggtgctgggctccctcgtgccctgccttcccgagttctcctccggctcccagactgtgaaggaagaccccctggccgcagacggcgtctacacggccagccagatgccctcccgaagcctcctattctacgatgacggggcaggcttatgggaagatggccgcagcaccctgctgcccatggagcccccagatggctgggaaatcaaccccggggggccggcagagcagcggccccgggaccacctgcagcatgatcacctggacagcacccacgagaccaccaagtacctgagtgaggcctggcctaaagacggtggaaacggcaccagccccgacttctcccactccaaggagtggttccacgacagggatctgggccccaacaccaccatcaaactctcctaggccatgccaagacccaggacataggacggacccctggtacccagaagaggagttcttgctcactaacccggatccgcctcgtgcccctgcctcctggagcttcccattccaggagaaaaggctccacttcccagcccttccttgcccctgacatttggactcttcccttgggccgaccactctgttctcattctccttcccaccaacatccatccgtccttctcagacaaaccactcactgggtaccccacctcctctctcatatgcccaacacgaccactgcctccctgcccccacacctgcacccaaacagacacatcaacgcaccccactcacagacaccccttaccccacccccactgtacagagaccaagaacagaaattgtttgtaaataatgaaccttattttttattattgccaatcccctaagatattgtattttacaaatctccctcttcccttcgcccctcccttgttttatattttatgaagttagtgcgggctttgctgctccctggcccaggaaagagggactacctgaccctcacctggcacccccctgctgctgcccaagccgctgggcctttttaattgccaaactgctctcttcatcagctcagcacatgctttaagaaagcaaaaccaatccccctttcgccagctggcgtaatagcaaaaaggcccgcaccgatcgcccttcccaacagttgcgcaacactgagggg

SEQ ID NO: 100268 - DNA, 2393 bp, Homo sapiens
ggcgcgctgaggctgcttctggtcagggaaaccattctcctacaccgaccccagcaggcagctgcgcccccagagctttaccctgtctctgcactgaccttggggaaggaatttagggaggggtaaaacaaggctagagctggtaccattactgccccgggagagtcccctctgccgccaccagagacagccaccaaagcgccccacgcactttcctgagcacctggaccactttacggagaacatggaggacttctccaatgacctgttcagcagcttctttgatgaccctgtgctggatgagaagagccctctattggacatggaactggactcccctacgccaggcatccaggcggagcacagctactccctgagcggcgactcagcgccccagagcccccttgtgcccatcaagatggaggacaccacccaagatgcagagcatggagcatgggcgctgggacacaaactgtgctccatcatggtgaagcaggagcagagcccggagctgcccgtggaccctctggctgccccctcggccatggctgccgcggccgccatggccaccaccccgctgctgggcctcagccccttgtccaggctgcccatcccccaccaggccccgggagagatgactcagctgccagtgatcaaagcagagcctctggaggtgaaccagttcctcaaagtgacaccggaggacctggtgcagatgcctccgacgccccccagcagccatggcagtgacagcgacggctcccagagtccccgctctctgcccccctccagccctgtcaggcccatggcgcgctcctccacggccatctccacctccccactcctcactgcccctcacaaattacaggggacatcagggccactgctcctgacagaggaggagaagcggaccctgattgctgagggctaccccatccccacaaaactccccctcaccaaagccgaggagaaggccttgaagagagtccggaggaaaatcaagaacaagatctcagcccaggagagccgtcgtaagaagaaggagtatgtggagtgtctagaaaagaaggtggagacatttacatctgagaacaatgaactgtggaagaaggtggagaccctggagaatgccaacaggaccctgctccagcagctgcagaaactccagactctggtcaccaacaagatctccagaccttacaagatggccgccacccagactgggacctgcctcatggtggcagccttgtgctttgttctggtgctgggctccctcgtgccctgccttcccgagttctcctccggctcccagactgtgaaggaagaccccctggccgcagacggcgtctacacggccagccagatgccctcccgaagcctcctattctacgatgacggggcaggcttatgggaagatggccgcagcaccctgctgcccatggagcccccagatggctgggaaatcaaccccggggggccggcagagcagcggccccgggaccacctgcagcatgatcacctggacagcacccacgagaccaccaagtacctgagtgaggcctggcctaaagacggtggaaacggcaccagccccgacttctcccactccaaggagtggttccacgacagggatctgggccccaacaccaccatcaaactctcctaggccatgccaagacccaggacataggacggacccctggtacccagaagaggagttcttgctcactaacccggatccgcctcgtgcccctgcctcctggagcttcccattccaggagaaaaggctccacttcccagcccttccttgcccctgacatttggactcttcccttgggccgaccactctgttctcattctccttcccaccaacatccatccgtccttctcagacaaaccactcactgggtaccccacctcctctctcatatgcccaacacgaccactgcctccctgcccccacacctgcacccaaacagacacatcaacgcaccccactcacagacaccccttaccccacccccactgtacagagaccaagaacagaaattgtttgtaaataatgaaccttattttttattattgccaatcccctaagatattgtattttacaaatctccctcttcccttcgcccctcccttgttttatattttatgaagttagtgcgggctttgctgctccctggcccaggaaagagggactacctgaccctcacctggcacccccctgctgctgcccaagccgctgggcctttttaattgccaaactgctctcttcatcagctcagcacatgctttaagaaagcaaaaccaatccccctttcgccagctggcgtaatagcaaaaaggcccgcaccgatcgcccttcccaacagttgcgcaacactgagggg

SEQ ID NO: 100269 - DNA, 2136 bp, Homo sapiens
ggacagcacagaggaggcaacagaggtagggacaccattagtccatgctggggggcaggcctcaggcacaggagggattccaggttctgcggggctggaacctacctcttccccacccctccctgtgctgtccagctgtccacctcctctgggacagcacagaggaggacaccacccaagatgcagagcatggagcatgggcgctgggacacaaactgtgctccatcatggtgaagcaggagcagagcccggagctgcccgtggaccctctggctgccccctcggccatggctgccgcggccgccatggccaccaccccgctgctgggcctcagccccttgtccaggctgcccatcccccaccaggccccgggagagatgactcagctgccagtgatcaaagcagagcctctggaggtgaaccagttcctcaaagtgacaccggaggacctggtgcagatgcctccgacgccccccagcagccatggcagtgacagcgacggctcccagagtccccgctctctgcccccctccagccctgtcaggcccatggcgcgctcctccacggccatctccacctccccactcctcactgcccctcacaaattacaggggacatcagggccactgctcctgacagaggaggagaagcggaccctgattgctgagggctaccccatccccacaaaactccccctcaccaaagccgaggagaaggccttgaagagagtccggaggaaaatcaagaacaagatctcagcccaggagagccgtcgtaagaagaaggagtatgtggagtgtctagaaaagaaggtggagacatttacatctgagaacaatgaactgtggaagaaggtggagaccctggagaatgccaacaggaccctgctccagcagctgcagaaactccagactctggtcaccaacaagatctccagaccttacaagatggccgccacccagactgggacctgcctcatggtggcagccttgtgctttgttctggtgctgggctccctcgtgccctgccttcccgagttctcctccggctcccagactgtgaaggaagaccccctggccgcagacggcgtctacacggccagccagatgccctcccgaagcctcctattctacgatgacggggcaggcttatgggaagatggccgcagcaccctgctgcccatggagcccccagatggctgggaaatcaaccccggggggccggcagagcagcggccccgggaccacctgcagcatgatcacctggacagcacccacgagaccaccaagtacctgagtgaggcctggcctaaagacggtggaaacggcaccagccccgacttctcccactccaaggagtggttccacgacagggatctgggccccaacaccaccatcaaactctcctaggccatgccaagacccaggacataggacggacccctggtacccagaagaggagttcttgctcactaacccggatccgcctcgtgcccctgcctcctggagcttcccattccaggagaaaaggctccacttcccagcccttccttgcccctgacatttggactcttcccttgggccgaccactctgttctcattctccttcccaccaacatccatccgtccttctcagacaaaccactcactgggtaccccacctcctctctcatatgcccaacacgaccactgcctccctgcccccacacctgcacccaaacagacacatcaacgcaccccactcacagacaccccttaccccacccccactgtacagagaccaagaacagaaattgtttgtaaataatgaaccttattttttattattgccaatcccctaagatattgtattttacaaatctccctcttcccttcgcccctcccttgttttatattttatgaagttagtgcgggctttgctgctccctggcccaggaaagagggactacctgaccctcacctggcacccccctgctgctgcccaagccgctgggcctttttaattgccaaactgctctcttcatcagctcagcacatgctttaagaaagcaaaaccaatccccctttcgccagctggcgtaatagcaaaaaggcccgcaccgatcgcccttcccaacagttgcgcaacactgagggg

SEQ ID NO: 100270 - DNA, 1670 bp, Homo sapiens
gtaaatacctattcacccactgtatgccagccactgtgcttatatgcaggggatgcaaaggtgcatgagacctgccctctacctttaagaacagtataatggagaaggggagacaaaccttgtgacagattccttatgtactgtgataatacacagtggcagcagctaaaatgtctaggtttgcttagctttgtattcagtaataataagttgatctaagagttcagcataaactgaatgaaatgccatttaatggtagaggaaccaagcattaaggcagtactacacttaattttttaagcaaatatgtaaagtatattttcaaacttttctaatgttatggccccaaatttcttagttttggcctttttactacctatactatttttactgttttgttttgtctccatgtggtagtacttctgtgaactctaaagggaaaaaaaattctgcaagcagcattagtatataactactactgtaagtaaaactgcctattgacactttaggagttcctgcttcagaagcttagttaagaaacagcttgtggccgggtgtggtggctcatgcctgtaatcccagcactttgggaggctgaggcgggcggatcacgaggtcaggagatcgagaccatcctggctaacgcggtgaagtcccgtctactaaaaatacaaaaaattagccaggcgtggtggcgggcgcctgtagtcccagctactagggaggctgaggcaggagaatggcttgaacccgggaggcggagcttgcagtgagccgagatagcgctgctacactccagcctgggcgacagagactccgtctcaaaaaaaaaaaaaaaaattgactttcaacaaattgatagtgagcattaagggtttccaagttggatttgtaactcctcatcattccttgtatgacaactttctgaatatatgtcactatgtagtaaaattaaacactccaaactcatctttctgttgttagaagttttcagcggtacttccatgcaactttaaatctcactgctctctatggttgatgtcaaatgaccttcagtaatgactgagaattgaatacaaatagattacaaagccaaaatttgatgttaaatgactcaggaaattttagttgtattttcaattcaagtacttagtagcctacgtttgcttggcctctggttctttatggaaaataggctttgtagtggcattgtggagcaaaggagactgttacaccttaattaactttttttactgatgcaaataatttgaggatagagaggagggaagtagtgaaagctatgacctaaaacattgggaccaaatagaggctcacagatatttggattattttatgtgcttattattaaataaggaaagcattttgtgatatgtggaagacgctatgtgaagttttacctatcttctcaaagaccttttcttttgtattttcttttggtgtttcttaaagccaaacaaagaaatgttcttaaggagacagggtgggtttttctgtgggcctttgttggtttttctgtgggccatcgccctctaatggaattgatctctggctgtttgatttttttcatattgtatttttaaaatttgttgtacagtgccctgtgagcaccaagtaccactagatgaataaaacgtattatatctaaaatc

SEQ ID NO: 100271 - DNA, 723 bp, Homo sapiens
caccctccaatttccccagaacaagtcgtgaatctaccacaagaataaaagaaattctaggttctccctctgttgcccaggctagagtgcagtggcacaatctcagctcactgcaaccttcacctcccaggctcaagcaatcctcccacctcagtctcccaagtagctggactatgggtatgtgccaatgtgtccggaattggtgggttcttggtctcactgacttcaagaatgaagccgcagaccctcgcggttgcttggttgtcatatctgcctgttgctgtaagcaggacccaaatgaacaatgggcctgttcacactggagccttttccagaatgataccatctgcttgtgtgattcatccatctggagggatatgaagcgcaaaagccatagctgtttctcagccacagcctggctacaggaagaaaccaaacaagtctggaagctaccctcaaggcagaagaactagtagagttgagatctcatggggaaaacataggggataaagtcatggaagaagttataaaagctgtttctcatattatttctcttcactaaaataaaacagtaaagaagacactggataatgagaattactaaatgcagttcactatcttaaattaataatgacagttattgtgcaattatttttccatttgacatctaagttttgctaaaaaacatttcaaacttttttcttcctcaaagtttgtacaaga

SEQ ID NO: 100272 - DNA, 585 bp, Homo sapiens
acaggtaccttccaccagcaagactaatttttgtatttttgtggagacggggtttcaccatgttggccaggctggtctcgaactcctgacctcaagtgacccacccgccttggcctcccaaagtgctgggattacaggcatgagccaccatgcctggcctccattaaatctcatctacactttaagtgtatgggataccaagatgtgaaagacatggactgtaccttgaagaggcttgtagtctgttacacagggaactcagcagagtctgattgtgggcggttccctgacacatgaagtaaagaactatgagaccaggacagaatggtgaagctcatgctgcttgcctagttaagagtcaagccatcattcccctcatatactaagtgacttgtttttaattcatagtactttttgtttcactttataatattgtggtctttcccagttgctggtctggtgaagtgggctctgggcacctggctgtctggcttacccctcttcatacactccatgtctagcacatgtttcaggcacgtttcaggtgaggtttcttggaggggacatctgagctggacctggaaa

SEQ ID NO: 100273 - DNA, 890 bp, Homo sapiens
ggttttgtagagggtccaaaactctttagaacctataattcaaggaaaggctccactttggttttgcattttgtctggtctctttcggtgacagaatttatatcacaaggtgcacatattttggggaggctatggacagcccattgcacttgtgctttggtaggaagtacgtgccgttaaggggaaggagttagttactgattctagggaacaattgggtagaaagagatggactccctgtatttgaaattcagaactcaagcttggctctaagtgtttccttgctttgctgtgctccaagcgagtcactgagcagaaggaagcgagttgcctgagattcctcaaagcccgcagcccttttggaggttacattgttattctcagagcctttatgatccataataaagacctagcttggaccaatattaggatgagttatcttgctatgaacattttttaggtagaagttgctggtcccatcttgctcacaatcctccaaagtttggaagttactttccaggagacttagcttgcactgagagctgccctcccaccctctctccaaatttcctcttgggagtagcctaacaaggtgctgtcacagacccttgccagccacgatgaccccacccagaccatccctctgctgtttcactctttgatactctctggagctctctggggaggggtgagacctgctgtctgctttgtactgtttgcccaggtcttacagtcatggctggctcctctctctgagaactgggactcctgaacttggtgaaatacctcagccatcgatcatgttaaattatcggggacactcattaacacatgtgagtctggtccagatggactctctctctttctgccctgaccgtgagggagaccgt

SEQ ID NO: 100274 - DNA, 783 bp, Homo sapiens
ccctcctctctccatcagcgccacccgtgtggggcccaaaaggagggagctttacctctgtcccccagcctttggagtgtcaccaaacaagccattcgttcaccaaatacttattaagtgcctgacaacggaaatgtaacggcagaatcaacggtttctgggtctgagatgttgcatacaccctctcagtccctgtagcctgagatggagtcacgtgagaatccacagcaagtcctaaccagggatgggtctgggtgattaaggaaggttggcttcagaactgggccaggggcactgctttgcttttgctgttttgatcagctctctgcctgcaggagacaaggaaaatcaatgggaacagaaattgcctgtctgctccactctggttgaagaaaccagtctgactgtctctgaggctatggagcagtccatcaagaatgaaagccctctgccaggcacgttggctcacacctgtaataccagcactttgggaggccgaggcaggtggatcacttgaggtcaggagttcgacaccagcatggccaacatggtgaaaccctgtctttacagaaaataatactttgcaaggcctcagaaactctgctatccacaggcaggtcttacagtcatggctggctcctctctctgagaactgggactcctgaacttggtgaaatacctcagccatcgatcatgttaaattatcggggacactcattaacacatgtgagtctggtccagatggactctctctctttctgccctgaccgtgagggagaccgt

SEQ ID NO: 100275 - DNA, 259 bp, Homo sapiens
gccatggtccagtgcatgcagccttggcttctcttccctggacctgggaagcctgcagatgctggaagcagcccagctgtggcccctccactgttcttgccccttatgtgtgggtgtggaaagaactctcattcagagacatggtgattttgggatggagacgttgcttcctccaaccagactgcttccttcagtttccactgcctgggctcatgcatcagtaagttctcctactagaaagtttatttgcaaaaagcca

SEQ ID NO: 100276 - DNA, 163 bp, Homo sapiens
ggtgactctagcaggatccacacactgggttcgagttctgaccggattctcatgtgtggcatcaacgaggagagtcacttccagcagtggagccctcccacttctgccagtccaactgccttttaaagggaacaagcctttccccctcggttagccccttctg

SEQ ID NO: 100277 - DNA, 940 bp, Homo sapiens
atgtgttttcagaggcaaggtcacaaaagggaatgcagcttctatctggttctcttgggatggttgttcttgaaacccagccaccatgctgtgaggaagtccagacaacctatggagaggcccctttcaattttactgaaagttctctctcaaaccagaaaaagaaatgaagataaaacagataccaatgtaacttttacctgacaaaacaaccctccaaagaatcagcacaatttaaaagtttagaataattctttttgtggaagctcttataggttgaggttgtgctcaaaataaaagaaacagcctgaagattaacatagaagaatgttttgaaggaagagagaaaaagaaggagaaataagaagaggaggaagagacggaaggaaaagggggaaacaggaagaggagaacaaagaggcaagaggaaaaacaagaactattactactactactgtgtggtcagttacatctgtactacctttagatttttttttccttttggagtagattaatgcataatccttgctgcactgactcatttaggttatacctgtttttcactctggcttccccaaggtccacctgcatgttcataccaatcattatctagacatgcatgcatttctagacaggctggaaatctccttttggatgtttcaggggcatctcaagcataatatgtccaacagaatattgatcttgccacagaacatgttctatgcatcttaccaattgcactttgtggtatgaacatcccatccacgtactcacatgggaaactcagggccatgctggggtgcttctcttccctacccctggctctgtttcaactggcctaacatcaagtcctattagctctggctccaaaatgtaattcctattactccattcctctccaataactccactgaaaaaacctccttctaaactaccatct

SEQ ID NO: 100278 - DNA, 298 bp, Homo sapiens
cgtttctcctctgctttcaaacacggttatttcttttgattcacatttcactcttgctcaggaggcagcaggagggacaatggaaaatcagttcataatcatctacaaagaaatccgttcccgatgtctctttatgccgaggctgatctcgggatttgcacgctcgtttctggcacaaatcctctgactgtcaactcaaatccagtcagtgggattcagacctttgtgcagctgtttacaaaaggctcagaaccatgaaatccactgaggggcgggtaacgtggattttgcaaaaccg

SEQ ID NO: 100279 - DNA, 409 bp, Homo sapiens
agaggcggccctggaaatttgtggaattttaaagtgggcattgcgctgtgcataaatttagagtaagagtttgctgcaatcttccctaatcttaaaagggacagcagttgcaaaataatatttcacttacacataaaatatacactgctactggatatctaggtacctatggtctgggactgggtaatgcaggtatttcttcctccatttaacagatttccccaacatccatccatctactcagtcattcaacataatggtgatatatacaaggcattctttggagtattgaggattgagggactaaacaaagttgctggcctcctggagcttatgacctattgaaacagaaagacaatttataaataaataaagacaaaataatctaattttggttacttataattgc

SEQ ID NO: 100280 - DNA, 1144 bp, Homo sapiens
ccccagggtaaaggtggaggactgaggagccttgttacagcctggtgagggtggaagtataggcgtttgttggcggggataggaccatagctttcttctgtggtctttgaagtaggattgtggttttctaaacattttctgtcttgctaggctgctcccttcccagtcctttggctaaaaaaagcagatttttcttggggctttttttttttttttggtctgtgcctgttgggtttccgggttgccagcttctctagaacccgatctgggatagatgaggcaataagaaagcccaagaaagtcactgctgtgttcttcctcaggttctgaggtccctggccagtccattctctctccaccttttagaactttcttatgtttgctttgtatataatatcccggatttttagttgtagttagtgagagcgataggagaaagtagtgctccacctttcccgtgacatcctggtgcttgacactgaaatcacacatcaagttgtggtatatatagggtttgtggtatataacctaagggtttgtggtatatacaggtcatttgtcctgaagataagctgccaatttgataggtagaaactatcagcctgcttcatctagctttgaaggaacaatagtttataaattgaggaaacaccagtatttaattgtaggttataaactggagaagaatagctatgactaagaatataaactatagggttacatttttttatttgtatttttgtttgaaaaacatatgagaagcactggagaactggactcagaattttggatttttttacaattatatattatgtacatgtggctatctgttcactttaatttgccatatgacatatgatatcatagagaatcaacaaaataaagaatgaaaataactgagatttgggacaagtcaccttcatcctttgaaatctgtttcctcatagatatatgttttaaaatttaatgcctacttgagaatgattgcaagagttaggtcgaaaatggatgcaaatgtggtttgtaagctatcaggtgctacgtaactattaggtattattcatatagtcatttagaagacatatccatcatgtatgcttcacagtggtgtagcccaataaaaacaactgtgaatataaaagaa

SEQ ID NO: 100281 - DNA, 389 bp, Homo sapiens
gttgagaagcttgtgactctacgcggctcagagaggagtttgctagggttcttgtctgtgaatatctccgtgctgaccatgctggaattggatgattctgcaattcgcgacctactgcaggggtccgtttagtaacgtctggtctgtgatctttgttctagacctctagaccccaagatgtgaacagtgcacgtgattaatgtgatctatgcgcatgtgttataggccccaggtaggtgtatattatcgcaagtatgtctagacactggtcaagatgatgagaatgaatgacgatcgagaacagtagagaattggcttctttcactaagtgaaaacttaaagttttcttcacatctcttcatgaattgatagcacatttctttttagta

SEQ ID NO: 100282 - DNA, 579 bp, Homo sapiens
tatggggtagggagaaaaatgtgatgggggataagcacacacggggctccaaagctacggtaatgctctatttcttcatgtggaaatgggtatgtgcagaaaaaagtgaacacaagccggtctgagcctgctaccctcagaaggcttacttgcaaggtcagcctttggctggtgtctagaagttgaatttcaggaaagttctcaccacccctagaaccaataaagagtggctcattgtgcttaaactgtttgtacaatgtggtttatgcttaatgcccgccttccttctgggagtctgaaatttgaaacctgttaaaacagggtacctacagaaccagcctctagtaaaaatcctgggcaccaggtctctaataaatttccctggtagacaatatttcacacatattgccacacatattcattgatggaggaatcaaggatgtcctgtgactccagtgggagaagattcccggaagcttgtgcctggtttcttctggacttcaccccatgtgtcttttccctttgctgattttgctttgcatcctttcactttaatatattatagctatgaatatggct

SEQ ID NO: 100283 - DNA, 921 bp, Homo sapiens
aagacctgtctcaaaaaaaaaaaaaaaaaaaagattggactagatgacctttaaggtcccttttaactataataagttatgatttttctcactcatgagaaatgtttatctccgtagtaaataagtaaataaaaattagttcatatgttccagtgttctctggaaagtagacgtctttattacagcatactctctttaccacaggatttgcaataattttgtaggttgtcttaaaagctctgggtcttggagggtagctcatgtctataggtgcagcagggccaggagggatagcttaaccagtattatacttgagaataaatttagcatgataataatgaatgagaaaagaaggatgctgaaaactatattgtgatcccatttttgtaaaacaagcaatgtgaagaaacttccaaccctgatatgtgggtgtgtgtgtgtgtaaaatctgtgtaagattatgtgggtaaagagaagaatatggaagaaaccacactagatggtttttgtagatttcctgagtcagtagcagggcaggaggaagtttagataccgagttgggaagaagtagagtgcagaaaagagatattcttaagtaaaaccacacatatgagatctcatttgtgtaaaatgatatttttgtgtattcataaaaaaattaatggaaataccacctgcaggccttttccaggtgaacaaaataaaaaatcctactcatttcagtcctttttttttttagagaaggatgtgggggatttgtccctatgtctctgatgttagaaacaggatttggggggcgctgggcgcagtggctcacgcctgtaatcccaacactttgggaagccgaggcggatcacctgaggtcaggagtttgagaccagtctggccaacatggcgaaaccccatctctactaaaaaaaa

SEQ ID NO: 100284 - DNA, 567 bp, Homo sapiens
attaatgattggacctattaccgtacaccgtatcttttacataaggaaatgtctttgaacacctagagtaaaaagtattcaagaagagaaatgatagatagtgcctgttttcagacaaggcagaaattgggtgttgctgtcatagttacacaagcaatctaatcatgatccaagagggaggtggcaggtagtatatggagattagatgtcaaagggctcagctttcacactaccttgtacaaacttcacaaggtcaggtcccagccacctggcaaaggcccaacatcctgagacattgtagaagaagcatgaaatggcctctttcgttttgtctcttcctttacccctgtcagagtccgaggtgactgatttgagtgattgcagtttagaaggggtttggagaacttgaagatgcttcccaaaaggacaagagtatagaagtggggtcgggcacagtggctcacgcctgtaatcccagcactttgggaggccaaggtgggcagatcatttgaggtcaggagtttgaaaccagcctgaccaacatggtgaaaccccatctctactaaa

SEQ ID NO: 100285 - DNA, 3128 bp, Homo sapiens
  misc_feature (98)..(98): n is a, c, g, or t
  misc_feature (146)..(146): n is a, c, g, or t
  misc_feature (284)..(284): n is a, c, g, or t
  misc_feature (399)..(399): n is a, c, g, or t
  misc_feature (649)..(649): n is a, c, g, or t
  misc_feature (700)..(700): n is a, c, g, or t
  misc_feature (940)..(940): n is a, c, g, or t
  misc_feature (1255)..(1255): n is a, c, g, or t
  misc_feature (1533)..(1533): n is a, c, g, or t
  misc_feature (1538)..(1538): n is a, c, g, or t
  misc_feature (1557)..(1558): n is a, c, g, or t
  misc_feature (1690)..(1690): n is a, c, g, or t
  misc_feature (1721)..(1721): n is a, c, g, or t
  misc_feature (1738)..(1738): n is a, c, g, or t
  misc_feature (1748)..(1748): n is a, c, g, or t
  misc_feature (1798)..(1798): n is a, c, g, or t
  misc_feature (1869)..(1869): n is a, c, g, or t
  misc_feature (1922)..(1922): n is a, c, g, or t
  misc_feature (2279)..(2279): n is a, c, g, or t
  misc_feature (2433)..(2433): n is a, c, g, or t
  misc_feature (2445)..(2445): n is a, c, g, or t
  misc_feature (2484)..(2484): n is a, c, g, or t
  misc_feature (2494)..(2494): n is a, c, g, or t
  misc_feature (2496)..(2496): n is a, c, g, or t
agatggagtttcactcttgttgcccaggctggagtgccatggcacaatctcagctcaccgcaatctccatctcttgagttcaagcgattctcctgccncagcctcctgagtagctgggattataggcatgcaccaccacacccggntaattttgtatttttagtagagatggggtttctccatgttggtcaggttggtctcgaactcctgatctcaggtgatccatctgcctcggcctcccaaagtgctgggattacaggcatgagtcactgcgcctggcctgntctcttctctttactccaaacagcatgtctctctcttgctctgttctgagccacctggagctggggctggggtgacacaagcaccctggtggccaccatcactgagattatgccnggtcagacctgaagtgagcacagcagtgggtcttacccaaggcctgctgtaaccactacctggctaccacctgtgtttgctcaaggcgctgaggctctacaaccagtgggtggcaataccagccaggcttgtttccttcccttcagggtggcaggttcccccaggccctgtgtgggtcaagaggtgctatgcaggagccagtgactggagtaaaaaaactcagaagtctacctggtgttctaattgtacngtggctgagctggcactcaaatcatgagatgcagtcctttccactcttccntcccctttccacaggcagagaagcctcaccccatggccaccaccaccaaaggcccatggggagtactgccaggctactgtcaatgttctcttagagaccaaaggctcttgagtcagcttgtggtgaagctgcctggcctgggattcacccttcagtgcagtgggctcccctctggctcagggaaggtccagaaatgccatccaagatccaaggcctggaatcagggatcccaacaacccncttggtgcctaccccactgtggacaagctggtaccgaacatgcaaaagtctcttttgcttttccctcaacttttttcaagcagaaggagtctctccctatagccaccacagctgagaatgttctgagtttcactcaaggcctatggtgtactatcagggtattgctgctggttattcagggcccaaggactcttcagtcagcaggtgatgggtccttccagaactgagtcctttccttcaaggcagtgggtttccttctggcccaggatgtgtttagaaatgtcatccaggagctagggcctgcaaaggggaccnaatgactatgactggtggcctatcctactgtggctgagctggtatacaaagtgcaagataaagttctctttactcttccctctcctcacctcaagcagaaggaaggggtctcttttggagccgtgagctgtgctgcctgggattgggagaggggtggcacaagcactcccttagctgccctaactgttgtcttactaggttacatgcccaccaagtccactggctctgagcccagctcagtactaggaattgcctcagagttgcagtccttgtggccnagacngcccttcaagtttacttannattccagagcattttagcccacagtcgtgaggctcactggaactcaagttccagccactgggatgggtaattcccccctgactagagctgactatttatttatttatttacttattttgagatggagtttcnctcttgttgcccaggctggagtgcaatggcncaatctcggctcaccgngacctccacntcttgggttcaagctattctcctgcctcagcctcccaggtagcttggatnacaggcatacaccaccacacccagctaattttgtatttttagtagagacgaggtttctccttgttcgtccngctggtctcgaactcctgacctcaggttatccgcctgccttggcctcccaaantgctgggattacaggtgtgagccaccgcacccggccaaaactcaagttttttaagagagtgggcaggaagatccagctcaccttactagccactagagctgatttaaatgctccctctgtgggtgggcatcagctgaattcagcctggttttgctttctacttgttggtagaagagctgaggcaggactggcttatctgtcataatataaaagagtcttggaagatgtctggggtccagggtctaaaacccctcgtggcctttggaacaccaaactctgtgccaaggggtggaaggctgccctgccgcaccacaaatctaagcccagggcataaaacccctcatggcttggatggantccagggcttagggcataaaacccctcgtagcctctggaatgtgcacagacttgttggttgctctcccaggttcgtaaacatgttctctattatctccaagcagcagagcatattatatatgcatcaaagaaaatgctaaaccatcacagatangcttgatgcacnactacctttctaacctcacaccctcacctgtttaccccnacgtcctcangncctgcttctttgtttgatcaccaataaataatgtgggctcccagagctcagggccttcgcagcatccataccagcgttggccccctggacccagcatatgcactcttaacttgtcttttctcattcctttgactacgctggagtttgtagcccccacggcctggtgttgggtctgatcaccccaacatttctggcacccaacatggggctacgaacactccggtgaaggaacactagagtgtgcggaagcggaggacacattgtcagaggacacccaaggacgactgaaagaagcttggtggaattcatataaagttgcgagtttcaggttggttggctctgactgatcacctgtattatggaccatctgtgtgattatggagaaaagttcaggacaccagcaacctacattggataggaccacctctgactccagggattgccactcaatctttctgagattagcacccacatccaacaaggtgtgatcctggtgatctttgaaaaaaaggcactgaaacaaccatgatttaagtttttggtattatgaatgcatgagaaattttctgggaaaaaatcataactatattaagaataaaaaataaaaaattcctaaggaaaatacttgatct

SEQ ID NO: 100286 - DNA, 3663 bp, Homo sapiens
  misc_feature (98)..(98): n is a, c, g, or t
  misc_feature (146)..(146): n is a, c, g, or t
  misc_feature (284)..(284): n is a, c, g, or t
  misc_feature (399)..(399): n is a, c, g, or t
  misc_feature (649)..(649): n is a, c, g, or t
  misc_feature (700)..(700): n is a, c, g, or t
  misc_feature (940)..(940): n is a, c, g, or t
  misc_feature (1255)..(1255): n is a, c, g, or t
  misc_feature (1533)..(1533): n is a, c, g, or t
  misc_feature (1538)..(1538): n is a, c, g, or t
  misc_feature (1557)..(1558): n is a, c, g, or t
  misc_feature (1690)..(1690): n is a, c, g, or t
  misc_feature (1721)..(1721): n is a, c, g, or t
  misc_feature (1738)..(1738): n is a, c, g, or t
  misc_feature (1748)..(1748): n is a, c, g, or t
  misc_feature (1798)..(1798): n is a, c, g, or t
  misc_feature (1869)..(1869): n is a, c, g, or t
  misc_feature (1922)..(1922): n is a, c, g, or t
  misc_feature (2279)..(2279): n is a, c, g, or t
  misc_feature (2433)..(2433): n is a, c, g, or t
  misc_feature (2445)..(2445): n is a, c, g, or t
  misc_feature (2484)..(2484): n is a, c, g, or t
  misc_feature (2494)..(2494): n is a, c, g, or t
  misc_feature (2496)..(2496): n is a, c, g, or t
  misc_feature (2826)..(2826): n is a, c, g, or t
  misc_feature (2976)..(2976): n is a, c, g, or t
  misc_feature (3001)..(3001): n is a, c, g, or t
  misc_feature (3193)..(3193): n is a, c, g, or t
  misc_feature (3384)..(3384): n is a, c, g, or t
  misc_feature (3649)..(3649): n is a, c, g, or t
agatggagtttcactcttgttgcccaggctggagtgccatggcacaatctcagctcaccgcaatctccatctcttgagttcaagcgattctcctgccncagcctcctgagtagctgggattataggcatgcaccaccacacccggntaattttgtatttttagtagagatggggtttctccatgttggtcaggttggtctcgaactcctgatctcaggtgatccatctgcctcggcctcccaaagtgctgggattacaggcatgagtcactgcgcctggcctgntctcttctctttactccaaacagcatgtctctctcttgctctgttctgagccacctggagctggggctggggtgacacaagcaccctggtggccaccatcactgagattatgccnggtcagacctgaagtgagcacagcagtgggtcttacccaaggcctgctgtaaccactacctggctaccacctgtgtttgctcaaggcgctgaggctctacaaccagtgggtggcaataccagccaggcttgtttccttcccttcagggtggcaggttcccccaggccctgtgtgggtcaagaggtgctatgcaggagccagtgactggagtaaaaaaactcagaagtctacctggtgttctaattgtacngtggctgagctggcactcaaatcatgagatgcagtcctttccactcttccntcccctttccacaggcagagaagcctcaccccatggccaccaccaccaaaggcccatggggagtactgccaggctactgtcaatgttctcttagagaccaaaggctcttgagtcagcttgtggtgaagctgcctggcctgggattcacccttcagtgcagtgggctcccctctggctcagggaaggtccagaaatgccatccaagatccaaggcctggaatcagggatcccaacaacccncttggtgcctaccccactgtggacaagctggtaccgaacatgcaaaagtctcttttgcttttccctcaacttttttcaagcagaaggagtctctccctatagccaccacagctgagaatgttctgagtttcactcaaggcctatggtgtactatcagggtattgctgctggttattcagggcccaaggactcttcagtcagcaggtgatgggtccttccagaactgagtcctttccttcaaggcagtgggtttccttctggcccaggatgtgtttagaaatgtcatccaggagctagggcctgcaaaggggaccnaatgactatgactggtggcctatcctactgtggctgagctggtatacaaagtgcaagataaagttctctttactcttccctctcctcacctcaagcagaaggaaggggtctcttttggagccgtgagctgtgctgcctgggattgggagaggggtggcacaagcactcccttagctgccctaactgttgtcttactaggttacatgcccaccaagtccactggctctgagcccagctcagtactaggaattgcctcagagttgcagtccttgtggccnagacngcccttcaagtttacttannattccagagcattttagcccacagtcgtgaggctcactggaactcaagttccagccactgggatgggtaattcccccctgactagagctgactatttatttatttatttacttattttgagatggagtttcnctcttgttgcccaggctggagtgcaatggcncaatctcggctcaccgngacctccacntcttgggttcaagctattctcctgcctcagcctcccaggtagcttggatnacaggcatacaccaccacacccagctaattttgtatttttagtagagacgaggtttctccttgttcgtccngctggtctcgaactcctgacctcaggttatccgcctgccttggcctcccaaantgctgggattacaggtgtgagccaccgcacccggccaaaactcaagttttttaagagagtgggcaggaagatccagctcaccttactagccactagagctgatttaaatgctccctctgtgggtgggcatcagctgaattcagcctggttttgctttctacttgttggtagaagagctgaggcaggactggcttatctgtcataatataaaagagtcttggaagatgtctggggtccagggtctaaaacccctcgtggcctttggaacaccaaactctgtgccaaggggtggaaggctgccctgccgcaccacaaatctaagcccagggcataaaacccctcatggcttggatggantccagggcttagggcataaaacccctcgtagcctctggaatgtgcacagacttgttggttgctctcccaggttcgtaaacatgttctctattatctccaagcagcagagcatattatatatgcatcaaagaaaatgctaaaccatcacagatangcttgatgcacnactacctttctaacctcacaccctcacctgtttaccccnacgtcctcangncctgcttctttgtttgatcaccaataaataatgtgggctcccagagctcagggccttcgcagcatccataccagcgttggccccctggacccagcatatgcactcttaacttgtcttttctcattcctttgactacgctggagtttgtagcccccacggcctggtgttgggtctgatcaccccaacatttctggcacccaacatggggctacgaacactccggtgaaggaacactagagtgtgcggaagcggaggacacattgtcagaggacacccaaggacgactgaaagaagcttggtgggtaagctgagcactcagaagaaccaggntaacaatggaacagaatgaaagtaaatattctgcttatttaaatttcttaaggcatttattatggagagggggagtgaaagttaatactcagaacttattaacactctttgatacagtagagcagttttgcccatggttcccagaacaanggacaatggagctagatgaatgggnaagaattggcagaaattttaaaaacgcatataaagaaggagccaaaattccagtttctgtttggtcagtgtgggagttgataaaggcagttcttgagccatttcaaacagatgacaaggcagattcagatgaggaagaggtagatgagtgtaaaaaattaacttcagattctgaatatgaggaacagcaacnggaagaaattaaagaaaagaaatggaaactgaaaaaggtatattttactagcccttcggttccacctgctgaattaagtgaatggccacctcctccctctccccctaatgggtgagaagatgaattagctgtaaaacttaccgctccggtagctgcaacattaaaacctggagcaattggtgatgcgatanaaaattttattcagaaggctagaactgaaggagacctagaagcatggcaatttcccattactataatccagagaggaggacagaatatagctagttgggccacctttccttttaagttgttaaaggaattcaagcaagccattagtcaatataggccaaattctccttttgtacaaactttactaaaaaatgtggctcttgataatagattaataccatatgactgggatactttaacaaaatctgttctcactccatctcagtntttgcagtttaaaa

SEQ ID NO: 100287 - DNA, 481 bp, Homo sapiens
  misc_feature (481)..(481): n is a, c, g, or t
gaactcgaaatagaagaggtttaagtatttgaataagttgggaaaaaaaggaaaaatagtcttccctgcccttgtcactgatggtgacactacttgtaattactgtattttttggcagaacactcagatgaacggattcctatgctgtggacttttatcattctttttgatggctgatagtagaaagcacacagtaggtactccataaatgtaagactatggcagctgtctagtacaagtgcttctcactgattcttggttaccaggaaaaccagaaagcccgtcacttgccttgcctgcaaaggcgagcctaaagaaatttctctaaccaaaattggcagggtctttccaccacaaaaggctcttggaaatataacttatggggcttaaggctaatttgagttgaagggtatttgtaatatttgatttgcttttagcagagaaaacaataaaagaatccaggaaaagtagaaaaaaaaan

SEQ ID NO: 100288 - DNA, 219 bp, Homo sapiens
gagagccgagatcatgccactgtaccccagcctgagcaatagagcaagactctgtcttgagcggttgcggaaagagttaagctattaatagaagtaaaccagctcttgtgcagatttgcagcccaggttaatgttgcctgcttggtaaatggaagttcaaatcctgaatttggtttaaggtggtcccaatttagtaatctaccaggaacatggcagaag

SEQ ID NO: 100289 - DNA, 882 bp, Homo sapiens
atttttagtagagatggggtttcaccctgtaaagacatgactttgaaggataggaaagctaactaaccagtcataagtgaatatcattgcagggctttttagcatatgggggtacttttttgacttcctgtaggatgttcagtgttgtccaagtaggtctcaaatagaaccccagtgaagtcatattgtttcctttaattcttacttttggggcaatgcagggtttctcttcttcttttttttttttttttgagacagagtctcacttcttgccacgtgcacctccaggcttggcttgacagagggagactcgtgtctcagaaaaaaaaaaaaaaaattaggtttcaagtctgtgacccaccgtgtgaccagccagagggtgcccttctcttatatagtgtgttcatacctcagtggggctctttgggttcttgcccaggtgattaacaatgggggaataacgccttgtctatacacattcttctcatttggtagaaacccttctccccgtgttccgtgaaattataactgtaaaacttccataaagattttttttaaatataggctatttattttcccttgtgaaacaggccataagcggtttggagagcaaccttttaacagagcgccctttatgtgtttttaacatctaacccacaagcggagcacgctaaacgcgggctcatattatgagggcaaatattgcggggtaaattccctctatatgctcaatgtcgagatatggggccagacatgttttttgaaacaattttttcccccccaaggtgaacatcgttcaaaataaatttccaaaaacaacacattctctattgagggacccccttcaacatttgttgttgcgcccagtgtttgtccacaatc

SEQ ID NO: 100290 - DNA, 200 bp, Homo sapiens
gtgggagaagtgaagttttagatttgatactatctggacagtagctattgtctattgtaaattctcagagaatctatactgtgtataataaatatgaaacttaaatgttcatggtatctatgttgactatatgtgttttagtttgacttctccctatagattggttttgctgtattttacttatttcttgaatgttatca

SEQ ID NO: 100291 - DNA, 250 bp, Homo sapiens
ggttcatgtgtggaaaactaaaacgcctaaatgctcaagtagcattttactgtagaaatacaaaatctgaaattatatatcaagctattttccaaagctgtaactttttataccctctcactttgtgctttccttccagatcctttcagagccattttcatacacaatttttattttttgttttactttgctggcttttttgatttattaactttaaatatgttttttatgttaggcacccaaaccccaa

SEQ ID NO: 100292 - DNA, 153 bp, Homo sapiens
tagggttgttttgagggggaaacatgtccattcctgcaaggtgtataggtctgtgacccgtgcgtggtgagcatgtttataactcaccctggaatcttggcaggacccccgtcaagatgccaaggcttcaggaaccagagacttccagggttt

SEQ ID NO: 100293 - DNA, 174 bp, Homo sapiens
agagcaagactctgtctaaaaataaataaataaataaaatagggcagagattactgggaggggtaagtaggccttttaactataatggaacatttttttgtgtgtgtacttcttaccaccagtcactctttagcttggggtacaaagttgaaagccacctttgtgagattgaac

SEQ ID NO: 100294 - DNA, 393 bp, Homo sapiens
gttatgaaatcaatttagtggactatgagtataaaacaggaaagaaaacatttgctattacataataagggtgagtgttgttttttgtgactttagtttttgttcatgtgtatatgtgttaggttatgatataaagtgtattccttaatgtggattatagtttgaaaagtttgaaagccagtgcaataaatggtattttcacaaatagctaaccatttggagaaagcattcaaaaaggatacaaaaatatacagacagaataaatgaaagactggactaaactatgtcagtggaaaaatgtaagaatagtagtagtaagtcattcaatagaggagagttcaaagcaaatgtatgaaacaaagtatacaaggttgtagaataacagcaaataat

SEQ ID NO: 100295 - DNA, 1312 bp, Homo sapiens
gtcacactgcagaaaagaaagtgttgggactggtctctaagctcgccctgcagaaacagcgagctgtcctagctgtcctgggaatgatggggccacagactacatggccaagagcaggcagagcagctactgtttccctagggccacgtgtggaatgagtcacttcatcagctcaccacaactgctggcctggcacctgggtcctacggagagggcaatggcaggtaaagtgccatcacagaaccaccaggcaccgaagaccgcgttgcctgcttggacgatatgggcctggctcactgcagaagagaggcactgatgctagagactttcccctgggccatatgtatttttgtcttgaaagaggagtcgtaagggtttgcctacccaaaagctattttgtttcatatttacatttttagttctttctccattaagaaaacgattagtgaaatgaatggaattcgccttctttgctgctattgcttatgtgttcctatttcaccatcttttgtaaataacagtgttgttgctgtcagggcacttctccctcactgggcacgtgcctttctgtgctgtggccagcccaccatcgcctgtcctcacctgccatccataccctagcagagccgtgctgctctgagggtgccgggtggggctccattcttaccctagcaaactcaccagaacaaagcccacctgcccaaccctgtccttgtctcatttctcagcttcccgaggctcccttccatacccacagaggcaggactgctagagccccactcatgagaatcacagtcatttcccagcttcctggggcttccttccatgcccgcagaacagaggcgggactgctagagccccactcatgagaatcacagtttccacagagaagaccagtctagcttggactgtgggttcctggttttgcagatgtagagtggtgaaggcctaaccgaggagaggaaacaggagtgtaacagagtctccattccaggaccagcatctcttccctccccttcaggggtttaccttcctgaacttctcagtgtatgaaacacagcaggggctggggaactatacaacccagaggtgtgtttgtttcaagtattttttagagcagtttcaggttcaaaattgagcagaggctgggcgcagtggcttacgcctgtaatcccaatgctttggaaggctgaggcaggctgactgcttgagcccaggagttcaagactggcctaggcaatatggcgaaaccctgtctctactaaaaatacaaaaattatctgggtgtggtggcacacacctgtagtcccag

SEQ ID NO: 100296 - DNA, 383 bp, Homo sapiens
ttcctccatccttccaggacccagagccagagaggagcccggcttgcttgtgattgttgtggagagtagtgagtgacagttataggaagttgtgcctgggggcctatggtggaaagatactaaggtagaaaggctttcagggcctgaaggtggggaagacttgggaccagtatcccgacatgctgatccctggacactctctgccctgccttgtcgctgcttgctccttctggcccccctcctcccagtctctttcttcagctgcagatgcagatgccaactgggcaaagggagtggtgctgctctgcgcctcctggcgtttgccttctgttccctgtaaccagagacacggatccgggtgtgtagcctgcattctgtctgag

SEQ ID NO: 100297 - DNA, 347 bp, Homo sapiens
gtgtttgtttctctttccaccataattgtaagcttcctaaggcctccccagccctgtggaattgtggatcaattaaacctctgtcctttataaataacccagtctgaggcagttctttatagcagcgtgagaatggactaatacacctcccttcttgagtctggaagaatatgtgaagggagattgctaaggacttatttacagaatggttcttaaagtgcttgggcaagaactatgtatttgtggaggctggtagtgtttcagtgaatctgaaaacctttgtgacatgtgagaaaggtatgctgtctctgaaagctaagtgtattatgaaggatctataaaggcca

SEQ ID NO: 100298 - DNA, 266 bp, Homo sapiens
taactacaacaggcagttttcctctgttgtacgctgggaagatgctgccaagcagcaggatcaccagcttagctgtgtgtggtgaagttatgcaaatacctccccctgtcaactgtggcagcaaagtccccggaaggacttggactgtcctggtttgatatatgctcattcccccatcatgcactgtggccgggaatcaggaactgtgactggtctgacctgggtcatgtgcccacctctggctggtaggaatggttttgattttg

SEQ ID NO: 100299 - DNA, 1199 bp, Homo sapiens
tccctgcccccctgcagtttcccatttgtctttcagtatgttaatatttttgtgccatactggttttaaactttcatgttgtcacatctgttaatcttttctttaggatttctggattttgtgtaatttttaaaaaggtcccctcctcctccctaatgtgtctgtggaccacctggattccactgtacaaggggaaaagtgtctattcctttcccaaagatggaaaatggagggcttagggacactagatgcatctttctcagcatcacttccagatgcagtgacttgttgggctgcgtccttaatggccatggcagagcagtcccttgggggatccagccctgtacaatgcatctcttcctggagaaagctggcctgctccagaccccaccattcccaggcgcccttggagtggactctactgatgacagacagaccctctgagagacaagaccctctgactctgtgatggaagatgccagagattttcctttggggtaattgtccttaaacaaaaccaaacagatgaaacacacacaggacttgtggctaaaaaggctagtttttcacttgcatttctcaactaacccaggttttacatgcatctgtgaatccttttactactacctctgtggagagatggagagacttcagataaacgtgaagctaatgagtaaaaccctctctgccaaaacctacactccactttaggcccttcttgaagatgagcacaatttttaaatactgagcacaatttttaaatactgacatcacttcctcttccccctcccaccccagctcagcagcctcaaatctacagagaagaagaattatggcatgaacattcccacagacccaccatctttaagacttgacctctgtaagtttaccaaagggctcctcacaattgtggtgggggttctggttcaaaatttggagcaaacatgaagtttttggaaacgttttctcatttgaagcctccagtatgctgtactattctggaaattaccttcaagagtctcacttcttgtttctgttgtgttttctgtgggcatcatgttcttcacgcttgcagtagaaggtgctttctcggtttcccagagtatccaacggctcacctttctcaagtgctggcagtagctatgcactcacgggctggtttgggtcgctggtgcagcagcgcaaatctgttgccttct

SEQ ID NO: 100300 - DNA, 418 bp, Homo sapiens
aaacatgttttcttatttgatgccacagctataagcctcctgtctaccagggagagccgtctgcaggaaccaataataagttctcccactggggtctgttttctgaactctttcttctgctcctccacccagccctccccaagtggggtaggaccctgtttttggagagatttgggagccagctccacttgatcctggcccacagcactgttaggtaccctggttgatggctattaccaccaggggctctgctgttttaaactctaaaccaggagtcagcaaacttttttctatagagggcaagaaagtaaatattttaggttttgcaaaccatactttatttacaaaaacaggttacaggccagctccatcctgctgtctgtttttgtacagcctttgagttaagaatgttttttta

SEQ ID NO: 100301 - DNA, 759 bp, Homo sapiens
  misc_feature (688)..(689): n is a, c, g, or t
  misc_feature (694)..(694): n is a, c, g, or t
gaggggcatcatgctgagacaggagagccaaaaatgcttgctgcttacgagagcggcagcagcagggagctctagacagctgggctagctcttctcaagggcagaggatgctcacggccattttggggcccttccatccattttgggacccttccaccccactcccggcctgacaccaggcctccctgtaggaaaaaatatgttaagattaccatgtgccaagaacagtgctggctctgtgagggcgaattcacttcattgcattctgctaccaactgtgagcagttacagagattatccccattttatagaggaggaaatcgaggctctgagcggttaagtaacttgtccagggtcatacagccagcaaggcagaaaacatgcaaggtgagactgagttgggatgagtgtgacacttgcctcaggtgcaaatttatttttttattttttgagctatgttctcactttgtcgcccaggctggagtgctgtggcgcgatcatggcttactgcggccttgacttcctgggttcgggtggtcctcccgcctcagccacccaagtacccaggtagctggcactgcaggcacgcaccacgacacccagctgattttgtgtgtgtgtgttgtgtgtgtttgggttgtgtgtgtgtgtgtttttgagacggagtctcactctgtcacccgggagnnggagnttgcggtgagccgagatcgcgccgttgcactccagtttgggcaacaagagcaaaactctgtctca

SEQ ID NO: 100302 - DNA, 128 bp, Homo sapiens
tttctccacagtgctctagggcagctgtggagccaatgatgaaaaccacatgtttctgggcagccctgctgttgcacaatgccgccaaggggagggcaaaaaagaaagaaagaaagaaaaaaaagaaa

SEQ ID NO: 100303 - DNA, 353 bp, Homo sapiens
cataatagcccaaaggcagaaacaatccaaacttccacccgtgggtgaatgaagaaatgtatgcgcgggaacattcgccacgtgccacagcatggtgagccttgaaaacgtggtgcaaagtgaaaagcggtcacaaaggtcacgtattatgtgattccatttatatgaaacacccagaataggccaattcatagagacagaaagcagatgagggattgccagtggctgaggtgaggaagtcagtggtgattattaaaagggtgttttctggggtgataaaaaccttttgaaactagagaggtgatgggtgcacagcaccgtgaatgcagaaaatgcctcagaatcataccctt

SEQ ID NO: 100304 - DNA, 344 bp, Homo sapiens
aattgcaaaagtataacaagactaattgttgcaacaaatgaaaaagtgcaaacaggctgggcgtggtagctcacacctgtaatcctagcactttgggaggccaaggcgggcagatcatttgagtccaggagttcaagaccagcctggggaacacggcgaaatcccatctctacaaaaaatacaaagcttagctgggtatggtggcatatgtctgtagtcccagctatgagggaggctgaggtgggaggatcgctggagcctgggaggtcgaggctgcccctgagctgagattgtgtcactgccttccaccccggtgacagagtgagacccaatctccccaaaaa

SEQ ID NO: 100305 - DNA, 519 bp, Homo sapiens
aggttgccttacatcgctactcagagaattacatggcaaaaatgggcccaaacccggggctcatgagtgcatgttctcagaacccctaggagggatttcaaaacccaagtcccacatgattctggatcattaactcaacaagcagcagacatgcctctttaaggcaaaagttctatgttccatcagtgagcttctcataccaccgtgtctcctatattcttcagtaaaagactttaatatctaaaactcctttaacctcaaatcctgttatccccaaatgaggcaataacttactcggtgagatgtgtgcaccatcctgctcagtttgtgaatgcttcattacatttatatggatggtatattttccaagagctagataaaatatttcctcttctcaagtagctgcctactcatttggaaagaaaagacgtgaaagatgaacaaacagccattaagtgcaatcattggtgccttaaaactttaaggaaaataaaaatcactggaagtcggggcagtcac

SEQ ID NO: 100306 - DNA, 266 bp, Homo sapiens
agaacttggggcttaaggcacaagttagttgaaaagaatgtaaacagtcaagtccaaacttaggaagttcactgcaaagtacttcctgtgctgcacagggagccaaaacaaagtgaggcaaaacctatctcgccactacacaactgaaatcagtgctcttcctctactctaatgaatccttgcaattagattactagtgatctaaccaaactgaggctgaatttctccccttctgcaaaaaggcttatctataaactctaagtcag

SEQ ID NO: 100307 - DNA, 838 bp, Homo sapiens
ccagcctcagtctcccaaagtgctgggagtagaggcatgagcaccatgcccagcccaaaaagaaatcttaattaaaaaggtaagatgtataaggaaaccacttagcattaatgagcagtataaaagatgtcttatataaatggagagatccaccttacgcatagataggaaagactgatctgtaaccatgtcaactttctgcaaattatagttttaacacaatttcaaataaagtcacagtgtttgcttatttaaaaattgatatgattattctaaagttcacctaggagaatgagtgaagattattcaagaaaattgtgtaaaagacatacatgttacctgccctactgtttatgacaatgtacaaaactgaaaaatccagtgatatctttcaagaggaaaaagtattgtaaaagacagaatagaaaaatgaatgaaataaaaagtgttaaaacatccctaaattacatatacattcatgtgatttgatagtatttcagatccttggaaaaattaattattcaacaattagaaccagaacagttgatttacctttgaagagcatactcaggttagatttctacctcgtgtaacaaaattaattccaattcagttaaatgcccttttataaatcaacataaaaatgagtaccttagtagaaaatatataaagtttataaaccatttttaaacgaagaaatgtaagtgaccaacaagaatgtgaatttaaaataacatatttttttcatttatttactttgcaaagagaaaagctgcgaagaggttgtggtaaattggcctctcttctactctactgttgagggtgtaatttcgcataa

SEQ ID NO: 100308 - DNA, 870 bp, Homo sapiens
caaaggcgcttagaggatcccctcaacgctttattcattaatattactttggcgatagaatgtaaaacagattagaggataactaccagctaaaaaggctattatcatagttcgagtgagagatgatgagggcctgagctagggaagtgacaagataaaataaaagtacagatgaggaatattgctattaggaatcaagtgtctatgaccaagtggatctaagaaataagggggaggaaggcctgtctcctgataagaaaatttggtcattaaaagcgtgattacaatcatgtatactaagaactttactaaaagctggagatatgctgaacaagacaaacaccatcccctcacttaagaacaatctattgggtaaaaaagcagataggaaattacaataaagtagaagtacaacaataagaaaaacatagaaatgaagaaacccagaaggactaaaaaaaaactataagagcaacaactttcaaacaaatttccttgacactaacaagtcaagtaaaatgagaacctgaagttttttcagactaggcaatcagaaaattactgcagatctttaccagacaatcactaaaggtttttacccagaaatttcaactgagtagggaagacgcctaatgtagtatgatcaacatgaagtgcttaagggcggttaagttactaaaaattagcaatatgtaaaatgaaaggctactaaaataaaatattagagactgcttaacatactgtctcctgggaacctttctataatagtggcaatattgtctttccttacagttacgtatgtgcttactactgaagttttcaaaattaacaatgcattgtttagggatacatgcatgggtgatgatacat

SEQ ID NO: 100309 - DNA, 808 bp, Homo sapiens
agccagagggcagaagtgccctggagtgcagaccccagcagacactgaccaggcacaggaggatgaagtgagtttgttggggacagagaacagccaaggggcagccggcagtcagctcaagtcctcacaaagaagggcaataccacccgtgggccgggacagtcggctcgagggccagcagccaggaacgtggcgaagaacttggatctgaggtgggcccatggtgtagctgtggtgtgctagcaagagtggcctccaaacccaccctggaaggtgatccagagaccatagagcagaaaggcttccttctcagagtgagctgctggaagcccaccagtgtcagcagtgccaagaggagctggggtgccagtatctgtgtatcttcagaggcagcaggggccagtgtgccacatcttgccccagtcctgaaaggatagatggtatttggcctgtgacccttggctgaggagccatggtccggctctgccaggccctgctgctgttagtggccactgtggcccttgcatccagaagattccaagcctggggctcaacaaaggtggtgaggacattccaagatatccctcaaaactacgtctatgtgcagcaggcactctggttcgccatgaaggagtataacaagggccagctttagtataacaagttcagctttagggtgctgaaggttctgaagagccaggagcaggtgacagatagtttggagtactatattgaggtcaaaattggcccgaacaatttgcaagaaaatttcagaagatgaaaactgtgcatttcacagaggatccca

SEQ ID NO: 100310 - DNA, 302 bp, Homo sapiens
aaataaggggaaagagtacaaaagagagaaattttaaagctggtgtccgggggagacattacatgttggcaggttctgtgatgcccccgagccgcaaaaccagcaagtttttattagcaattttcaaaggggagggagtgtacgaatagggtgtgggtcatggagatcacatgcttcaaggatgacaagaggtcacaaggcagaaggtcagggcaggatcacaaggtcagcgcgaaactagaatcactaaataacttccatgtcccactgtgcacacattgtgagggttcaagagcagagaa

SEQ ID NO: 100311 - DNA, 509 bp, Homo sapiens
gatttggctctgtgtccctacccaagtctcccgttgtcttatgatcttcagtgttggagaaagagcctgttgggaagctattggatcacgggggcagattttccccttgctgccctcatgataattctgtgttcagtcaaaataggagatagtttgctgtataatgttaaaattcctgtcttcgttgaatgatgccccaaatgttgatatgaattacatagtgtgtcctgctgtgagcatcagaaggctatataggaaccatgatgctggcacctgctcagattctgggaaggcctcaggaaacttacaatcatggcagaaggcaaagaaaaggaaggcaagtcttacgtggctggagaaggaggaagagggaaagagaagaggtactacagatttttaaacaaccagatctgcgagaactccatcatgagaatagcaccaaagggatggtgccaagccattcatgaaggatttattcccataatccaattaccttctagaaggctcca

SEQ ID NO: 100312 - DNA, 692 bp, Homo sapiens
gatttggctctgtgtccctacccaagtctcccgttgtcttatgatcttcagtgttggagaaagagcctgttgggaagctattggatcacgggggcagattttccccttgctgccctcatgatagtgagttctcagtagatctggttgtttttgtttaaaagtttgtagcacttcccccaatgctctctctctcctgccaccatgtgaaggcttgcttggatacccttcatctcccatcatgattgttaagtttcctgaggtgtccccagccatgccagctgtacagcctgaggaacagtgaatcaattaaaccctttttctttataaattacccagtctcaggtagttctttgcagcaatgtaagaatggactaatacagcatcttctccaaatttaagcacctgccttcccacaattcatttgagaattatctaatatttcactcatatgctcacaaatactaaggttcgctgtataagatcattttatatattccttattttattcattctgcaaagtccctgatgtttttcttaattaaagtctctattatttgcttttacacacaacataattagtttcaatgctaaagtaatattcttcaattttcataaacagatgggtagtttgtctacttctacatttttgtatcttaaagttaccagtacattgacatgtcctaacacaacag

SEQ ID NO: 100313 - DNA, 404 bp, Homo sapiens
cagtgtggtaaatgcaaggagagagggaagtataaggggaatgggggcagtgaaaggggtcagagccagctatccagaagcaacttctaactagagtaggtatcaggtgggctagaaaggctttttattctaggcagggagaagaacataaagcaagaacactaaggcaggaaacaaggactaaacctttttttttttttttttttttttttttttttgggggaaaaaaattttttttttttccccccgggggggaaatgggggcgaaattaaaattttttgggccccccaatttgggggaaaacccttttttttttctttatcttcggggggggggggccccgaaaaacaccccccggggggcccccccgaaaaaattataaaaggggcaaaaggttttccct

SEQ ID NO: 100314 - DNA, 476 bp, Homo sapiens
gtttcctctctaggaaaaggtagcatttgctggagtgagtgcagctgcaagtagtagtggacagctaaagattatacctcaagggttctggaaggttctcgcatgggctaaaaatgtacctctggtggagccgaagcccacatgggatgccacatgggatctgggcaaggaaaatgaatcagggctgacggcccagtactggtttcagccatgtcaatctgtggttagactagttacttacattgaggaatctttcctctttaagctcatttacttctatccttgtattattatgatgattttgttttggtcatttctcttagtctcctggtaaaaattctttgagggaaaaatccatgtttcctctgaaccaaggagaaagtctttactcacaggtagactagaataattagggacatcatttgattcttgaagcagtggttctccaccattttccactagaaacaccttatgag

SEQ ID NO: 100315 - DNA, 276 bp, Homo sapiens
tacccccctttctcttcacttgatttcatgtgaaagtcaaattatttgtatgactgctaccagaattttaataaaaattgacacaacataacccaaacaatataaattttcccctatttagccagactctaaatgctttagggaaaaagaaaaacgtgcagtacataatttaattaggttccaacaactcttcacagattcatatatacttctcacctgtaacaactcaatagagaaaaaaaattcaaggatgaaaaggttttatttacttctttc

SEQ ID NO: 100316 - DNA, 357 bp, Homo sapiens
tgtatttttaatagagacggggtttccccatgttggccaggctggtctcgaactcctgacctcagctaatccacccacctcgggctcccaaagtgctgggattacaggcgtgagtcaccacgcccagccccattcctgacttttacttactttctgttgaggatatcgataaccattaaatttccaatatattccattaatatgtagcagcacaataaaaaattatttacatacctcctttataattaaagcatggttaagacatgaatgcttttctccatttctttttaaaaaattttacatttgagacaaggttctcctctgtcatgcaggctggagtacagtggcacgatcatg

SEQ ID NO: 100317 - DNA, 624 bp, Homo sapiens
atcgttggcttcttcttcagatggagacgggagagaagaaaatagtgggtatcgtgtattgcctgtgtgccagccactcgcccagagtggcccgggctcagaggcagtgctggctgcagcctgctgccaggaaatcagggactctgggggcaggcacttcactgagctgcagaaccaggcgccttctcttggacggtccaggcggaggaccccaggggtgttggggggcgctggctcctgcctcctgtaccccgatcccactggccagcttcctgggaaactgggaaattaaacgtgtgggtgtggagggctctcctggcgggtcgtggaggccctgcactcgcctctctcttccttcctgcccttgccctcttcagactcgtcttcgttgcgtgggtaaatgctccctaggagtcaaatgactgggttacatggcaggcgcatacttagctttagaaggtcccccaaccgtttaagggccagatcgagagctccggtgcccccgcccccgtccccacccgcagtgggtgtcctcgctgccatttcaggcactcgggtgtgtggttttaatttgcatttccagacagctcaaggtgttgaactgtttttcacatgattattggc

SEQ ID NO: 100318 - DNA, 605 bp, Homo sapiens
cggctgatcacgttttattgcaagtccagtgacaagaaacagcatagaaaccataccaattttggtagcactatagatgttctcaataggaaatatttctcctagtccatataggagaaccttggccagggctggaaccagctgggtggtagtgatcagaacattcacacaattctttctggactggatgagaagtaaggactttaatgcagttcctaaccaggaatctgttaaaacttcaatttctgctcttaatctctgcagtgcttccttcctctggggactgaggagaccacccacgttgcttttatgcttatcatagatttctctcactttccggtagcggaaagctagtttcctcatccagtccacacctccctgaacacccacagttgaaccatggctgccactacctcctgagccactgaaaccatctgttgagaaactgtagttgctcaagtcttggccattgtcatcagaagccacatctttcacatgtacctggtcacactcctctaagtcattgaaaaatagatgagtatcagccacttcaaaaatcatttcttccattgttaaacctgagccaatcactactgttgggtcct

SEQ ID NO: 100319 - DNA, 322 bp, Homo sapiens
taagtagctcacagaacgggtgtgagaggccaagtgtgcacaagtgattcagtgattcaggtgattaaaattgtgtattgttaattaatttttttcaggtagaaagttgttttagcaatgattttttaaagaaatcactttttaggaaattaatttatcagaaaaatagaataataattttatttcatctaaagagagtctgaggttttagatgtcatcatctaataatgttaaattttgaaaaagaaaattcaagttattaaaaatcttccaatgactgcaacacttcagtagtaatattaatgtttgagaaaaagcccta

SEQ ID NO: 100320 - DNA, 254 bp, Homo sapiens
gggtgggacttctaggagaaggggtgggagttctggggaggccattagctggttgcaattgagaatgagctcaccatcgctggaggtatacaagaagatggagtggaaggcatcgaggaggtccaggccttgggtaagacaaggaactaggtgcacaagattcctctggactccccttgtccaaaaatggaggtatatcaatttgtgtccatctgaagccaaaatttcagggtgtacctgtaagcgttttaggt

SEQ ID NO: 100321 - DNA, 557 bp, Homo sapiens
gcttggttccgtttttgaaagtttatctctgtggatcacaggtttggatcagagcttctttagctcaaaacaccaaaaagttaggaaaatatcctttgtaggtcagattcttctgggcccaagccagtagggagaaaaaccagcggagtttttcactggtatgagggactgactagcttcacactcagccatctccacaggagcacatggaagctgcagctgtagcagattcccttcttcccctctgtgggagggagagcttctgaccgacttctttcttccagaagagtttgttagctgtgctgtggtttttgtttgattttacttctattatctttcaaagcttttgaggggaaggatcataagattaaaccaaagagaactgtgtcctgctgctgctgctgaccagagggaaatccgtatttcaagactagataggctgggcacagtgggtcactcctgtaattccagcaccttgggaggctgagacaggaggatcgctcgagcccaggagttcaagaccagcctgggcaacatagtgagactcccatctctac

SEQ ID NO: 100322 - DNA, 1493 bp, Homo sapiens
gtaagaggttgaggctgcagtgagccaagatgaaaaactccacaccaaaagctaatatacttaatggtgaatgactagttgggacaataggcatgcaccaccatgcccagataattttttttttaatattttgtaaagatggggattccctatattgtccagaatggtcttgaactcctggctttatgcagtctttccacctcagcctcccaaagttctgggttacaggtgtgagccactgcgccgggccaattttggtttttcatggaggacttttagcaggtctcaaaagttttcttctaatagttttcttggtgttctatcattcataggtgttgaatttaccaaactttttctatttcaagtattacatttttactttgttcaagtaatattgtatcatattaaatgaacattgcattgtgaaaataccctgcttagtcatggtatgtaatcatccttatacctttttgtattctttttttaaatatttctgagaatttctgtgtctaaatttaaataggatgttgtttcgtaatcatcttgtgattcttttgtctcctttgggtattattggctaatagatgaattaagaaatgttacctcttctactgcttgaagtttttgtgagaaattgatgtttttcattaagtgttgatgaaatgtacaacttaagcagtttataacagctattctatctaaaaagatataatttttttgttctatggatataagtatattctattatatatataatgaaacaattcataggatgttttttcagtttacttttgtaatccatctctatcggtatttttatttcatagtatgtcatgaacaattattctaggcacttgacatggaataatttgaaaaaatagagaatgagtcccgtactacaatcaataaataactcaaaattttttccatttttaggatgaagaatatgaatatagttctgttacgtaatatttgtgtttactgtgtgagacaaatgagttactgaatgtaaaaataattagtaaaactgccctttgattttggaatgtatgaagcaggcaaatgcccctaccttctatttttatcaatatttagataaggcagacaaataaattttaataagatatacagaataatcttgtatttgaagaatgctatgaaaaaagatagtttggaggagtagttagtatttggctcatataatgtgttaggtaactattctaagccattaaacatttgtatgcttaatacctaagagtttaaagtgaagaaatcaaagattcattgaaaaagaaaaattaaattttaaaaaaattctatttttaattgaaaaataatagttgtatatatctgtctacagtgtaatattttgatatatgtttatgttgtaaaatgattaaatcaagttaatgtttataacctcatataatttttgtggtgaaaacatggaaaatagtctttatagcagttttgaaatacacattgtagtcacc

SEQ ID NO: 100323 - DNA, 1166 bp, Homo sapiens
atctagaggatcccgttcattttctacactatttcaagtattacatttttactttgttcaagtaatattgtatcatattaaatgaacattgcattgtgaaaataccctgcttagtcatggtatgtaatcatccttatacctttttgtattctttttttaaatatttctgagaatttctgtgtctaaatttaaataggatgttgtttcgtaatcatcttgtgattcttttgtctcctttgggtattattggctaatagatgaattaagaaatgttacctcttctactgcttgaagtttttgtgagaaattgatgtttttcattaagtgttgatgaaatgtacaacttaagcagtttataacagctattctatctaaaaagatataatttttttgttctatggatataagtatattctattatatatataatgaaacaattcataggatgttttttcagtttacttttgtaatccatctctatcggtatttttatttcatagtatgtcatgaacaattattctaggcacttgacatggaataatttgaaaaaatagagaatgagtcccgtactacaatcaataaataactcaaaattttttccatttttaggatgaagaatatgaatatagttctgttacgtaatatttgtgtttactgtgtgagacaaatgagttactgaatgtaaaaataattagtaaaactgccctttgattttggaatgtatgaagcaggcaaatgcccctaccttctatttttatcaatatttagataaggcagacaaataaattttaataagatatacagaataatcttgtatttgaagaatgctatgaaaaaagatagtttggaggagtagttagtatttggctcatataatgtgttaggtaactattctaagccattaaacatttgtatgcttaatacctaagagtttaaagtgaagaaatcaaagattcattgaaaaagaaaaattaaattttaaaaaaattctatttttaattgaaaaataatagttgtatatatctgtctacagtgtaatattttgatatatgtttatgttgtaaaatgattaaatcaagttaatgtttataacctcatataatttttgtggtgaaaacatggaaaatagtctttatagcagttttgaaatacacattgtagtcacc

SEQ ID NO: 100324 - DNA, 741 bp, Homo sapiens
tgaagagaaacattacaaatgtaagaaatgtggaaaagtctttaaatccttcacaagcctttctaatccacattataattcatactggaaagaaactctataaatgtgaagaatgtggcaaagcttttaaccacagttcaaaccatgccaaacataagaaaattcacactggacagaaaccccataaatgtgaagaatgtggcaaagcctttaactggttctcatacctaactctacataaaagaattcatactggagagaaaccctacaaatgtgatgaatgtggcaaagcttttaaccagtgttcaaacctcactaaacataagagaattcatactggagagaaaccctacaaatgtgaagaatgtggcaaagcttttaaccggtgctcacaccttactgaacataaaagaattcatactggagagaagccctataaatgtgaagaatgtggtaaagtctttatatcttgttcaagcctttcaaaccataagagaattcatacaagagagaaatgttacaaatctgaagaatgtggcaaaacctttaaccactgctcagacctcaatgtacctgagaaaattcatacctgagaaaaatcctacaaatgtaaaaaatgtggcaaagcctttaatacctgctcatgtcttactcaggaccagagttcatattgaactaaagaattataaatataatgactgtcacaacattcttcagcacggggtaccgagctaaagtcgt

SEQ ID NO: 100325 - DNA, 830 bp, Homo sapiens
tgaagagaaacattacaaatgtaagaaatgtggaaaagtctttaaatccttcacaagcctttctaatccacattataattcatactggaaagaaactctataaatgtgaagaatgtggcaaagcttttaaccacagttcaaaccatgccaaacataagaaaattcacactggacagaaaccccataaatgtgaagaatgtggcaaagcctttaactggttctcatacctaactctacataaaagaattcatactggagagaaaccctacaaatgtgatgaatgtggcaaagcttttaaccagtgttcaaacctcactaaacataagagaattcatactggagagaaaccctacaaatgtgaagaatgtggcaaagcttttaaccggtgctcacaccttactgaacataaaagaattcatactggagagaagccctataaatgtgaagaatgtggtaaagtctttatatcttgttcaagcctttcaaaccataagagaattcatacaagagagaaatgttacaaatctgaagaatgtggcaaaacctttaaccactgctcagacctcaatgtacctgagaaaattcatacctgagaaaaatcctacaaatgtaaaaaatgtggcaaagccttttttcggaagtcagccctggctgaacatttcaggtcacacacaggggggaagccttacgaatgcaaggaatgtggaaatgccttcagcaagaaatcgtatcttgttgtacatcaagaactcacagaggagagaagccaatgaatgtaagaatgtgggaaaccttcttctgtcagtcagccctactgcacactgtcgatc

SEQ ID NO: 100326 - DNA, 3358 bp, Homo sapiens
tgaagagaaacattacaaatgtaagaaatgtggaaaagtctttaaatccttcacaagcctttctaatccacattataattcatactggaaagaaactctataaatgtgaagaatgtggcaaagcttttaaccacagttcaaaccatgccaaacataagaaaattcacactggacagaaaccccataaatgtgaagaatgtggcaaagcctttaactggttctcatacctaactctacataaaagaattcatactggagagaaaccctacaaatgtgatgaatgtggcaaagcttttaaccagtgttcaaacctcactaaacataagagaattcatactggagagaaaccctacaaatgtgaagaatgtggcaaagcttttaaccggtgctcacaccttactgaacataaaagaattcatactggagagaagccctataaatgtgaagaatgtggtaaagtctttatatcttgttcaagcctttcaaaccataagagaattcatacaagagagaaatgttacaaatctgaagaatgtggcaaaacctttaaccactgctcagacctcaatgtacctgagaaaattcatacctgagaaaaatcctacaaatgtaaaaaatgtggcaaagcctttaatacctgctcatgtcttactcaggaccagagttcatattgaactaaagaattataaatataatgactgtcacaacacctttcacagaaaaaaataattttaccacagattaatttgttcattaatggaactttaattctgtggttttttttttttttttttggtctacataaatctgtccttatgccagtactatattgtttaattactgtaacattgtagtaagaatttatatcaggagtgtaagttactgaattttgttatttttcagaattcttgtgtgtttgattttctttatatgtttatatggattttaggaagagcttgtcaatttatattaaagaaaagctacattggaatttgcattgaatctgtagataaatttgttgggtattttgatcttcatattcagtattgctatatttgaatattgagtatatctcagtttattcagctctttgatttctttcagcattttaaataattttcagtgtatagtatgtgcagttattttgttaagttcatttctaatttttttttctaggatactattaatgaaattttaatttaattcttattttgtttattcctataatataaaagtactatctaaccttgtatgttgatcttgtggcattgatgaacttctatattagctcaagtaggtttttatttatttattactttattttattttattttattattatttttttttgagacagagtctcactctgtcacccaggctggagtgcagtggccggatctcggctcactacaagctctgcctcctgggttcacgccattctcctgcctcaacctcccgagtagctgggactacaggcgcctgccactgtgcccggctaattttttgtatttttagtagagacagggtttcaccatattagccaggatggtctcgatctcctgaccttgttatctgcccgcctcgacctcccaaagtgctgggattacaggcgtgagtcaccatgcccagcctcaagtaggtttttaatgaatttcttatacttttaaaatacaacattatggcaataaaagactattccacttcttttctaatctggagattgtattgatttttctagtgtaattttctggctcatacctccagtacaatggtgaatagtggtataagtagaaattctcgtcctgttttcaaacttgcagataaagcccctagtcattcaccattaagtatattagcttttggtgtggagtttttcatcttggctcactgcagcctcaacctcttaagctcaagtgatcctcccaccttaactgcctgagtagttgggacaataggcatgcaccaccatgcccagataattttttttttaatattttgtaaagatggggattccctatattgtccagaatggtcttgaactcctggctttatgcagtctttccacctcagcctcccaaagttctgggttacaggtgtgagccactgcgccgggccaattttggtttttcatggaggacttttagcaggtctcaaaagttttcttctaatagttttcttggtgttctatcattcataggtgttgaatttaccaaactttttctatttcaagtattacatttttactttgttcaagtaatattgtatcatattaaatgaacattgcattgtgaaaataccctgcttagtcatggtatgtaatcatccttatacctttttgtattctttttttaaatatttctgagaatttctgtgtctaaatttaaataggatgttgtttcgtaatcatcttgtgattcttttgtctcctttgggtattattggctaatagatgaattaagaaatgttacctcttctactgcttgaagtttttgtgagaaattgatgtttttcattaagtgttgatgaaatgtacaacttaagcagtttataacagctattctatctaaaaagatataatttttttgttctatggatataagtatattctattatatatataatgaaacaattcataggatgttttttcagtttacttttgtaatccatctctatcggtatttttatttcatagtatgtcatgaacaattattctaggcacttgacatggaataatttgaaaaaatagagaatgagtcccgtactacaatcaataaataactcaaaattttttccatttttaggatgaagaatatgaatatagttctgttacgtaatatttgtgtttactgtgtgagacaaatgagttactgaatgtaaaaataattagtaaaactgccctttgattttggaatgtatgaagcaggcaaatgcccctaccttctatttttatcaatatttagataaggcagacaaataaattttaataagatatacagaataatcttgtatttgaagaatgctatgaaaaaagatagtttggaggagtagttagtatttggctcatataatgtgttaggtaactattctaagccattaaacatttgtatgcttaatacctaagagtttaaagtgaagaaatcaaagattcattgaaaaagaaaaattaaattttaaaaaaattctatttttaattgaaaaataatagttgtatatatctgtctacagtgtaatattttgatatatgtttatgttgtaaaatgattaaatcaagttaatgtttataacctcatataatttttgtggtgaaaacatggaaaatagtctttatagcagttttgaaatacacattgtagtcacc

SEQ ID NO: 100327 - DNA, 3305 bp, Homo sapiens
tgaagagaaacattacaaatgtaagaaatgtggaaaagtctttaaatccttcacaagcctttctaatccacattataattcatactggaaagaaactctataaatgtgaagaatgtggcaaagcttttaaccacagttcaaaccatgccaaacataagaaaattcacactggacagaaaccccataaatgtgaagaatgtggcaaagcctttaactggttctcatacctaactctacataaaagaattcatactggagagaaaccctacaaatgtgatgaatgtggcaaagcttttaaccagtgttcaaacctcactaaacataagagaattcatactggagagaaaccctacaaatgtgaagaatgtggcaaagcttttaaccggtgctcacaccttactgaacataaaagaattcatactggagagaagccctataaatgtgaagaatgtggtaaagtctttatatcttgttcaagcctttcaaaccataagagaattcatacaagagagaaatgttacaaatctgaagaatgtggcaaaacctttaaccactgctcagacctcaatgtacctgagaaaattcatacctgagaaaaatcctacaaatgtaaaaaatgtggcaaagcctttaatacctgctcatgtcttactcaggaccagagttcatattgaactaaagaattataaatataatgactgtcacaacacctttcacagaaaaaaataattttaccacagattaatttgttcattaatggaactttaattctgtggttttttttttttttttttggtctacataaatctgtccttatgccagtactatattgtttaattactgtaacattgtagtaagaatttatatcaggagtgtaagttactgaattttgttatttttcagaattcttgtgtgtttgattttctttatatgtttatatggattttaggaagagcttgtcaatttatattaaagaaaagctacattggaatttgcattgaatctgtagataaatttgttgggtattttgatcttcatattcagtattgctatatttgaatattgagtatatctcagtttattcagctctttgatttctttcagcattttaaataattttcagtgtatagtatgtgcagttattttgttaagttcatttctaatttttttttctaggatactattaatgaaattttaatttaattcttattttgtttattcctataatataaaagtactatctaaccttgtatgttgatcttgtggcattgatgaacttctatattagctcaagtaggtttttatttatttattactttattttattttattttattattatttttttttgagacagagtctcactctgtcacccaggctggagtgcagtggccggatctcggctcactacaagctctgcctcctgggttcacgccattctcctgcctcaacctcccgagtagctgggactacaggcgcctgccactgtgcccggctaattttttgtatttttagtagagacagggtttcaccatattagccaggatggtctcgatctcctgaccttgttatctgcccgcctcgacctcccaaagtgctgggattacaggcgtgagtcaccatgcccagcctcaagtaggtttttaatgaatttcttatacttttaaaatacaacattatggcaatgtaattttctggctcatacctccagtacaatggtgaatagtggtataagtagaaattctcgtcctgttttcaaacttgcagataaagcccctagtcattcaccattaagtatattagcttttggtgtggagtttttcatcttggctcactgcagcctcaacctcttaagctcaagtgatcctcccaccttaactgcctgagtagttgggacaataggcatgcaccaccatgcccagataattttttttttaatattttgtaaagatggggattccctatattgtccagaatggtcttgaactcctggctttatgcagtctttccacctcagcctcccaaagttctgggttacaggtgtgagccactgcgccgggccaattttggtttttcatggaggacttttagcaggtctcaaaagttttcttctaatagttttcttggtgttctatcattcataggtgttgaatttaccaaactttttctatttcaagtattacatttttactttgttcaagtaatattgtatcatattaaatgaacattgcattgtgaaaataccctgcttagtcatggtatgtaatcatccttatacctttttgtattctttttttaaatatttctgagaatttctgtgtctaaatttaaataggatgttgtttcgtaatcatcttgtgattcttttgtctcctttgggtattattggctaatagatgaattaagaaatgttacctcttctactgcttgaagtttttgtgagaaattgatgtttttcattaagtgttgatgaaatgtacaacttaagcagtttataacagctattctatctaaaaagatataatttttttgttctatggatataagtatattctattatatatataatgaaacaattcataggatgttttttcagtttacttttgtaatccatctctatcggtatttttatttcatagtatgtcatgaacaattattctaggcacttgacatggaataatttgaaaaaatagagaatgagtcccgtactacaatcaataaataactcaaaattttttccatttttaggatgaagaatatgaatatagttctgttacgtaatatttgtgtttactgtgtgagacaaatgagttactgaatgtaaaaataattagtaaaactgccctttgattttggaatgtatgaagcaggcaaatgcccctaccttctatttttatcaatatttagataaggcagacaaataaattttaataagatatacagaataatcttgtatttgaagaatgctatgaaaaaagatagtttggaggagtagttagtatttggctcatataatgtgttaggtaactattctaagccattaaacatttgtatgcttaatacctaagagtttaaagtgaagaaatcaaagattcattgaaaaagaaaaattaaattttaaaaaaattctatttttaattgaaaaataatagttgtatatatctgtctacagtgtaatattttgatatatgtttatgttgtaaaatgattaaatcaagttaatgtttataacctcatataatttttgtggtgaaaacatggaaaatagtctttatagcagttttgaaatacacattgtagtcacc

SEQ ID NO: 100328 - DNA, 1723 bp, Homo sapiens
tgaagagaaacattacaaatgtaagaaatgtggaaaagtctttaaatccttcacaagcctttctaatccacattataattcatactggaaagaaactctataaatgtgaagaatgtggcaaagcttttaaccacagttcaaaccatgccaaacataagaaaattcacactggacagaaaccccataaatgtgaagaatgtggcaaagcctttaactggttctcatacctaactctacataaaagaattcatactggagagaaaccctacaaatgtgatgaatgtggcaaagcttttaaccagtgttcaaacctcactaaacataagagaattcatactggagagaaaccctacaaatgtgaagaatgtggcaaagcttttaaccggtgctcacaccttactgaacataaaagaattcatactggagagaagccctataaatgtgaagaatgtggtaaagtctttatatcttgttcaagcctttcaaaccataagagaattcatacaagagagaaatgttacaaatctgaagaatgtggcaaaacctttaaccactgctcagacctcaatgtacctgagaaaattcatacctgagaaaaatcctacaaatgtaaaaaatgtggcaaagcctttaatacctgctcatgtcttactcaggaccagagttcatattgaactaaagaattataaatataatgactgtcacaacacctttcacagaaaaaaataattttaccacagattaatttgttcattaatggaactttaattctgtggttttttttttttttttttggtctacataaatctgtccttatgccagtactatattgtttaattactgtaacattgtagtaagaatttatatcaggagtgtaagttactgaattttgttatttttcagaattcttgtgtgtttgattttctttatatgtttatatggattttaggaagagcttgtcaatttatattaaagaaaagctacattggaatttgcattgaatctgtagataaatttgttgggtattttgatcttcatattcagtattgctatatttgaatattgagtatatctcagtttattcagctctttgatttctttcagcattttaaataattttcagtgtatagtatgtgcagttattttgttaagttcatttctaatttttttttctaggatactattaatgaaattttaatttaattcttattttgtttattcctataatataaaagtactatctaaccttgtatgttgatcttgtggcattgatgaacttctatattagctcaagtaggtttttatttatttattactttattttattttattttattattatttttttttgaataatgcctttaagagttggtggtttgtaagtttctaaactgaaaaccaaacataaatccttgaattcagaaatgcagtgtgtcaaaaagtgaaaaaaaaaattactttaataagctggataacaccaaagagaagaaaaatactaaaaatcagtgtgagaaagaggtaagttgcaaagatgagagcaaaatttctacagcttttataaaacccaaaacataaataggaatggagctaagagaaagtatttattaaagctagaagtagatactcggctaaaatacctttaacaaaaaacggtaaattaaaatatatttttaaaaccctgagtgatttgtttaccaataggagctttttaaaagtgtacttc

SEQ ID NO: 100329 - DNA, 468 bp, Homo sapiens
ttccatagctccctctgctaactcacccccaccccggcttttacacagctcactcctgagccttcttgttctgccaccagagataactgccacagcatatatattctagagtcaatctgctttgggttcaaatccccactgcccggcaggcactttattacaaacaacagcaaacattacagagcactgctctgctccaggcaccttcctggatgcctgtgaaatcactcactcctcacaaccacagcatgaggcaggcactagtatcacacccactttacaaattaatgaagctcacgcaacatgccagaaaacaccaggccagtgagtgtcagagccagaattcaaaactggccatcagctcctgagcccagcctctcagtctctttgcacactgctttgctctacactttactgcccccttaattcccacaagccttgggcaaagtgtaaaccataacagtactg

SEQ ID NO: 100330 - DNA, 342 bp, Homo sapiens
tgacggagtttcgttcttgttgcccaggctagagtgcagtggcacaatcttgactcactgcaacctctgcctcccgggttcaagcaattctcctgcctcagcctcctgagtagctgggattacaggcacctcccaccatgcccagctattttttgtatttttagtagagacagggtttcaccatgttggctaggctggtcttgaactcctgacctcaggtgatcctcctgcctgggcctcccaaagtgctgggattacaggcatgggccactgtgcccggcccacaccttacatttaagagaaaaattacaaaggagaaatgagaatgaagagcagcagaac

SEQ ID NO: 100331 - DNA, 488 bp, Homo sapiens
ttcaacctgctgtttgtatttgattcctgtttatggcatttatgccactcagaagtttccatatagtcaggcttattcatcattttcaaccatggcttctgagttttgtatcacgattaaataattcattccatttttaagattattttaaaaattatttgtcttctgtaagtctcatgatttcattgttttacatttaaatccttgttccattttgaatttatcttctcttatttttccttctcttatttattccaccactatttactgaattacctcttttttgcacagatttcaaatatctttatatacactaaatctccctatgtatttcacaccgttcctcaaactgacacttctcatgttttcccccgttcctcacatactgaatctccccgtgtgtctcaccccattcctcacactgactctccccaggtgtctcaccccattcctcacactgactctcttcatgtgtctcaccccgttct

SEQ ID NO: 100332 - DNA, 408 bp, Homo sapiens
acctgaatacctgttagcctgtatctagagtattcacctgccttcgtcaaggcctcgacaacgagtagactcgttgtcaccaagctgggctgcctggtcaaggacatgaagattaagtccctggagtagatctatctcttctctctgcccatcaaggagtctgtgatcattgactttttcctggggcctctctcaagaaggaggttttgaagacgtgccagtgcagaagcagacctgcaccggccagaacaccaggttcaaggcgtttgttgccatcagggacagtggccacactgatctgggtgttaagtgctccaaggaggtggccactgccatctgcggggccatcatcctggccaagctctccgttgtgcccctacgcattggccttggccttgccatatgcaa

SEQ ID NO: 100333 - DNA, 699 bp, Homo sapiens
aaactgagcacatggctgtaatgactgggcaactgtttaaaagaagataggttccacctcttggaaacacaacctccaactcctcactgcagggcagctgtatcagactttctgattggcggggcctaggaatctgtgttttggttttaggatcagtgcaaattcacatgacataataatccaaacatacagagaggctggcaactcttacccgcctctgacgccttagatgaccactttcatcaacttcttgtatttctggcttgttttctttagggagaccagcaaatacaatacatggtccactcttacctttcccctttcagaaaataaagatgccatatccatgcttcaaaaaagaaaagaaaaaagaaaagaaaagaaagagaagaaaagaaaaaaaaagcagatgggcttcaattcttttctttcaagaaaaattgaaggaaggtccaatcaactaaccatttctgtctgtcacaccttggaaagagtccaaacttcagtgatgacgccacatcagaactctttatattccttgatattgattgattgattgatttacttattttaagatgggtgtcttactctgtcacccaggctggagtatacattggcaagatcacagctcactgtggcctcgacctcctgggctcaagcgcctctccaacctcagcctctcaagtggctaggcacgtg

SEQ ID NO: 100334 - DNA, 604 bp, Homo sapiens
aaaacacacaggaacaccctttacccatcactaagaactcttcacacattcagacaggcgctgcaccctgccatgtgctaggcagaccccgccgtcctctgctgctatgaggcagagaaaggggctcccactcaggctggtgttcacagaaggcttccagccagagaccaggacagctggggtttgaaggaggagcaagactagtcagggaaaagatcccttctgttagagcaggaagggatggagagcaggtggaagcagcatccaagaaaacaggttttgtcagagctacagacagaaaggtctcaagcagctcagggctgcctgattgatctttgaaagcgtcatgccctctagacttaaaatgtcaggcaggtagtagggttattttgacccttgatttcttcatcacacaatacttaatcttcaaagaccctgtggagactttcctttccaacactcagtacttccattttgactggaagtatttttgtgccactcgtataattcacatctattttgagacccatcagtcccttcgaatattcagaatttcccacctcttaatatttctccaacacacaaaaaaacgaactagatgata

SEQ ID NO: 100335 - DNA, 415 bp, Homo sapiens
ctgttcccactcggaccacatccttagaaaatccaggctcggcgcaatggctcacacctgtaatcctagtgcttttagaggcagaggcaggaggattgcttgagccctggagttcgaggctgcaatgagctaggactgcacccctccactccaacctcggcaacaaagagagaccttatctcttacacccccccaaaaaaaagtaagccttgtttgagcccctcatacccaaagagaggcctttttacaactttggctttcaggtactgaattaatactcttaacgaggccagccatggtggttcacacctttaatgccagcattttgggtggccgaggtgggcggatcacctgaggtcaggagttcaagaccagcctggccaacatggtgaaaccccatctctgctaaaaatac

SEQ ID NO: 100336 - DNA, 181 bp, Homo sapiens
ccttccctgactccctgtgataaggtttttgtttcttcccctggattccaaaaaactttatacatctatctagtaagataccatatgggttgaattgtggttccccaaaaggatatgttgaaatcttaacctctagtgccttagcgcaggactttatagagtgtttacagactaatcgagt

SEQ ID NO: 100337 - DNA, 503 bp, Homo sapiens
ggtggttgcaatgtcagttcagttgcaaagccttggctgtgccatctgctccccgccagtgcttgtcagggcctgttgtgtaggacctgagtaattcccagagcctgtcctgtgccttatttgggtttgggcacatttttgcagctcgggggtgagcctgggacttctgttgattcatatacagaattagagcatccctcgtccagctttctccactgtctggtttatcccatgtctccaatttccagggttgttttttctcagctttatgctttctgaaagtcagggttttctctcagagttttagctgttcgtgttgttgtgaaggtccacctgactgggacagttctcagggaaaagttgtgtgaaaagagagaactaccagggacgtccacatcctgtttggactccaggagcccatcttcctgtttcccttgctctcatagaaggtgactacagtgtaccctaatagggctaggagaaacaaaaaggaaaaaaaaaaa

SEQ ID NO: 100338 - DNA, 2179 bp, Homo sapiens
cagaataggtttaagtgcttaaagtgctttttaaaatgtttgcgtctctgggcttacaggtatgagccactgcgcccagccgcatctcttatttttatttatgacttggaacttaagttacttcctaataacatcaagggtaaataatgtagtttccttttattacttacctctttcgtatagagtggttgcatttagtgactaaatctgtagtggtgttttaaaatgatctgatgttagtctgtaaataaaaagattacggttatgttgtttggcatgcttggttaataagtttcaaaagagatcaactaaaaatattttggagcaaatgaaatagaaccttgtacatacagcctagaggaaaccagttcctattcatgtattattaccttctatacgtagctgacttctagggtagaacatgtgtgaaaagtgattgaggaggaggtactgatgccgcttaagatggatggtttgtgggtaggaattgactgagaagaaatactgtctataagtagtaattcagagcttcaaacagcaaaggaccatctctgaatttagtagtcaaagattggtgggggagagaggtgacttcaaagaaaagcctggtgagcttaggggagaggagagatgcttgttgtttttatagattcaataaacacggcaacagagatacaccaaaagtcatcctcgatgtttgcacagtatagcagtgaaggcagctatatgtctacaatttaacatttttcttgagagaaatgtcattcttgaataaatctatttttaaaattgatctgggaatgattcattatgctctagttttctgagtttgagtataaagtttccacttgtctttaatcaaaagaaaacttatttattctttcagagaaaattttcatccatacacagtccattgtgtagatacggggcaagaggagagagaaaatgttagaaaggggctgatgagatcttaagaaacattttaaatctctgttttgcacacgtatttgagaatcgaatatgaggactttttaaaaaaagttttgagaaataatttctttgttaaatcttatattttaatttcttttgaaaactacatttttttgtaaaagcaattatgttattcatgaggaagctagcataaatgagagaaatcgaacttgataagttcttgcattgagtgactgctaatttgaaagtaacagaaagtaacacatgatgagacagatttcctttctggaacacttgttgtttcttagtattgaaaaaaaggactttcattaaaattataatttatccttaaggattagcaatccttttaaaaagagaagagaagaaaaacgtacttgattggtttccctgagttgtgtttttggcaagcccagagctcaaggaaacctgcttggtgacttccccagctggcaattcatttaggactgcaaataagtaacagttgcctcatcatgttagcacttaaagtgaacctggcatttagatctcaaaatctagaggcaaatgaataaggcagggaatctgtccttttctccccatgaaaggtaaagcccttggtaattcaggtgcacactctgataatgtacatgaaaggtcttccttgataaacgataaaccttgtgattttgccacacaagaatttagctaaaccctttcctaatgtcattgtatatgagtagtacagattccatgtgtttgtttccattgaatatacagaaatactgaatacttccttaaaacagcttttattgaaaaaaggaagctgataaaaatcactttgcttttttataaaaacgcttgataggattacctttctagagagacttctgtgtatggccacacttatccaccacagtttttgtttatatagagagcattttaaaaagaagaaggttttcctggccatgcacagtagctcacgcctgtaatcccagcactttgggaggccaaggcggaaggattgcttgaggccaggagtttgagaccagcctaggcaacattgtgagactgtttctataaaaaaaaaaaaactgaaaaatcagccagccatggtcgcccatgcctgtggtcccagctacttgggaggctgaggcaagaaggattcttgagcccaggaggtggaggatgcagtgagccataatcataccactgcattccagccacggca

SEQ ID NO: 100339 - DNA, 460 bp, Homo sapiens
caaaaaaaatttgagggaagagaggctaattaagacattcattatgtttaggtgaaaaacaaaggccagcattctagtattgacagttagaatggaaaggaagctgtagatatggttaatcatggcaacaaagatttatggggagagacacttggaagcagaaattatgagagacttttgaaatagcattattgaggtataatttaaataaatataattcatccgttttaagcgtacagtttgatggattttaacagatgcgtgcaatcctgtaaccactactacaatcatgatacggaacaattgcatcaccccagaaaattccctttacagacagatctgtccctccaaacttagcctctggcatcctctgatctggttcctgtgactctaggcttttctgatgtttgtttgttggccttttctagggtttcctgtaaatggaatctcatgtcttctg

SEQ ID NO: 100340 - DNA, 238 bp, Homo sapiens
ggtatatctgtagaaggaaagacatggagcaatttcttctggtggccaaagtctacatgatacaacaggataggaggctgctcctgcccttactgccagctccagcttgatgcctggggctgctcaaaggtcatgtggccagcccccatgctctgcctggcaagagagaaaggggcagtgcaggcaggcaggccacaccagccacctggactcctgaccttgggctctacctgataca

SEQ ID NO: 100341 - DNA, 358 bp, Homo sapiens
taactggtttcactggctcccatcccttctattttctgggcattaagtctgctcacagcaaggggagctcccagcagggaggtaatctccccgcctcttctcccactgtagccagctgtgcaatatgacaccctgggaaacaatcttttgctgacttaggggactgagggtcaccaggcagcttcctggagcagcaaggcacaagtgaccaccccctcgtccttctgcacttccaaagctccgccctcctcagttcgctgctctctcaatctgaccacgaaggtacgtcaccacttgccaagcaaacaagataagtttcacctggctaccttctccttttaaggagccctagcaagac

SEQ ID NO: 100342 - DNA, 370 bp, Homo sapiens
agccagtgttgctaggtgttccgtgtttgttgcatgcatgcatgaacaggtgaagggctgaaataacccaaggcattcgtatttcccagtggagactgaggccatttccctgggaaataattatcaattgggactaaattaagacaattaaaggattacttactttgtgcttccagagcactttttatatgcttcataatcacttatcttgcagccctgtaattattggctgccagttctatttcttccattagtgtgtgctcagtgtgggtgactgtgtcttatttagctctctattttttgtacctggcattaaggagatcttaggtaagtgtttgtcgaacaaaggaatttgctcagaaaactgagc

SEQ ID NO: 100343 - DNA, 616 bp, Homo sapiens
ctcagtgttttggggaaccagaaacaaaccaataaaataaaggcgtggaaaggctactgtgagaacagaaaggagcaactggggcactgaaacaaaaacaacctgcacagaaattaaattgagccagaacgtaaagaactgaaggaagtgtctgatacagagaagagagaaagtacatttaggccaaaagaatcatcacaggatgaactaaccttctggttccaggagaaagacgagggacttggaaactgaatagtcccatccactgcagctgaaatctgccaccttaacttcctgcagagcttcaatgagaaggagagatcagccaagggcctctgagcacctagtcaactcacagatgtgtgaatgatgataccgaattgctgctttaaacccctcagctttgtggtagttacatgggaatagctaatacaaataagtggtgcagaccccggacacagagctgatacacaggatgtcactgggagaaacagagaaagagtgtggttgtctccccatatctacagtttcacattctgggatttcagttacctgtatttaacggaggatgtctgaaaatattaaataaaaaattcccaaagtaaacaattcgtaa

SEQ ID NO: 100344 - DNA, 231 bp, Homo sapiens
ctccccattcccagctgtatgtaagatggtatctcattttaatagactgttgttatttaaatagactgttgtagtttctaccgcaagatgcaattgttgagagcgtgatttctaacattttacataaaactgccgtaaaaggtttactggaacttaatatacattgcctatttggttgatgctttcaacactctgtagggctttcacacaggactagcctcagtggaattt

SEQ ID NO: 100345 - DNA, 393 bp, Homo sapiens
tgggaccacaggcacacaccactacacccggctaatttttgtatttttttgtagagacggggttttgccatgttgttcaggctgttttgttgcccaggctggtctggaactcctgagctcaagcaatccgcccgccttggcctctcaaagtcctgggattacaggtgtcagccacggcgcccggccaataagagcatcttacacagagctccaaaatcccttgcaacatcctgagtgacaggagtgccttttcttctaatgaagtgactcgctgggctcctggacagcatcaggatgagggctggtcaccaggaagaccaagccaggatttgaagtttagcctcttaagcttgaacttttagcctcccccctcatcctttggggaagagagag

SEQ ID NO: 100346 - DNA, 338 bp, Homo sapiens
tttgggaatgaagaacagccagttctgaaggcatctctgccttctaaggacacacccaagggggccggccgggtggcccctccagcatcctccagtgtgacagcaccccgcaggagtttacttccagcgccaaaatccacttccacacccgctgttctggaggctggaacatccaagatcaagacactggaagaaggaaacaaatgccagtcatcaattctgtaagataactggagaagagtgacatatttatttggcattgcagagccttcacatctttcatctttaacccaccagtcagcaaatttctgttgagaaccactttgggcccacacttt

SEQ ID NO: 100347 - DNA, 393 bp, Homo sapiens
gcggccgcctactactactaaattcgcggccgcgtcgagctaccatgcaatctgccttaccacttgggctgtataacccagcagatccaaaggggctcaaagtatctgtggcagatatagacgaggcatggatcctttgttcagtccctctaggtgaatcactgggtagacctcagaattttaagcacagatatgccatcctcccagatatatacatatttttttgagaaacaggtgttggcttgtcactgggctccattagaaacttaagactctttgggaggccaaggcaggtggatcacctgaggtcaggagtttgagaccagcctggccaacatggccaaaccctgtctctactaaaaatacagaaattagctgggcatggtggtgggc

SEQ ID NO: 100348 - DNA, 239 bp, Homo sapiens
actctagcaggagctctacatccctaaccaggtccagagtgattctcttgcccattaaagtttgagaagcactaacctacatctactgagaaaacaaaatatctggatgtattgagattttgctattctatctgggcctacttaatatgtacacatgtatagggaaaccactttaaaagtacgaaagccctcagtgaggaagaggcaaactagagagacaaagtcaattagtgcttgcg

SEQ ID NO: 100349 - DNA, 344 bp, Homo sapiens
cttggcagcaggggcgggggtggggatgcatcctggtcattggggtcccccaggtcagttcagctggaccagtgcctctcagcaaacaccacctccagaccccaccaggagaagaggcctggctgccacagggagcagggctgggagcatctcagagctgctgggcgaccagccccgcgtcctggcatcctgggcccccttgccttcatcaggcgtggagtggatgcctggctgtgggatgctcaggtggcagtaggccagcagcagaggaagcggggataaggggatggccacaggcttgctccccgctgggcccaagggcaaaggtcaacctctctggacaa

SEQ ID NO: 100350 - DNA, 557 bp, Homo sapiens
agtttctactatgtgctaggaactggggacaccaggggaacttacacgtctgctttgtgtttaagttctcatcacaataaacgtgcacgcagcttgttggctggttgttcactgagtaagcagcacaactgtattttccagcaacttgcctctttagccatgatcttcttccaaaacttactgtacttttaaaattaaagagctctgcatgcaagtagagatgcaatgtgctaacaaatacaatgttactgtattgctgatgataaaagaaagagattatggatgtccaattaacataagcacaggaatcaactggaaaatttctagaaggaaatatagaaaagagtaacacagacaacattcctttctcctaaaactattttagtgactcacagtgctcacgggtcttgaatgttattctaggcacaaaataacaaacaccaagtgacatttttagcagtccattttgcttcaggatatatacacaggaaatgcaaaagcaaaaacaaaagctaaaatgctctaccctaagaggaaagacgcaaccaaactaccat

SEQ ID NO: 100351 - DNA, 224 bp, Homo sapiens
catcagtcatatttcaagtgctcaataactacacgtggctagaggctgttatttcagatggtgcagaacggagcattcccatcattgcagaaaattttattggccagcacttccctagtggacaggttacctttatcactgatggttttgaccagtttacaagaccaaggatcatcatataatgtccctttcgcctactggtaaaaggtggcaaactatttagc

SEQ ID NO: 100352 - DNA, 380 bp, Homo sapiens
ttccacgtgctgattgtgagggactgacgggggtttcaccttctctccttttcctggccccacagccttggctcacgcttcctaggctctgagtttcagttcgtgtcccagcctcccaaccggacagcgttctggaaacagtttatgcatgaactcttgcattttctcttgggaaataatcaaaccctttgtttctaatctcctctcagtctgtactactactactacactaacatgactttggttttggggaaaggaaaggaaaatgtctgttgatgctgggccccaggcagcaccgtgagagctgcaacgggctcacatttgcccctagtttttcctccaggtaggagctgtgggaggagtccagggagtcccttgag

SEQ ID NO: 100353 - DNA, 463 bp, Homo sapiens
gaaccccgtgaaagcacacccttcaggctgcagactattttcctgttttcagctacattctacatgactgtctctgattactaccttgaatcttcaccttggttcgaggtttctgtcacagctaaagggaaaggaaacagggaccttttttcacccagcactgtcttttaaatttatgtcccaaaggaggattaaaaatcctcctaaccatgtaatatacacctgaaattctagctatggtataacaggtgacttctctaacatggctaatgaactgtagcagaagaaaatgtatccctttttacctgagatttcatagtttgtgtatatttcttagtttgtataccagttttttttcaattggtagtataaactcttaaaaattgttgtttgatccaaagactggtatgcttcagatataaacctctaaaggtgttttcatctccttcctccagttaactgg

SEQ ID NO: 100354 - DNA, 466 bp, Homo sapiens
agatgttcaattcctcagtaagattccaggctgcagactattttcctgttttcagctacattctacatgactgtctctgattactaccttgaatcttcaccttggttcgaggtttctgtcacagctaaagggaaaggaaacagggaccttttttcacccagcactgtcttttaaatttatgtcccaaaggaggattaaaaatcctcctaaccatgtaatatacacctgaaattctagctatggtataacaggtgacttctctaacatggctaatgaactgtagcagaagaaaatgtatccctttttacctgagatttcatagtttgtgtatatttcttagtttgtataccagttttttttcaattggtagtataaactcttaaaaattgttgtttgatccaaagactggtatgcttcagatataaacctctaaaggtgttttcatctccttcctccagttaactgg

SEQ ID NO: 100355 - DNA, 540 bp, Homo sapiens
ggcattaaactagacacatagaccagtggaaaagaatacagagtccagaaataaatccaaatatatacgctctggtaatttttcacaatgccaccaagaagacacgatgagaaaaagattgtgtctttaatacatggtgctgagaaagctagatttccatatgtcaaagaataaaatgagactcttgtcttacaccatccatagaaatcaactcaaaatgggtaagacctaaatgtaagaactggaactataacacttttagatgagaacataggggaaaaactcttggacattgttgttaacaacgatatcttggtgtgatgcaccaaaagctcaggccacaaaagaaaacataaataaatgggactacatcaaactaaaaagcttctgtacagcaaaggaaacaacaaaataaaatggcagcctatggattgggaaaaaaagtttgccagccatatatctgataaggtattgatgtccaaaagatataaagaacatatacaacttaatagtagaaaaaataattgaaaaatgagcaga

SEQ ID NO: 100356 - DNA, 183 bp, Homo sapiens
gctatctggactataaaataatctgtttcattagcagagccagaacctgcttagaggtgtcaaggatgctaagaagcagtcatcctgcattatttgcacaatgagcatagacttttggtactggtgtaggaatctggaaagagcagtttattggctagcattctctaaggttcttggtttaca

SEQ ID NO: 100357 - DNA, 257 bp, Homo sapiens
gattaaaccaagaagatacagaatctctgaacaggcagtgagattgaaatggtaattaaaaaaaattccaaacaaaaaaattccaggaccagatagattcatggctgaattctatcagatgttcaaaaaagaactggtaccaattctactatttcaaaggataaggaaatagagaatcatccctaactcattctatgaagccagtatcaccctaataccaaaaccaagggaggacataacaaaaaaaaaagagagag

SEQ ID NO: 100358 - DNA, 299 bp, Homo sapiens
tatactgtgcttaacatttcttttcttgtactactttttgttttcctggattaacctccctcatatttttatttacttggctttcttaaacttgaagcccagcctggcagcatagcaagaccctgtctcaactaaaaatttaaaaaatagccaggtgtggtggcatgcaccagtaataccagctactcaggaggctgaggtgggagggttgcttgagcctgggaggtcaaggctgcagagttgtgatcacgccactgcattccagcttgggctacagagcaagcaagtccctatcttta

SEQ ID NO: 100359 - DNA, 791 bp, Homo sapiens
ctgaagacttttaaggcaaagtctggtgggtgttaagtacagacctgctcacaggcacaggcataggcacctggaatccctggcagccagaggaatctgaatccagtgttttcaaggtggagccgcccccacccaggccttgagtcagaaacctgacttccttccattgatgtttttctctgctctgctcggtacctcacccccatcagtgacagccttcagcacttggtgtccctctatgcacaccttctccctagctctgcctcactctggctgtttgcagggggagggacgtcccctccagcccctggcagccctccgtgtctccctctttggctgtgggtgtctgcttgggtccctctgtccctgcctgttccctgtgccccatctgtcaggttggaggagctgagcagatgcctgggaacagggcgtaacatgcccgtaccttccactgcctctgtgttccttttgaggggttcccagcagggtaccccgtcatgggaaggggtgcacatccctgtacaccaggagcccactctgcactctcagtcccaggctgcatctctgcagcccccaatttcatggtcccagttctggctcaccctcaaataccaccaggttaggttgacagcttcctggagagcacctgcagtgtgagggtcaccccttgaacagccagtaagcaaagcagggtcacttgcttatgttcctctctggcgccctcttctggcccaaggatcaaatggtgcaactcccttaacctgtgtctgagctctgtgtccagaaccctg

SEQ ID NO: 100360 - DNA, 242 bp, Homo sapiens
gcggccgcctactactactaaattcgcggccgcgtcgacacagatgcagatcagggcaaacctggcaaggatatggcttatctgcctgaggaggcccttggaccacaacaccgagaagaagaactgaagcatggggagaataatcagaggtgtcattaagacacagtagcaaactagcatcaaagccagtcaactgaacccaccttataccataatcaaacccccaagggcatcagataaga

SEQ ID NO: 100361 - DNA, 405 bp, Homo sapiens
tgaccttacaggctcaagtgatcctctcacttcagcctcacaagcagctaggacggcaggtgcaccatcacacccggctaatttttaaaaaatattttgtagagactgagtctcatcatcttgcccaggctggtctcaaactcttgggctcaagcgatcctactgcctcgccctcccaaagtgatgggattacaggcatgagccaccactcatgcccatctactttttaaaaactcagtgtatgattttaatatatcttatctgtatgctgctaaagtactaactggtctataagaattaagaatagccaatgatcaactgcaaaaagagtaacaaaacctatcatgcttttactttattccattctttgtttttttctttttctccctatttaaatgtactgag

SEQ ID NO: 100362 - DNA, 280 bp, Homo sapiens
caaactgtttccaggattgagagtctcaaggtgtgatccaagtgcagtagaaatccagccatttgccatattggctactcctccaaacaaggcttagaactcatactcatttgtgaaatgtatttttcacccccttttagagattcatagaaacggcacccccccattccaaatatttatgggtgggttcagttcatgtgccccagagcccacacttcgcttgcaatggtccctacagccccgcaaagacattgctgttgatgctaaggacttggatacc

SEQ ID NO: 100363 - DNA, 242 bp, Homo sapiens
aactaattaaccatagcagtatttatggaatagttggaaagagcaaggactttgaatctgactgtgattgaattccagcactgccacttcacagctgaatgacagctgagagtctcagttcccccatatggacacagatataacaacacacacttcataaagatgttgttgtaatacagaagatggtggataattagtagtggttttcttttctattccttttcttcctgcttagactttat

SEQ ID NO: 100364 - DNA, 309 bp, Homo sapiens
aaccaaaaaaactccttttaagcttaggacacacagttcaacctcatttccctttccccaggaatccagaggtgctcttaaacagttccctgctctaggggactgcgtcagtttctcagctcggagacagacaggagagacatgagagccagcctgggggtctttgctgtccctgcccccgtggagtgtaaatgccaagttgctgatgaattacaaggcaatggatgctcacgcctgtagggaacaactctggggataagaactccctgccgacgcggatcgtattaccccaaccgcagcacgaggcca

SEQ ID NO: 100365 - DNA, 255 bp, Homo sapiens
tgtgtgtgtgtgtgtgtgtgtgtgtttctaaaagttctaacccccagtacttgagaatatgaccttgtttgggcatagggccattgcaaatatagttaaggtgaggttatacagaagcaggatgaggcactaattcaatctgattggtgtttttataagatgtccatctgaagacaaaggcatacagggagaatgccatgtgaaggcagaggactggagggatgcctctacaggccaagaaatgacaaggattgc

SEQ ID NO: 100366 - DNA, 692 bp, Homo sapiens
aacatgcagtatgtggttttctgttcttgcattaggttgcttaggataatagcctctagttccatccatgttgctgaaaaggacatgattttcttgtgtttcatggctgcatagatttccatggtgtctatgtaccacattttttttcattcaattcactgttgctgggcacttagattgattctgtgtccttgctggtgagagtagcactgtaatgaacatattggtgcaggtgtcttttggataaaatgaattcttttcctgtggatatatcccgagtagtgggattgtgggattgaatggtagttctattttaagttcttggagaaatctccaaactgctttccatagtggctgaacaagtttgctttcccactaacaatgtctgtttctttttctctgcagcctcaccaccatctctgactttgtgactggtaagagatggtaactcattgcagttttgatttgcacttatctgatgattaatgatattgagcactttttcatgtttgttggatacttgtatgtcttcttttgaaaagtgtctgctcatgtctttgcccattttttaattgggttttttgttcttgcttgttgaattaagttccttgtagattctggatattggacctttgtcagatgcatagtttgcaaatagtcttccccattctacaggctgtctgtttactgtg

SEQ ID NO: 100367 - DNA, 161 bp, Homo sapiens
ccggacagcctgctctcactgcctcgtgccagccctcagggaactcactgcattaccctgttctgttttgagctctcagctgggctccaagctcccagagcttttctaaatgtagcccacgcttcctttcaggcatccctacccccttcaagccaggccct

SEQ ID NO: 100368 - DNA, 316 bp, Homo sapiens
gcatgatcttggctcactgcaacttccacctcccaggttcaagcgattctcctgcctcagtctcctgagtagctgggactacaggcacccgccaccacgcctggctaatttttgtatttttagtagagacgagtttcaccatgttagccaagctggtcttgaactcctgacctcaggtgatccacccgcctcagcttcccaaagtgctgggattacaggcgtgagccatcgcacccggcagaggcaaagtaaatttctaaacttttagtgtcaggacatggaggtgctgcccactggtctcagccatctatgctcc

SEQ ID NO: 100369 - DNA, 108 bp, Homo sapiens
atatttcctgagggcttgtgatttgccagatcctgtaccaggtgctggaacttggtgatagacaatccacagtctctgctctgaagacatccatgcaggtactaacag

SEQ ID NO: 100370 - DNA, 871 bp, Homo sapiens
  misc_feature (13)..(13): n is a, c, g, or t
  misc_feature (28)..(28): n is a, c, g, or t
  misc_feature (30)..(30): n is a, c, g, or t
  misc_feature (42)..(42): n is a, c, g, or t
  misc_feature (45)..(45): n is a, c, g, or t
  misc_feature (50)..(50): n is a, c, g, or t
  misc_feature (53)..(53): n is a, c, g, or t
ggaactgattacngactccacttatagngngcgaacctccgngangttgncanccggcggtgggcgtaatccgtaatcactaacatttgtcagcatcgcgaatcaattcgcgagactgggagactgctggtaaagatgggaggtggcctttgccgctttccatcttctcactgcagtttcttcacgtgggccacttgtacttaaaatgtcttcttaatttattctttttacttccccagctccaatttgtctacagatttacaaatttgttttatagttttatgactcaatttgtattttcggtcctatgaagctttttgccttaaatatttttctctgtttataagaatgtgctgtttcctaggccagttttgtacacactcttccatagaatagatccagaagaaacacaacaatactgccttcatcatatcaggagatcttgataccaaatacgagtgttgcctccaagatgcaagatcctgagggctccaaagaatccactgtccgtcgcaaatcgacggtccgccagctcagtttcagagacgtggtgctccgctgcaggcctcatcctcaggtgcaccctggcagtcagccatctgaaggtactatggaaattcagttactcactcttgggagcagaaggattccagaccattcctgtgtgcaccctggcagggagccatctgaaggtactgtggaaattcagttactcacccttgcaagcataaggattccagattcttcagggtcccaaacttcagataactctaaaattgctacactatattcttctttatttcatgtgtgccaatttaaatgtacaagtcaatcactagtgctacaaatgcagaagtaaagatgtatttcc

SEQ ID NO: 100371 - DNA, 3770 bp, Homo sapiens
gcgccacctgatcgcctccccctggtacgcctcctccagcggcgctcacgcttcggtaactttgcagcgctcatggatctgaagacagtgctctccctgccccgctacccaggggagttcctgcaccccgtggtgtacgcgtgcacggccgtcatgctgctctgcctcctggcctccttcgtcacctacatcgtgcaccagagcgccatccgcatcagccgcaagggccggcacacgctcctgaatttctgcttccacgcggccctgaccttcactgtgttcgccggcggcatcaatcgcaccaagtaccccatcctgtgccaggcggtgggcatcgtgctgcactattctacactgtccaccatgctgtggataggagtgaccgccaggaacatctacaagcaggtgaccaagaaggcccctctgtgcctggacacagaccagccaccgtaccccaggcagcccctgctcaggttttacctcgtcagcggaggggtcccctttatcatctgtggggtcacggctgccacgaacatcaggaattacgggacagaggacgaggacacggcgtactgctggatggcctgggagcccagcctgggcgccttctacggcccagccgccatcatcaccctggtcacctgtgtgtacttcctgggcacctacgtgcagctgcggcgccacccagggcgcaggtacgagctgcgcacacagcccgaggagcagcggcggctggcgacacccgagggcggccgtgggatccggccaggcaccccacccgcacacgatgcccccggcgcctccgtgctgcagaacgagcactcattccaggcacagctgcgcgccgccgccttcacgctgttcctgttcacggccacgtgggccttcggggcgctggcggtgtcacagggccacttcctggacatggtcttcagctgcctgtacggcgccttctgcgtgaccctgggactcttcgtgctcatccaccactgcgccaagcgtgaggacgtgtggcagtgctggtgggcatgctgcccgccccgcaaggacgcccaccccgcacttgacgccaacggggccgcgctgggccgcgccgcctgcctgcactcgccgggactgggccagccacggggcttcgcgcacccaccgggcccctgcaagatgaccaacctgcaggccgcgcagggccacgccagttgcctgtcaccggccaccccgtgctgcgccaagatgcactgcgagccactgacggcggacgaggcgcacgtgcacctgcaggaggagggcgccttcgggcacgacccccacctgcacgggtgccttcagggcagaactaagccgccctactttagccggcacccagcagaggagcccgagtacgcctaccacatcccatccagcctggatggcagcccccgcagctcgcgcacagacagcccccccagctctctggatggcccggcggggacacacacgctggcctgctgcacccagggcgaccccttccccatggtcacccagcccgagggcagtgatgggagccctgccctctacagctgccccacgcagccgggcagggaggcagcgctcgggcccggccacttggagatgctgcggaggacacagtccctgccctttggtggccccagccagaacgggctgcccaagggtaaattgctagaaggcctgccgtttggcaccgacgggaccggcaacatccgaacgggaccctggaaaaacgaaactactgtgtagatgggggcagaggacacggtgttcctggaggagcttcagagcagagtggggggcccatctgccacatgaggtcactgggggtaccgaagtgaccccgcctttcagaagccgttcacacccctgccccttccttgtgatcacacccctgccccttccttgtgatcacacccctgccccttccttgtgttcacacccctgccccttccttgtgatcacacccctgccccttccttgtgatcacacccctgccccttccttgtgttcacacccctgccccttccttgtgatcacacccctgccccttccttgtgaaagacctcagcggggaaacgctccgggccacgcccactccccttatcccaattccgcgtgctggtcccgcacacggtcatccggtttctgtcctgtgatctccagtcctggggcaccctagaggcagagcaggggattccatcaaaggacccactgagaccccagcatggccctgcccgagatgccctgctgcccacggagtcctggcttcccctggtgtggccgggcagggccgagatcgcaggagggggctgccctgacctttcccagtgttcaatgtgtgtgtcttgcgttctactccgggggtggcggcggcaggtctgtccccagcattctcgctctgggcagaaccctcgggaccctccgctgtcgtgtgtctgagccacccctgcagcttcacagggcccctgcacacctctgcccactcagtgtgccctgtcagccctgtccttgtcgtagccccagccctgcagggctgagagcaccacagatgctgggggctgctctggactttggggatggctgtcagcctcagagggccaatggggggctttcacgggcccaaggcttgggaaaatgcccagacatcctttagtgaagactcgacttccaaaaccagccaccgctgggactggattccactccagtataggcacttagcaacacgaaggtttattccaaaaagaaaaggggctgacagacgggagattctcatggacaaaatccctttccctttttctcgtctccatgaacatctgggtaccaagccctgactcaaaggacagatgtggatgacagcaagacttctgtgaaagcaagtggcccgtccctaggtgggagggagtccagagggtcatgggtgtgaaactgtgcacagctttccctccctccctcttcctccttgtctgtgacacatgtgcacacacacacacacacaaacacatgtgcatatcacacacatgcacacacacaaacacatgtgcatatcacacacgcgcacacacccaaacacgtgcatatcacacacatgcacacacacaaacacgtgcatatcacacacatgcacacaaacgtgcatatcacacacacgcacacacacccaaacacgtgcatatcacacacacgcacacacacaaacacgtgcatatcacacacaaacacacgtgcacacatacttaacacacacttgcacctgctatgcacatgtgcacacacacgtagtagtgtgttttccagccacccacacactgggtttgcattggagattgtttcaccctgcaaacgtcaacgtcagcagactcgtcggtgcgctgtgctatccggttgggaggtctcaccaggagcagagcctccctaacgtgcacctccgagaagaggggtgtcggggagtgttcccagcacctgctcggtggaagggctctccggagactggcactcagtatctgagtatgaggagcctcacttcccggggtgtcggtaaacttgaccgtgactcagtaacccacagcgtgctcctcccagcaaaccccgtgtgtccttacaggtcgaccagacgggccgtcggaggaccaccaggtggctctgcctctgcctcaccttctcacctgcttccatagctgatgtgaacccgaatccccacgctgtgctgtgtacgcactgtaggtgcagaaccgtccacacaaaaatacagtcttggcattgtt

SEQ ID NO: 100372 - DNA, 3536 bp, Homo sapiens
cccgtggggggctcatcctacccacagtaagagcatcctggcgtgaccccactgaggacttcacctcctctcccttggtggacacctatccaggtgggcatcgtgctgcactattctacactgtccaccatgctgtggataggagtgaccgccaggaacatctacaagcaggtgaccaagaaggcccctctgtgcctggacacagaccagccaccgtaccccaggcagcccctgctcaggttttacctcgtcagcggaggggtcccctttatcatctgtggggtcacggctgccacgaacatcaggaattacgggacagaggacgaggacacggcgtactgctggatggcctgggagcccagcctgggcgccttctacggcccagccgccatcatcaccctggtcacctgtgtgtacttcctgggcacctacgtgcagctgcggcgccacccagggcgcaggtacgagctgcgcacacagcccgaggagcagcggcggctggcgacacccgagggcggccgtgggatccggccaggcaccccacccgcacacgatgcccccggcgcctccgtgctgcagaacgagcactcattccaggcacagctgcgcgccgccgccttcacgctgttcctgttcacggccacgtgggccttcggggcgctggcggtgtcacagggccacttcctggacatggtcttcagctgcctgtacggcgccttctgcgtgaccctgggactcttcgtgctcatccaccactgcgccaagcgtgaggacgtgtggcagtgctggtgggcatgctgcccgccccgcaaggacgcccaccccgcacttgacgccaacggggccgcgctgggccgcgccgcctgcctgcactcgccgggactgggccagccacggggcttcgcgcacccaccgggcccctgcaagatgaccaacctgcaggccgcgcagggccacgccagttgcctgtcaccggccaccccgtgctgcgccaagatgcactgcgagccactgacggcggacgaggcgcacgtgcacctgcaggaggagggcgccttcgggcacgacccccacctgcacgggtgccttcagggcagaactaagccgccctactttagccggcacccagcagaggagcccgagtacgcctaccacatcccatccagcctggatggcagcccccgcagctcgcgcacagacagcccccccagctctctggatggcccggcggggacacacacgctggcctgctgcacccagggcgaccccttccccatggtcacccagcccgagggcagtgatgggagccctgccctctacagctgccccacgcagccgggcagggaggcagcgctcgggcccggccacttggagatgctgcggaggacacagtccctgccctttggtggccccagccagaacgggctgcccaagggtaaattgctagaaggcctgccgtttggcaccgacgggaccggcaacatccgaacgggaccctggaaaaacgaaactactgtgtagatgggggcagaggacacggtgttcctggaggagcttcagagcagagtggggggcccatctgccacatgaggtcactgggggtaccgaagtgaccccgcctttcagaagccgttcacacccctgccccttccttgtgatcacacccctgccccttccttgtgatcacacccctgccccttccttgtgttcacacccctgccccttccttgtgatcacacccctgccccttccttgtgatcacacccctgccccttccttgtgttcacacccctgccccttccttgtgatcacacccctgccccttccttgtgaaagacctcagcggggaaacgctccgggccacgcccactccccttatcccaattccgcgtgctggtcccgcacacggtcatccggtttctgtcctgtgatctccagtcctggggcaccctagaggcagagcaggggattccatcaaaggacccactgagaccccagcatggccctgcccgagatgccctgctgcccacggagtcctggcttcccctggtgtggccgggcagggccgagatcgcaggagggggctgccctgacctttcccagtgttcaatgtgtgtgtcttgcgttctactccgggggtggcggcggcaggtctgtccccagcattctcgctctgggcagaaccctcgggaccctccgctgtcgtgtgtctgagccacccctgcagcttcacagggcccctgcacacctctgcccactcagtgtgccctgtcagccctgtccttgtcgtagccccagccctgcagggctgagagcaccacagatgctgggggctgctctggactttggggatggctgtcagcctcagagggccaatggggggctttcacgggcccaaggcttgggaaaatgcccagacatcctttagtgaagactcgacttccaaaaccagccaccgctgggactggattccactccagtataggcacttagcaacacgaaggtttattccaaaaagaaaaggggctgacagacgggagattctcatggacaaaatccctttccctttttctcgtctccatgaacatctgggtaccaagccctgactcaaaggacagatgtggatgacagcaagacttctgtgaaagcaagtggcccgtccctaggtgggagggagtccagagggtcatgggtgtgaaactgtgcacagctttccctccctccctcttcctccttgtctgtgacacatgtgcacacacacacacacacaaacacatgtgcatatcacacacatgcacacacacaaacacatgtgcatatcacacacgcgcacacacccaaacacgtgcatatcacacacatgcacacacacaaacacgtgcatatcacacacatgcacacaaacgtgcatatcacacacacgcacacacacccaaacacgtgcatatcacacacacgcacacacacaaacacgtgcatatcacacacaaacacacgtgcacacatacttaacacacacttgcacctgctatgcacatgtgcacacacacgtagtagtgtgttttccagccacccacacactgggtttgcattggagattgtttcaccctgcaaacgtcaacgtcagcagactcgtcggtgcgctgtgctatccggttgggaggtctcaccaggagcagagcctccctaacgtgcacctccgagaagaggggtgtcggggagtgttcccagcacctgctcggtggaagggctctccggagactggcactcagtatctgagtatgaggagcctcacttcccggggtgtcggtaaacttgaccgtgactcagtaacccacagcgtgctcctcccagcaaaccccgtgtgtccttacaggtcgaccagacgggccgtcggaggaccaccaggtggctctgcctctgcctcaccttctcacctgcttccatagctgatgtgaacccgaatccccacgctgtgctgtgtacgcactgtaggtgcagaaccgtccacacaaaaatacagtcttggcattgtt

SEQ ID NO: 100373 - DNA, 174 bp, Homo sapiens
tttttttttctttctgagttgcactgaagggctagccattagatttcaagagagaataaaaacttcatacaaagcacacatagatgagaatcatttctcacttaaggccccaatgctgcccttttgaattcatttaacgcttcagagaaaaaagtctagactttaatgtcattc

SEQ ID NO: 100374 - DNA, 410 bp, Homo sapiens
cccagtaaataatgttaaatggatgtgaccatgccagggagtgggaaagttgttaatctgtttttgaaagccttggattctagctattatcttttagcaataagtacaagtaccaatgatcttttgcccatcattgctactttggtattaatgaactgggcaaatttgtcattatattgagatggttaagtccttggaaagtcagatttgaaatgtaaagacttcatttattgctggagtcaagaggcgcagcattttcaggaagtcaaaaataactttttatgccaggtacggtggctcatgcctgtaatctcaatatcgtgggaggccaaggcaggaggaggattgctttagagcaggagtttgacaccagcctgggtgacatagtaagacctcatctctgaaaaaaa

SEQ ID NO: 100375 - DNA, 360 bp, Homo sapiens
gccctgtcgcccaggtcggagtgccgtggtggcatgtactggtagtcccagttactcgggaggctgaggtaggagggtggattgagccctggaggtccaggctgcagtgaacgaaccatgatcgtgtactgcactccggtctgggtgacagagtctcaaataaaggggggaagttgagagtacaatttggaggaaaccagttaagctgtttaagtatgggattgtgcagtaggggtggagaaaacttaggagagtagagagagatttaggtgttctgttgggaagaattttcttcccaaacttgtctcactttgtttttacagaagatgtactcttatcatctgtaaaaaatatgtatca

SEQ ID NO: 100376 - DNA, 327 bp, Homo sapiens
gagattacaggcgtgagccaccatgcctggcctggatcgcctttttctcatctcggaattagggggttttagaatctttaaggtcccttttatctgtaagatcccagttactcgggaggctgaggtaggagggtggattgagccctggaggtccaggctgcagtgaacgaaccatgatcgtgtactgcactccggtctgggtgacagagtctcaaataaaggggggaagttgaaactacgacagggagagagagagaagtgctgagagggaatgagacaggacccgacgaaaggtgacagcgaccctgcgagggttaaggactcccg

SEQ ID NO: 100377 - DNA, 772 bp, Homo sapiens
gcctgagcaacatggtgaaaccctgtctctacaaaaaatacaaaaaaattagctgggcgtggtggcatgtactggtagtcccagttactcgggaggctgaggtaggagggtggattgagccctggaggtccaggctgcagtgaacgaaccatgatcgtgtactgcactccggtctgggtgacagagtctcaaataaaggggggaagttgagagtacaatttggaggaaaccagttaagctgtttaagtatgggattgtgcagtaggggtggagaaaacttaggagagtagagagagatttaggtgttctgttgggaagaattttcttcccaaacttgtctcactttgtttttacagaagatgtactcttatcatctgtaaaaaatatgtatcagagtatgtgatagacaatatgtatacctgtgttcatgtcatctgaggataagtgctggagcaagaaatcaatatatagtacagtttttaggtcatttggctaaccagctgttaaattgtatgaaagaggcaaagataacattgagcaaaagcaacaggaatttattactggtgtgtcaggaaaaaggttactgaggggtaaggacaaatcaatggaaaatgattacctgggttgtcttatccaactgttccattcagggttataatatttggatccttttaataagattatttgcctatagtgcttatagtgtggagcacccagtaaataatgttaaatggatgtgaccatgccagggagtgggaaagttgttaatctg

SEQ ID NO: 100378 - DNA, 340 bp, Homo sapiens
aatttcaaaactagtagatattggccagccgtggtggctcacacctgtaatcccagcactttgggaggctgaggtgggagggtaacttgagcccaggagttcaagaccagcctgggcaacatggtgagaccccaactacaaaaaagttcaaaaaattagccagatgtggtgacacatgccagtggtcccagcaactgaggaggctgagatgggagaatcacttaagcctagaagtttgaggctgcagtgagctgtgattgtgccctgcactacagaatgggtgatgaagtaagacactatctcaaaaaaataaaaaggacatgttgatggaacacaattc

SEQ ID NO: 100379 - DNA, 249 bp, Homo sapiens
gcggcaggtcggatcacgttgctggccctgtgctggtacccgtttgagaccggattaaggagggaggctttggaggtgccagcggtagtaaacgtgggctctgcacactccgggcgtctcttatcgcgcgggggggcggggggatggggaaagcacgtagcgtcaccggaggctcagaacgcggcagagttgagcgggcgggtgataaatgctgcatagcttttctgtggtagcccctctcgtgccacc

SEQ ID NO: 100380 - DNA, 344 bp, Homo sapiens
tgagacaaagtctcgctcttgcccaggctggagtgcaatgatgtgatctcagctcaatgcaaactccgactcctgagttcaagtgattctcttgcctcagcctccagagtagctgggattacaggcatgtgccaccatgcctggctaatttttgtatttttagtagagatggggtttccctatgttggccaggctggtctcgaactcctgacctcaggtgatctgcccacctcggcctcccagagtgctgggattacaggcatgagccaccatgccctgctcactttatctttttataaataaaacagatacagcaaacaaatcaaatatactgcttaatgagt

SEQ ID NO: 100381 - DNA, 196 bp, Homo sapiens
tcagggcagacggcagagcaccttgagtgcctgctaagggatctggactttatcctggctaggaaaggtccaggctaaggaaagagctgagcaaggagggacaccgtcagaactctggtctcagcatgtcacgatggctactactcaggaaaatgctaatctcttattcaggagccctctcgagagagggaaggag

SEQ ID NO: 100382 - DNA, 399 bp, Homo sapiens
gggacttgcaatgatgaaacagggccattggcaaagctggggtaccagtcacccagccacgctctagggtggtagccaagaagacggaccccgagtgggaggcagagagacaagaggtggatgaagcagagcaagcgtgagcatggtgaagagaagacggagccccgcgctgggagaggaacgcttcagtccgagttccattctgcacccaaggctccccttggtcctcctgggaaccgagggtgccccttagtggtggtggcccaggagaacccgaccaaggcaggagcgccccctcctggaagagcctcgcttcaacgcatcatcattcccggccggcaagcaggggcgacgccagcaaggcctgcgactcagagccagcttggcccgttcgacccg

SEQ ID NO: 100383 - DNA, 810 bp, Homo sapiens
agtcgggggtgggggatggaggcaccatgtccaagaagaggctcaaggggcagaaagtgggggagacatcagggcagggctcacagctgagccacaaggtggacgtgctcactcaggaagcatgtggaagggaaggggcagcccagggaatacgtgtcaggcactttcctggggctgtctcatcataagttccctcggcgtgggaagaactggcttggaaaaacaagagtaaccccaacaggaagccagtgggtaggggcaaagtggtagttcctcacataagtgcaacttcagacttatgggtgccagaggtgggaggtttttagagacgagtgtttttcccttcccttccatgtagatctcagtgaggaacagagaaagcaaaaaactccccagagtcaccccggctgatatgtctttcatacttgaaagagtttatgaaacactggaattatttctgccttgcatattcagaagaacttaccacttaatttttttgcctggaaaataacatttgctactcaatcagctttgttatgaaaccatgggcttctccataggtagctcacaacatggcctccagcttcatcaaagtgagaaagcaagagacagcgagagagagaatgaggcacaagttagtcttttataacgtgatcttaggcataacattagcaagcagatttgcaagacccacggccaccctgcagctgatgcacaccacgtgcaggaactcccatcacccatggccaccctgccaaaatgctttgtcagcaacccctattggagcgttgttgccagtggacccggaac

SEQ ID NO: 100384 - DNA, 237 bp, Homo sapiens
aagacgggtatttggggagttctgcaatggtaaatgagggggaagctaaatgtgtgtggctggtggcataagtaacgtgggatgtgtagattgaggccagaaggcgaagggacttgagtgccattttcaagactttgtttggactttgtctcctagctatggagacctcataaggacctttagtcagggtggtgacttaagagtgggcactattggaatcagaggctcttacaataa

SEQ ID NO: 100385 - DNA, 267 bp, Homo sapiens
gtttcattaggaggggaagagagacgttagaaaagagaaaatgtccatccatcatagccaaactagccaaactctcttacattatctccttcaatcctccgagcaactctgcaaggggcttctagaagcagagctgaggctgggagattaatgctgtcctcaaagtgaagagtcaccactacttgtcaagtcatgtcatctctgcagccacgtgcattttgtaaactgggaagaatgaacagacatttctgacatttttgcttgaga

SEQ ID NO: 100386 - DNA, 283 bp, Homo sapiens
  misc_feature (283)..(283): n is a, c, g, or t
gtttcattaggaggggaagagagacgttagaaaagagaaaatgtccatccatcatagccaaactagccaaactctcttacattatctccttcaatcctccgagcaactctgcaaggggcttctagaagcagagctgaggctgggagattaatgctgtcctcaaagtgaagagtcaccactacttgtcaagtcatgtcatctctgcagccacgtgcattttgtaaactgggaagaatgaacgcctggcctcgttggcctcagcggtggagctctgcggccgaan

SEQ ID NO: 100387 - DNA, 304 bp, Homo sapiens
ggttggttgtgttaatcatgagtcaattattcatggactggaatgcaatatggtcattgaaaataatattgttggagattttttttcacatggaaatttgatacattatgaacaaaggcaacaacgaactgtgtatagttgaatacaattaacattaaaaaagagtcctcttggctttggctgggtgcggtggctcacacctgtaatcccagcactttgggaggctgaggcgggagaatcacgaggtcaggagatggagaccatcctggctaacacggtgaaaccccgtctctaataaaaatac

SEQ ID NO: 100388 - DNA, 384 bp, Homo sapiens
tggttgttgtttgtttgtttgttttttgagacagggtgttgctctgccacccaggctgctacagcttcgatcttccgggctcaagtgatcctcctgcctcagcctcccaagtagctgggactattggcatgcactaccacacccagcttatttttccattttttgtagagatgaagtctcatgatgttgctcaggctggtctcaaactcctgagctcaagcagtcctcccgcctcggcctgctaaagtgctgagattacaggcataagccaccgtgtccagccagaagctgatttttaactcttccttttaaaatttttgctttgacagttctaatcccaccctccacacactgcccccaggcaaatgaatgcttttggtctac

SEQ ID NO: 100389 - DNA, 256 bp, Homo sapiens
caacacagaactctactcccaagagtgacgtctggcagaaactatgaacatgaatgacagtgatgcccaagcagacagacacagtctctgtgagacacatgccaagtgagcatccctcctcccagagatggaccctaaccaccactagacaagagcttcctctgctggaaacagctcatccagccatctccatgatacataccctgcccacagctctgggcatcaggcagataggtgggacaggaggccacaagta

SEQ ID NO: 100390 - DNA, 311 bp, Homo sapiens
caactaaaatcaaataaataaaaaaaaagctgagccagacaaggaatttacctgttttaaccaagtagcccgtttgttaatgttttgtaactgaatctctccaatacccagcatatttatctatatgcagcaagaagtgtcagcaactgcacagattccttattttcttttctgttactacattttcaaataagtagatagtaattctatcatctggcatcccaggaatgtgttaaattaaagcagagggtgctaattctataaaagagaccatgttgggaatgaagtttttggtgtcaccaaaaaaaaaa

SEQ ID NO: 100391 - DNA, 398 bp, Homo sapiens
gtgtttttagcctttccaggttgtggtcggcctcagattcccatccttgctgtgatctggagagatgagccttacccgaggacagatgaacagattatcctcagaagatgaggacatatccaagtagtgaattttactgcagccctctgacactttgtttccatttgtgatttcataggaggttgtctcattgctaagcaactaatgagagctgcctcggctcactccctaatcatctcttaagtaggggagaggctactcctgagggtgcttgcttttctgcctcttacccctcatttgacagataatgaaaatgctcttaatgatcctagaacagtaggacctctgtcagtagacttcagagttgttaattgaaaggagaagttcaactgagatgt

SEQ ID NO: 100392 - DNA, 451 bp, Homo sapiens
gacagcacacttcctcccgccgacgatacctcccgttagctatcgacgcgccttagggaatctcatcaaacaaccagggaaggatcaaccaccagagaaaagaagagactgggagtcatcaccatgtccccaacagaattttcatctatccttctgaggacagctccaagtgattacctagaggactttgcttcataataagtcaaccttcattcctgtgcagccccacctctcaccttcccaaaatgtctgcctcccatcttctgggtccattcattctctcaaatgatttgctgcccctcaaaagaattttccacgttcctcatctctcccctcccctgggaaaaagcatatataagcttctataccaccctgggttattgggtaatcattctccagcaattctcccatcctgtgcacatcaaataaattctgtatgcgttttctttta

SEQ ID NO: 100393 - DNA, 519 bp, Homo sapiens
caatggccctaaggagacaagtacatttgcttggaaaactggtcacctaattcccaaaaggacagagctaacattatatgtctcagcatccagtccatcctagatggatttcgattctatctagggaatctcatcaaacaaccagggaaggatcaaccaccagagaaaagaagagactgggagtcatcaccatgtccccaacagaattttcatctatccttctgaggacagctccaagtgattacctagaggactttgcttcataataagtcaaccttcattcctgtgcagccccacctctcaccttcccaaaatgtctgcctcccatcttctgggtccattcattctctcaaatgatttgctgcccctcaaaagaattttccacgttcctcatctctcccctcccctgggaaaaagcatatataagcttctataccaccctgggttattgggtaatcattctccagcaattctcccatcctgtgcacatcaaataaattctgtatgcgttttctttta

SEQ ID NO: 100394 - DNA, 894 bp, Homo sapiens
cctgaaagccgctcacctctgaagagtttttcggggccacagtgcctgcatgtgcccccagaggtgcctgtgtaatggacacgaagccaaatggttgtttgcatttgaagatgagaaattcaatcccgcagcacttaaaacaaagtggttggggtgggtgagcagatgagcagaggctgtgagtggaggaactgggaagttacaaaggaagccagagactggctggcttcctccctcaaggacaacggggcaatgtgctggggagagcccaaaacaaaggcggcacatagacagcagacgccagaaaataaacctggagctctgctcagagctccacaacaccagtgttcaggggagccagcaaaaggaactgcagggaggtttttaaaacatgtcaaaatgtggtgtaaatcagcaagtcatgtggaaatgcatgctttttaacctgccagaagctgcagagccggctggatttggctcttctgctccaagaggacaagaagagtttaatacttatcctttaaaacttagggtctggagtgggggcacagtgatcagtggccctctccttgccacctgctgtcaccctggaagaagaggcaatgaaaacagactgttccaaaagatgttttcacccttattgctccactccggctcccacccttccagaaattgagcctcctgaggcacagaagactcagctcagactgcccagcccttacccattccaatgctattgttaccctcaaaatgtcaagcagagaactcaactatgagtccagccacagcagaaatgaaaagagtgtttgcatcaccttaaagagcacctctctccccaccactctgcatgtcaaagcccttgtctgagaattgcaggcagtggtaagaaggaag

SEQ ID NO: 100395 - DNA, 444 bp, Homo sapiens
aggcccttccctgccttcctgacaagcaaataatgggaaagctccttctaagaaactctcccttgttctcttcttgactcctcaaaggtgtgcatacagcaagcagcttcccaaagctagcatgtaacagtcccagcttcccacctgataaaaccactctcccatgcaaggtgaccaattaaccctttttaacctcgaacttttccagtttcagcactgacaatttcatgtcccaggaaactcttcagtactaggcaaagagggacagttagtcaccgtaatcccatggtgccttattcagaccagtcctaaacctatcttaatctccagaagaaataattctattctctgaactgctattttttttttttttttttttttttgagacagagtcttgctctgtcccccaggctggagtgcagtggcacgatcttggctcactgc

SEQ ID NO: 100396 - DNA, 459 bp, Homo sapiens
ttcgctttagggcattaggtagagagaaccatggtttggcttaggattgaaggggccgacagcttcccacctccagttggaaataaatggtggagactctgggaccccagcagggaggaattgtgcagtgggacattaagaggagcttctcggccatggcctgcagtttctccggggagctgagagtaaccctcaagtagctttagggtaggaatggtcttttctaatttcccattcctgtttgcagcctgtttcttccttcagcatttgggcagaacagatgttctggggactctggaaaagaacctgtcctcaaagtcttgctggaccaaaaactgagatattggttgaaactgtccaggaccacattcatgcaggcattgtgtaagatgatcttcaatgagtcttgaaagactgttctgcagctgcttgggggtgtagccaaagggtagacctgaa

SEQ ID NO: 100397 - DNA, 168 bp, Homo sapiens
ggctggtcttgaactcctgacctcaggtgatccacccatctcagctactcaaagtgataatgatgtatttcaaacactggcttttgagaccttgaagactttttctggaagtgggggtatattttccacaatcgctgcacctcctggtggcagtagagggatttgttt

SEQ ID NO: 100398 - DNA, 862 bp, Homo sapiens
ttttttttttgagacgttgtctccccctgtcgcctggctggagtgcaatggtgcgatcttggctcactgcgacctccgcctcccaggttcaagtgattctcctgcctcagcctcccaagtagctgggactacaggcatgaaccaccatgctcagctaactttttgtatttttagtagaaacagggtttcatcatgttggccaggatggtctcgatctcttgaccttgtgattcgcccgcctcagcctcccaaagtgctgggattacaggcatgagccaccatgcccggccaataaaggtattttttttaattagtagattaaattattgctgctgagtcagttagcacacctaaatacttgggtaaaccttcttgaaaggctcctaaaacaactgtaaagtaaaagactactgaacagaaacacacaaaataaacagagaaaaatcctggaaaatattgatcctaaagccctcctcagcaatcccctttgtatttgtgaagatttgccgaaaaataatgtacaaattttacaatgaaagtctgccatacttgacaaaataatttcttgtaatagcaggccgaggaattccattccagttttgagactatactcctagtatgtttcacagaagctgtctgaatgccaatttataaaaataataccctatagagtaagtttgtatctatattttaagtgattcagctctaattaccataaagaaaattcaaaaaattttaaatgttatcaaattgaaccatccttcacttctaaattttgaggaaacacatgtaaaaggaagtaaaaattaaatgctgaaatttgaaaaaatctgaattctatatatgttcataagttcataca

SEQ ID NO: 100399 - DNA, 1335 bp, Homo sapiens
cagtaacatctttaaactgcatagtgttaatttaaagaatcagaacatcatcttttttttttaatatattgcttttcatttcattgccaatgaagttgaataaggatatttattttctgaacatcagaagatttgcagacaaatgatttgagtaaaatctgagcaagttagaaaatgtttatttcttagttttttcagaagaagttttgttttgttttgttttcttttgtttgagacaaggtcttactgtgttgcccaggttggagtgcactgacgcaatctcagctcactgcaacctccgcctcctgggttcaagcgattctcctgtctcagcctcccctagtggctgggattacaggcacctgccaccgcacctggctaagttatctgtagatgacatttcacctgaaggaagttggtggtaacccttacccataaccaaacttaggatttttagatatgggaaaagcaagtatgatgacttacaaagctctgccttaaagggtaatacattggtttaatcaggtttactccacaacagggaattcaggtagcttagttttatatcttctttgagtctaatgacagtcttttgagttgaggagttagtagcattttttttccagccaaaattcccagttgatctttcttcttaattctccagtgttcactagatttgaaattctgccctgcttgcccatggtgctttgtcttatggtagtctcattctccaaaatcatttatcttgaacctcagtgtgacttgtctttccagatctctgcctttgtctgatctctgaaacaccaaagctcttcctttcctttcaaactttccttgtgaccagagtcacaaacgttgctgtgctctgagatggttggttggaaaccagcccaagctgcatttggcacagtatacaccagtgaagacaggttgccaggatgaagccataggctgtctcacagttacagatgaacagcttcctgcccccaggttccccttctactgatgtaactaaggtctctaacccagaactccctaggcaatccactatagcaccattaccgatggttgatggacatgccaaggtattgacctcttaagccagtagtggctggttagagcttggcaaaggagcagccccctcagtttatctcagtgtgccatacaaataatattttctctggatgttacagtgtgaaaaagggtgggaagtagtgccctgttgagccatattagagccccaggcaaaagaaaaaaatgtgcattcctgtatattttttcttctttaatggctaagtttttttccagaatattaaagtagttgaaaaaatagtg

SEQ ID NO: 100400 - DNA, 252 bp, Homo sapiens
aaaatactatacggaagcagccacttgagtttcccaaaatgctgccttcagtaggcacttcactccaattaaccaaagccaatatttacggaaatgttttgctccacatgccttcaaactcaactatgttaaatagctaaccccaggttcccatttacttgacagtccattaggtacaaatatttccagcaccaattactactcttagttgcaaaatcataatctactttatccaggctaagtagaaaagga

SEQ ID NO: 100401 - DNA, 216 bp, Homo sapiens
tcggagtttctggaaactgctctctgtcacatcccacctagctagaatctgactttttctcatcactcggccagggctgccatcagctttcgtctagattactccaactatcctaactgctctccagtttctgctcatggtgcactcctcaggagtcatagtcatccttattttccttcctcttctcaaaaccctccatggttcacatccctcctt

SEQ ID NO: 100402 - DNA, 1150 bp, Homo sapiens
aggaaattaacccatgaaggaaagaaaacttggaaaaataatttaaaaaatgattgttttttaaacataaatcatttttaaattattgattccaagggattgctgataataaatttgttcaggctgtgttaagacttgcatctttttttttttttttttttggaacacggatttccgccactaaacaacccgagggttgtggccgtcaaagggcccctcttttggagcacacatgtgcacaccctccgcacctccgtgggcacccggaggggtacacatcgtgtgaccctagaggagctcgcgtgaagtataccggggaaatggacagggacatgtgatgcacccacaacacggtggccaaaaatagcaggagaatcaaaggcgcaacgacaaccaacgagttgcacacaaagagatgtgatccaccagcgagggatcacacaacaagagccaaccacacactccctccgagagatcagaacacacaaaacccaacaacgcgcgagggcaaacacacacacagagcagaacgaagatggacacaattggaacaacgacgactgagagcgagtcaacaacacagacagaaccacgaggagcccacagctagtaacagcgagaataagcacgacgaaaaaaacgaaacacatccacagagcgaaagacaaaaaacaatcacaacgcgctttcaagaaacaacgaactaaacacacaacgtaggccgctgagtaaagataaaaaagaatcacgacaaccaaagaggaagaagtagaccacacaaagacagggcagaaagcgcgggcatccaagacgcgacacacaaagcgagtcccatccgacaacccccctcaggcaaaaggagggactaaggaggcgacacgtgacacaaccaaccgacacgaagggtgtaccagacaagataacgaaaaacaagagcgaaacaaccaagacaaacgagaacgccgcacgtcacaacacatcagaagagaagaatagcgggagaacaaacatcgcctaaacgcagagaaccgacaacgaaaagtaacaagaacaacaaaacacaccacgagcgacacacaatagcgcaaactacgaggggacacaacacatcgaagaaacaaccacgacgacaaacaaaacacaaagcaga

SEQ ID NO: 100403 - DNA, 552 bp, Homo sapiens
tttatctaaaatatatattattatatgaaattcactttacgaatatttatcaattttgagctgaaatgcagttgcacaatctcggctcactgcaacctccgcctcctggattcaagcgattctcctgcctcagcctctcgagtagctgggactacagaacaagattgtgtcacatgacgatgctcaacaaggttcaatggttaaatgaaggaagaaaacaagaggactttggcataagatgcacagcgaagaagaaatatatatgctgggcttgctgaagaagctgtaaaagcgaaaacagagccccaaaggtaatatactttgctctctgtgaagccctttgacttgaagaaatagtgatctaagataatgtcctgccatccagaagaattgtaggcacgggagagattgaaattggtgtgtaatgttattgcttccttcatttcataactgtaaagcaatgtgctaatcaaagagccagtctgtgtgcacatgcgagctctctgtctgggaggcagacctgatgcagaccagaacccctgctttccaggt

SEQ ID NO: 100404 - DNA, 370 bp, Homo sapiens
gcacacggcagggctgagagcaaaactcagggtcatgtccggattcccaggccggttactgcctctctgaccccagacgtctcatctgtcgaatggggacatttgggaacagcacccactctacgaagccaccatggagacgaaagagccaatcgtctacacgggcagtgtagaacgggcgcctggtgagtgctcagggatgaccctcctcggtagctgccccacagaggccaacaccgcccgcaccgtagccactgcccccaagtccgcctggagggaagagagcaggtcacgctcacctgattctgatgaatcagctggcctgggtcatgcctctcagggagaaaacctttgagtccacagagctgct

SEQ ID NO: 100405 - DNA, 796 bp, Homo sapiens
agtaacctgagttctcttttgttaataatgaaatttgttctcttttcttaataatgaaatcttcccaaatgtttagccagtatttgtgaaaaacatggtttgtgcctcctcccaccactgccattcctgcaagggaacctgccctttgctgaagtagaataggataggttaaatgaatgaggatcattagataggataagttggaataggatgtatctccatccccaatcctttgtggtttttttctcatagtgtatctttgcctgtgcagaggcccgtgatctccattgatgaaccctttgatagatttgattaggaaaaacgtggtggggaatagaacaactggaaaagggatttgagttaaaatgtaaagacctggctttgaccactgcctctccccttattcactgatgaccttacacaagtcatctggcttcacaagagcactagtcacctaacttgttaagcaaaggtaaacatgatactttctgtacagcgttctcaagttttcctaaagagcaagtgaaataatgaatattaaaatgtcatagaaggccaggcgcggtggctcatgcctgtaatcccagcactttgggaggccgaggcgggcggatcacgaggtcaggagatcgagaccatcctggctaacacagtgaaacaccatctctactaaaaatacaggaaaaaaaaaaaggtagccggatgtggtggcaggcgcctgtagtcccagctactcaggaggctgaggtgggagaatggtgtgaacccaggaggcggagcttgcagtgagccgaga

SEQ ID NO: 100406 - DNA, 317 bp, Homo sapiens
cccccacccccccacctcccgccttcctttgtaaatcaagatttttggtttttcaggtatgaaactaggttttccatctagtgccactgattaccagtagctcatgagagctctgtgcttgagtagagttgtaaagccaagtcctgagtttgtatgctggtgttagatcatgctgactgcccggagtgtggtgtggagaaggagacttgacagtgccctcagtttcccctcctgggttacctgatcctcaactctaatttttaatgtcaaaaagaaggaaagatgaaggagggacgaaaagagtgggagagaaggag

SEQ ID NO: 100407 - DNA, 404 bp, Homo sapiens
agacggggtcttgctatgttcgtcgtgcttatcttgaactcctatgctcaagcgagctaccacacctgacccaagatgttgagtcttatctaggttcaccctgcaagtacgtggtggagccaggatctgtcggactctggagtccaggtttgcagagagcccccggctcatcctggcctctccagcatctcacttcctccctgcaggcacgtaggaccggcctcagctctgtcaagatctgcactgtaggaccccagagatttttttctttctttgggtagtcagacccatctgcaaaagttttgcaatcatgaaatcagatagcgtatgaaatgctaggaataagcgcaggtctagcataccacgcggccagcggtagcgtgacctgacaggaggagtgcgtc

SEQ ID NO: 100408 - DNA, 481 bp, Homo sapiens
tgcaagctctgccttccgggttcactctattctcctgcttcagcctcctgagtagctgggactacaggcgcccgccaccacacccggctaattttttgtatttttagtacagatggggtttcaccgtgttagccacgatggtctcgacctcctgacctcgtgatctgcctgcctcagccttccaaagtgctgggattacacagcatgtttcttataattaaaaatgtgatgccagaatttgagcttatgagatgaaggagatgtacttttccctattcctcctggtaagtacaactaaaaaccctggacattatatgtaaaatcaataactaggtaagaagattctgagaggtggagagaaggcagacaggaggctaggaacctcaacacacaagtaacaaaatgataaggagttccaagttaatgttttgcctcacatatgccagagttggaactgaacaagccagcaaactggaaacac

SEQ ID NO: 100409 - DNA, 187 bp, Homo sapiens
tttgggacaggaagtggagaagtagtaaatcgataggttgggactccgtggaatgagggtaaggggcccagagtggatgtagaaagcagagaggggtgaaagatgcttttgaaggaaggtggcttggttggctttgcgttgatttgacatcctgggatggtagtactcatttttctttctttttttt

SEQ ID NO: 100410 - DNA, 363 bp, Homo sapiens
ggggtgtgggtgggtgctaaggtgggtttctccctgaaaacctgtccagctgtcgtagggagggctgctgagagcgtggggccctgatgcactatgaggatcagagtacctcctacatgccctggggcccactgagagcttcatcctcccctgctcactcacgggctctgctccagctcagctgccatccggcttcctgctcacagccttgcatctgtgtccttctctgcaggccaaactgcaccttttctttccttcctatcctcttcagttaatgaaactggaccccagctgcttctcatctcatccccctaaaccaatcctcctggaaaatctcctgtctccagggtagtctgtgcacca

SEQ ID NO: 100411 - DNA, 336 bp, Homo sapiens
gacaaggtttcaccatgttggccaggctgatctcgaacttctggcctcagtgatcccccccaccgccttagcctctcaaagggctgggattataggcttgagctactgcgcccggttacaataagatattttaaagtggggcacagaggctcatggttcaatcccagtactttgggaggccgaggcaggaggattactttaagccagatgtttgagaccagccacaaaattagaccttatctctaaaaagaattttttttttaattagctgagtgtgatggtacatccctgtagtcctagctacttgggagattgaggtgggaggatcacttgagc

SEQ ID NO: 100412 - DNA, 314 bp, Homo sapiens
tcaaattcctgagtccaagtgacacacctgcccctgcctcccaaagtgctaggattacaggtgtgagccactgtgcccagcatatttgatatttcctgatagcagttatcacctattttgttgggtatatttgtcttgacagttagattgtgatctcttttggggcaaacacttttattggtggtgttttgttttttatacagtgtctagcatagtaactgttaaatagtatatagtcaatagatttattatagctaggtagatgggattttaaaagtactaaacaaagttcaattgtagttaattataatgaa

SEQ ID NO: 100413 - DNA, 592 bp, Homo sapiens
gcaaagatactcctattaggcattatgtgtcgaagattacctcccaggagtctaggacaaaggtcagacctctttttggtcaacgttaatttttatttgaaactatacaacattgccatcactctgatatcctttctgttttgtcttcaaaataaccctaattggtgggtaaggatattattataaacaagatctcaagagggaagacgctggggcaaggttgcacagtcgatcctggactcatggtacaagactctttccactctctgagagccctgagtcctgagaagatggaaacaaggaggccaaggcaggtgaattgcttgagtccaggagtttgagaccagcctgagcaacatggtgaaactctgtctctacaaaaaacaaaaaaaatccagcgtggaggcatgcacctgtggtttcagctactcaagaagtgaggcaggaggattgcttgagcctgggaggtcaaggctgcagtgagctgtgattgcatcattatactccagcctgggtgacagagcaaaaccctgccttaaataaataaactgaataaaaggaaacttgtggttaaaaaagaaaaaaaagaaac

SEQ ID NO: 100414 - DNA, 231 bp, Homo sapiens
cttcttccatttttcaccatttcaactttcccccaccccaatcagtaactggtaaaaaagatctgaccatgagttcattattgggaaaatcttacaaaatgctatatttcaagctttttctaaattggatacaactttgcatttccactatgtttttaagtcccctccttaaaaatacacatttatgtacaaataacaatactatattttgcatcttaaaagtagactgcc

SEQ ID NO: 100415 - DNA, 187 bp, Homo sapiens
gatgtgatcgtctagagtacgatggcgtgaatgtgagccaggtaccggtcgacggatagacatgggttggctgcaggctgggcacaggtgggttaggactttctgctcaaagctcttccaatggcgttctctctggctgcaagtaccggggccatttgtggctcaggacaagtgttagtttttgcca

SEQ ID NO: 100416 - DNA, 696 bp, Homo sapiens
gccaaaggatcaccagctcattggcctcttggtagagctctccctctagggtggtacacaaatgctaggggacagttgattttgtggttctgcatgtgagtctctctcctaaacagtgttgtttttgttgtattttttgggtcaattgggattatggttttctttgaaagattgaacccaaaggatccactcatcaactcacaaactaagagcttctgccaggtttttttaaaaattgaaacattctttttcttttcagaaatctacaggtaaaagaaagcttttctaaagaactccctaagttaaactcagcagaaggtatttttaagataattgacttctccttttacagtatcccagtagtggcagtgattaaaatcaacacacaggtctctgtatgtttgctgctgggtagcataagttccaacaacattaattaaacaataacacttgagaggcaggcatttctagggatcaataaccattttgagggacttggtataatacaaaacctaccagacactaatcctctggatgtaccgtgttgccactatcatcatttttatgagaagggaagatacgttaacataattataaaaattgtttagcacatgatgaaattgcagttggtattgccagagtgcttcctaaaaacatacgtcctcagcgcctagcaaagcatcatgggccagctgt

SEQ ID NO: 100417 - DNA, 246 bp, Homo sapiens
gagagtgtgttgggccagagaagccacagtcaagactaagttttctctgggtgacatagaaacctgctggtggggctgagcagaggaatgccatggtcttactacatttgcctttataatgagcagggcctaggacacccttgcccttagtgcctctgcacccctaatgccagggcagagatgagttccctgaaacagatgactgttgatccgtgttgatcaaacaaggctctggatgagaggtca

SEQ ID NO: 100418 - DNA, 277 bp, Homo sapiens
ctacttgggaggctgaggaaggagtatcacttgagcccaggaggtggaggctatagtgaggtatgatggcaccactgtactccagcctgagtgacagagggagccactgtctctaaattaagaaaacaaaaacaaacaaaaaaagaaaagcatatattgggtgggtctggtggctcacacatataatcccaacactttgggaggccataacagggggatcacttgggcccagcagttccagaccagcctgggcagtatagtgagactccgtttgtac

SEQ ID NO: 100419 - DNA, 449 bp, Homo sapiens
cactctctaacgccctcacagttattttatccaagcctaccagcctgtaagtcctgtgagggcaggaatctgtctgcttggctcatccattttccattgcacctagcacaggctagtaaacatgttaaacgaacacatacctccattcctctcctcctaagtcctctgtctaggtaagctttaatggctgactgaggataactttttgaaaagtttccttagactgactaggactcaaccaaagacaggggagccatgaaagctcagggacaccgtagactgagtggtcatagtgattttttccggagggagggacagggctggagtgcagtggcataatcacagctcaccacagccttgacctcccaggctcaagtgatcctctgtcctcagcctcccgagtagccagcactataggtgtgtgccaccataccaggctaattttttta

SEQ ID NO: 100420 - DNA, 625 bp, Homo sapiens
ctgttcctgatttgttccttggcaggactctagagctgaaagctgctgagccttgtgatgcctcactgtcctcattagaaaaactgagctgatagccttcttagtagggttatgagatttaaatattggtgcttgaacaggatagcatctggtatgcaccagatgctaaactcatttctgtctgtcatacatcccagctgctgttgctgtgtaagaggctgtggtgtgagacaacagcagccttctaattttctcacatactctgtggatcaggagagctcacagcagcaggcttagttctgttgctggtacctggggcctcggctggggagacttgaggttcaggaggtggtgactcatgaggggctgcgggagccgtgcctctcacgcacctgccctggtgctggctgtgagggacccctctgggcccgtggctgtggcatctgctgtgagggaccctctgggcccgtggctgtggcatctgctgtgagggaccctctgggccgtggctgtggcatctgctgtgagggaccctctgggctgtggcatctgcaggggcctctccccagggctgcttctcttcctcacagggaagtatctggagctgcagcccaggaggaccagg

SEQ ID NO: 100421 - DNA, 828 bp, Homo sapiens
tgcctggctaatttttatatttttggcagaggcagtgtttcaccatgttggccagggtggcctcaaactcctgacctcaggtgatccacctgcctcagcctcccaaactactgagatttcagatgtgagccactgtgctcggcctaattgtacattttaatataactaaaaatgtaattggattgtttgtaacacaaagaataaatgcttgaggaaatggatacccaatattccgtgatgtgatttttactgattgagtgcctgtacacaatatcttatgtatcccatatttgtgaataaatatgtattcacaaaaattaaaaatatttaaaaaattttaaaattttttaaaagaatatgagatagtctcatatagagggtgaccagtgctgttagagaatgaagtagctactaagataatgttatgcttgccaaaaagtactgatcttgttcaaatgaatgattgtgttagttgaggtaaatgcagtacagagataaattggaattctggctactttatatactagttttataagcttaatgaccgagcctccacttcctaatctataaaaatacattatagtggccacattacagagctgctgtaagcattggataccatgtaaagcccagtgtttactcctgtgcaggcactgaaatattaggtgctatgttgatggtaatgagagcctctgggtcctggagaaccttgggtgaattataaaggactagttgcagagaaaagccaaggtagtgtggccaggaagaaatagctggcaggtaataatcaaattattttatattactgacagaactggagttcataca

SEQ ID NO: 100422 - DNA, 276 bp, Homo sapiens
gacttctccaaaagatccctgatgcattcaatttacatatgtgcttcctctcagccatatcctggtctgaataccagcaatgtcacttactagacagactttgctcatgtgcttttacaagataatacaaacttctgaatgtgtcatgtcctgatcatttaggctaaggatcaatgaactcaaatgtataaggaggccaaagtagctttgtcaaagagcaaagccggctctgtggaaaaaacgacagccttgaggacaatgacaaattgcagtcaa

SEQ ID NO: 100423 - DNA, 433 bp, Homo sapiens
ggctgtgacctgtcttctatccactcaggacactaaaatgtcttagacttacaagagtttacgtaccttttgcattttctctgagcctagtagccttttagacccaggcaacttgagtccttgctctgggactcatgtctgcaggctctgctgcccttgttcttgtgtgcaagtaccaaatatgaggcatgagcagaaatccagggggcctggccccttagcagaagcctgcctttcctcaggagttggacacagcttctcaagaacgcagcatattgtgttgtttctgccaggactcagcgtctggcctgtcatagcagataaaccttgccatgtctaaagggtacccatcttggggcatggataatccagggtgccgcagacaggcaggtcccaggagagagatggtgcccggaggaagggatgggggagc

SEQ ID NO: 100424 - DNA, 286 bp, Homo sapiens
gagcgggcagtgagaaggactttgtttttcagcttgagtgccagccgagccacagtagaatagagcaccaggtatcttcctgaggttcttgactgcaggtcctggttcccagatgccatctttggaatcccccacagccagggagaacctgtcaccctgaagggaaggacacgagcctgcctggattcaccacctgctgactgtagagcccttgggccttgagtaaacataagcagtagtcaggcagtggtcaccatgggccttggtaagacccagtgctgtgctg

SEQ ID NO: 100425 - DNA, 314 bp, Homo sapiens
  misc_feature (2)..(2): n is a, c, g, or t
tncgagctcgctacccctccctgagggctgcagttgctggctgtctttctcggctggtggggaagagctgccagggaagccttcaccccaccccagcacaactccggctctcctctgacagtggcaactttcttcttatataattcttggtgtttccttcaccgttgcacataattttaatgggtaaaagagccaaagcagtctttaaggaaaaactcccacccttggctctacccaaacctcctgcgaggtcacactgcgaggcttcaggtgaagcaaacaggggactttttttccttggctgagaaagcagc

SEQ ID NO: 100426 - DNA, 924 bp, Homo sapiens
atcacagggttcaaacagtgtcctcctagaaagagtgggagagcagctcacttctctgtgttctgcctcccctctggtctccagagttttcctgtcctctagaggcaagccaggccagggagctgggagcgagcaagctgaggccacgtccacaaggagcttttcatgcccctgtgccgcatagcctcacctctttcctccagagtggctctctgcggccctgtgttcctgctacagagtgttcttttctggagtcaggatgttctcggtcaccctcctggttctgccctgtcccattccaccccaccccagggggaacagtagcttcaccttgttattcccattgctctcctggctcactcttacggtcggtctccagtgactgaagcattccccacccttggaatttctcatcttctgcctcccttcctactccttttggttttgtggggagaggggaaggatcagggggccaggccagcagctcgggggccacaaggagatggataatgtgcctgttttttaacacaacaaaaaagcctacctccaaaatcccctttttgttcttcctggacctgggcattcagcctcctgctcttaactgaattgggagcctctgccacctgccccgtgtatcctggctctcagctcatggggaagccacatagacatccctttcttcccttgcacgctcgctagcagctggtaaggtcttcacaccctgattcctcaagttttctgcttagtggcactgacattaagtagtggggggacagtccatgccaggacaccctggagtagccttcccccttggccgtgggcaggccctaactcactgtcgctttggagttgaggtgtcttttttttttctttctttagttcctgtattctaaacattagtaaaaataaatgtttttacacaga

SEQ ID NO: 100427 - DNA, 428 bp, Homo sapiens
ttctcactaatctgttcttcccttctggcgaaaagaatctgagaatgttttaaaatattccctgtgttcccaccaacattctcaatcctaagaaatctccctctgcctcctacgagggaagcaaagttaacacttctaaggagacctttaaaacagaggaagtacaaattgtcataagcttttaggttacctattaaaacgagttttaatgttctagctatttttcctacaaagtacgaagcatttaaagacaaaaataaggtcagtcagccgagcgcagtggctcacgcctgtaatcctaacactttgggaggccgaggtgggtggattgcctgaactcaggagttcgagaccagcctgggcaacacggtgaaaccccatctctactaaaatagaaaaaatcagccgggtgtggtggcgggcgcctg

SEQ ID NO: 100428 - DNA, 1162 bp, Homo sapiens
gggaatgataatcaaatgattcagcctattgttaattttgggtatgcaaaggagaattataacaccatactttggcataaggtagagattaatacataacacggtataaccttcccttcccaacagtattagatgggctgtctacttgggtgatgaatttactcaggatgagggcaggaattcaggtgaaggagaaagactgtaagccaagtgtcaaagtctttaacatctttaataaattaagtcttgaaagactatgcatatgctacgtacaggggagcagatattctagaatgaggatccttctcttttctctatcagctttcagtctaaaaacatgttatacaaatgcagaagtaagcagcctcctaagaaaaatgagtagtgttttccttcattcatcaaactactctttattactgctttgcagacttggcaagaacctctggttcacattttcatccaaaggctcgattttccccactaaagaggaatggagaatgaaattacctgctaattcaagcaagaaaaatatcagctcttattctcataaatttgtgaaaataaattacaactcgattgccccagttctgatttgcaaacatctggtgagaccactaggtatttacaagaacagagtagcatgctatttcctgacaggctgccctttacacaaagaatgttcactttcaacaaactcaaaattactcttactgatggcttcagaatatcactgtctacctcagaaagcggaatgttttgtacaaatcataaataagtggctagacggacactatttggtcatcaaatgatcaatgtagagggcagggggaaattatttctgcagtaccaaccatatatctggtactgtgcaaagggaaaaaggaaatgggctgggaatggtggttcatgcctatcatcccagcactttgggaggcccagctgggaggatcccttgagcctaggagtttaagaccagcctgggcaacattgggagactccatctctacaaaaataaaaaaactggtggcaggagcccgtagtcccagctactcaggaggctgaggcaggagagtggtgtgaacccgggaggcagagcttgcagtgagccaagatcgcaccactgcactccagcctgggtgacagagcaagaatcattctc

SEQ ID NO: 100429 - DNA, 405 bp, Homo sapiens
caaaaaaagagtatagagaccatggaacccccagatgggaagggagagtagagggagcctgaaatgggctttgaggcgggatgccaccacagactgtgtaacttgggcaactgtcttttctgatctgaactcagtctgcacagtgaggtgtgggagaggatatcagagcctgtgatgtcttcccccaggtggaggaagggttcctccagcatggactggagtcagttaacaaatattaaaaagcactcaccgtgtgccaggcagtggggaataagaccaatgagctatgtcacagtgggggaaaacaggcattgaataaataagtcaataagggtcattttaattataaaaattatatagaagtataaataaagtccatacattcctgagtcatgaaaaaaaaaa

SEQ ID NO: 100430 - DNA, 613 bp, Homo sapiens
agataggaatttgactgtttggttatgaatagaggtgtagagtctgaagtagcacctgtactagaaaaggggttgggaattgaataactaaacaatgtggaatactagctgtgtggaatgctgtgcagcagttaagaataagatgaattgataagcactgacatttttggaaagatcttactaaatggaaaaaagctatagaacaatgtgtgtagtatgccatttataaatagattttaagttatatttttctgtgtacatttacatacaaaagcatagtgtctcagaagaaaaggtgtggaaagataatacatcaagtttataagcatctttacctctggaaagcaatgtgggaactgaggaaccatgaaggtagacttttggtttatattctctttgcttctggatagtttaaatttttagccaaagaatatatttatgtgttggttgtacaactaaaaaataagttttattactggaaagggattgggaacagcttgtggggggctgtaatctacaaaagccatcttcagtaccaggtttaattccatcattgtttttcgggttttaggtctctggactattgtcctttaacaacaacaacaacaaaaag

SEQ ID NO: 100431 - DNA, 412 bp, Homo sapiens
ttaacgcctcagggaaggatgagaatactcaggattctgtgctgtaagacttacactgttcagcagtagttaagctgcttcttctggaaaacgtctagaaataattctttcatctatgattgtgaatagtaagtaccacaattatctggtgatctgtttgcatttctatgatatatccacaagtgaaggtacatttgggttgtggggaagaagcacctcccacattccctcaataatagtgaagggatgttgcattgaaaggttcttctgaaggtgctgttttggggaacaggacagcacatttgtatctgtgtgtatttgtgaatgtgtactgtgagcatcactgccagaaaatgattaaagggataaaacaaatgccatttattcctaatccaagctttcttttaatgta

SEQ ID NO: 100432 - DNA, 217 bp, Homo sapiens
aattaaataaaatgttggtatatctgactacataaacattttgcatagtcaaaaacatgataaagtcaaaagacaactgacaaactgggaggaaattttggcagcatgtaccacagtttaagggctaattccctatataaaaagaagtgttaaaaattgaggacaaaggaccagaaacctgataggaaatgagaaaaatacatgaaagacaacccac

SEQ ID NO: 100433 - DNA, 705 bp, Homo sapiens
cctgccatgcgccttcggcgatttctctgagaaacggttgcgttgacagtgggaggcaaggctgaggcggagggacacggagtcgggatcctggagaactgaaatggcgcgttggttactcttgagggagtaaatcagctcactgagtcatcattccaccacaaaaacctgtaaaaagcctgtgctgtggaaaagggctcacttcagaatcaagggcctgggtccacctcgccatttttctgaaggttggaggctctgtccagggacagcggaaattcgaggttcttggcggaggaggagcatttgccaattggggcgggcttttgcccctaccttgagaccttagtgctgtagatgagccaggaaaggtatttgaggggagagtctaggtttctgggaatggagagagtaggacattgtgtgtttccacgcacatcgtttgggggagaaggggttccccgtcgctttgtgcaacatattagtagggtgtagtaggggtagcaaccaagagacccaaaacagtcctgcttaagaagaagccgcttaacggtggattggggaaaaatactctagtgcgctgcattttgaacaggaaggaggtttaacgaaagtgctataaaacctttctgaagaacggggcttcataataagcactaaggtatttagtgtctgtgttgtgcaggacaggtagtgggagctacgaaa

SEQ ID NO: 100434 - DNA, 380 bp, Homo sapiens
aatcctaatgtaaagttaataatagtgtgtccatattggttcatcagttgtaacaaatataccacaccaatgcatgatgttaataatgggggaaactgatgggggtggttgggaatatatgggaactctgtactttttctctcacttctcctgtaagtctaaaattgctctaaaaattaaactctattaatttttttaaattagcaagaaattatatgaaactcaagtttcagtctttacaaataaaattttactagaacacacacacatacacacacacacacacacacacacacacacacacacacacacacaccccacacacacttgcctggtcctgctctccctgggcctccattacacagacacacacagctgta

SEQ ID NO: 100435 - DNA, 404 bp, Homo sapiens
acggtgctaccacgaggaccgcctgcttcatgcacacggcccccctgcagccactgagcgtgcaaaggctggtccacccttcggcccagcctcccctcccgcctgtccagcagaatcagggcacctgattccaggtgaccacaccagtgagaagcgtgcaggagctgggaggagcgggatgcgggtgccgagtgaccgtgggttccaggaattcaacagctcaggatctcctgttcctcccaagaacccaggccacgcagggtaggtggagggcgggaagggtgggtggtgcaggcaagaccagcagctcctgacacaaatgacagctacagctggctgcagggagtgaccccaggtgatcctgtagaggtcacacctcacagccccaaagctgacgttgagga

SEQ ID NO: 100436 - DNA, 611 bp, Homo sapiens
tgttcagagttctgaatcgttgcgagtcagttacaagctgaaccactagcgtctgaaccctatacatctgaagccgggatgaaattcaggagttctattcccccttctccttttaattgtcatggtggtgtctttcgaccctagcagagaatatgtggtcgatattagaatcacctggggagattttacaaagcatctatgcttgggtttctttggagccaataggaaaaaaatgaagaactgtgtacaatggtgactaaagagcctcagcatgacttccgcccctcagcgccatctataacctgttttaccatgtcggatcccgtctggagaagcccaccgagtgcaggtgaaccagggaggcgaagtccatagaaacagctgtcttgggggtccgggaagagtttaacactggaatcacatctgcggaaaccgggaactggaagcaaattgaggatgcggccagaagggaaaatcaagtttttcaagcaatgaggttcggccttggcctaaccaatagtttctaccactctccgcacccctaaaatttccatctattcatctggttccagaaacagattatccagcgtctttgtagatctacgaatatc

SEQ ID NO: 100437 - DNA, 436 bp, Homo sapiens
actctgccacacacattgcagtgcagtggcgcagtcttggttcactgcaccctccctgtcccaggctcaaatcgtcctcccacctcagccttccaagtagccaggaatacaggtatgcactaccatgcccaactaatttttaatttttttttagtagagatgaggtctcaatgaagcagtgttgttgcctggggtaaatacccgggttcatcatctcgagccaagaagattaaggacatgaacacacatgaagatcaagggagaagcagtgatgttttagtatccagaaagtggaaataacccaaatgcccatcaacagcagaatgaaattgtactatattcacaccatggaatattgtatagcaaagagaatgaatgaactattaacagaaaagacatggacaaatctcataaacatgatgctgaaagaaaccac

SEQ ID NO: 100438 - DNA, 331 bp, Homo sapiens
tttagctttcacactgaatatagagtagaaaaaaatagttactttttttgttggatagttggtgatgactggaagtaaattcgaagaattttcttgatggatttacaagtctgatttggcttttccctggttgtgcattcattttcttctaaagtttaaacatgttgaagtggtttttgcctacgtaagctatatatcagaccatgtctgtgtttcaagaaatgacacgtgggccacaggcatggtggctcatacctataatcccagcatgttgcaaggctgaggtgagaagattgcttgagcccaatagtttgagtctgcagtgagccgt

SEQ ID NO: 100439 - DNA, 144 bp, Homo sapiens
taccctttgacctagaaagcccatgtctaggaatcaatcccacacaaaggctggcaaaaatacaaaatgacattggcacaaggtcactcatgcagcaccatttgtaccagcaaaagattgatccaaaacaacccagatgttcct

SEQ ID NO: 100440 - DNA, 374 bp, Homo sapiens
ccttctcttctttgaactctgtggctgagctgtctgggtggtcactgtgtctgattgattcacagatcaaggcaacccctgtaagagccagaaaggtccccagtgaaatccagtggtaataaaacagatgttcctggatcttcttgtgtgtccactagatacctgtgaaaagaatgggcatgtttaaaaacaaaacaaaacaaaacaaaacaaaaaacaaaactcagaaaattggcaaattttagttttagcaattagacttaagctcccttccaaagctacaatgttttagtacaattattaagtagcaaaattgacttatttgaatttcccatccttcctctggctttgaaatattctctactgaatggagt

SEQ ID NO: 100441 - DNA, 342 bp, Homo sapiens
ttattacttttttacaggagagaaaactgacacagagagattaagtaacttgcccaaggtcgcacagctagtgagtggcaggatctggattcaaacccagacagccagctagcctggctgcagggtccatactcctaacccatttgctgggccacctcttatgcacacacacatgcctcttctcatgtgcgtgtcagccgcttcttgtgtcaggggacgaggaagtaggcttatctgtgcacactttctcctgtgttttaaggatcttttgaatgtctgtttccttgtttggggatgtatggtgtgggcgtggcttcacattaggaaacattttctggacat

SEQ ID NO: 100442 - DNA, 361 bp, Homo sapiens
ttttcacttccctctgtttggaacatccttcctctacctttagaattcactgtctctcttcctgcaagactcagctcaaatgtcccctcctccaggaaacatcattttccccactggctatccacagtacattatcatggctcctgttgtttccatgtctctctgccagcttcacagtgagcccttgatggtatggattctgatccccccaagtataatttaacattgtacttctcagtcataggagatagtaggtgcataataaatatgtagtaaatggatgagtatataaacaatgaattaggatctaatgaatgaggatctaatgaatgaatgaggatctaatgaatccagtagttgc

SEQ ID NO: 100443 - DNA, 692 bp, Homo sapiens
aagatttgaacattttaaggttctgcaaagcaacaagaaaaaccaaagctctttttgagattggttccaacaatgttagattaagctaaataaaccagttacaaggtcacaccattaaaagctaaagccaaactgtctcaaacaaggatagaagccctcattttaccacctagtgtgaaaattgtttgaggccaataaagaaaaggaagaagtggtactctcaatactagtgaatgtattgacgttatattggatgggataaagatagcattaatccagattattatcaaatgagtcaggttttatttcagattgatgaatctatacacattagaaaatgctgaattgctgtatgagttatgattcctaaagagaaattcttggaaaaatatcagttctttgtaaagaagtaccaaaacaaattactggggatgaaatattgaaggtggtaaattcatactttgaaacaaataaagtatggaaccaggcttgagtttgtacactgatgggtgactgcaaaaaaaggcataatggcttcacatcaagggtattgtgaagacattgaataggattcaaataattcaatgttttattgacagagaaactcttgtgtaatatacttttcctgtgtaagagttccacactctgatgtgtctaaatggagaatctactgcaactgaggctgcttcact

SEQ ID NO: 100444 - DNA, 494 bp, Homo sapiens
acattcctcccacgtgaagctgcaggccactcgaaggtgagcctggtcccagttttttttcatcagcactgagcacaatgcctgccaccaaggtgccatggaaaagtgtttcttggatggacacataaattagttacttagttaattcattgattcatcatttcattatagccctttggagggagtaagggtaggtgttattgctattttgaggcaggaaaatagggtctggaagcagggaacataagactgattcacacttcagctatgacaggaaatatcctctccatttacatggggcattcaccgagtaaatgactttgttactttacttcatcctctccatttacatagggtgtatgccaaataaccaatggaaacctctagaggatatttaaacccccaaaaaaatctgtcatgggggcccttgaggcccctatgctcaggcccactgccacactgtggagtgtgctttccttttcaataaatctctg

SEQ ID NO: 100445 - DNA, 275 bp, Homo sapiens
agggcaaggttctgctcaagtcgtgtccgccgggcacccacaagcccagttagcagggcccactggcgcaggacgctgtcacgctgggctgccacccgccggatatcgtagtagccttcggctgccaatgcctgggccagctccgccacaccctgcacccgctcctcgtaggccgcaatgtctgcctcgatcgcttcgtgtttcttcatggctgcctccactgcgggcagctcatacctgggagaccagacgctggttctcattcagccagctct

SEQ ID NO: 100446 - DNA, 353 bp, Homo sapiens
gctaattttttatatttttagtagagatggggttttactatgttagccaggatggtctcgatctcctgaccttgtgatccacccgccttggcctcccaaagtgaaacttttctttaaaatagagatgggatcttgctgtattgcccaggctggtctcagactccttgccttaagcagtcctcccacctcagcctcctaaagtgctgggattacaagcgtgaagcattacatccaagtgaaacttcttgagatggttacataatgtctaaatctgctggtgtagaagttaataaagtgtagaactgaataaatattaaatattagatcaagtttctcatgtttatcttaacgta

SEQ ID NO: 100447 - DNA, 541 bp, Homo sapiens
gtgtgtgtgtgtgtgttttacagcaaagacctggatcctgaatcttggggagaaaactccttgcattgtacatattgggctggttacatggctgaagttcaccgtgtcattttaggcctgtttctggcttccacactggtttgcaatgtcatcctagggaagtcagcttgtccttggtaggatatattcattggtgagttcactcaagagactcctttttgcgtttctttaccttcaacgttcgtttcctaaaattgattattccttcataaagttgccagcattttcaacatgcttcctagatgctggatattttattatcgtttgtcacggatcaatttatttttttggcccttaaactatcacattttctgcagttaaatttgcttaactttctaatgcaggggcagaatgtaacctgcaggttgtggctttagaaagcaatgtggaactcggggccatggtaagcaagttggtggtggttttttttaatagcacatctcatcctttgatgtcagaacactgtctacacactctgatt

SEQ ID NO: 100448 - DNA, 193 bp, Homo sapiens
tccagaaccttctcaatcatttattttctgacaagttcagtaaaacttcatcttgaatgataagctccgcaaaggctccacccagactctaaactttgagacagtataagaagtagcttaaaagaaaatgtctctggtgtttttaaaaagtagccatcaagagaccattgctggctgggtgccgtggctcacg

SEQ ID NO: 100449 - DNA, 209 bp, Homo sapiens
agaactgccttgcaatgtctcctcaggggcccaagctgtcttcagcagaacactcaatttccctttaataaagggggtgggggccaggtgcagtggctgacatctgtaatcccagcactttgggaggctgaggcgggcggatcacctgaggtcaggagttcgagaccagcctgaccaacatggtgaaaccccatctctactaaaagtac

SEQ ID NO: 100450 - DNA, 466 bp, Homo sapiens
tcctaccagaaagggagagatggaagttataccagcaggagaaggagaatcaattgtagcatgagatttctaagaaggcaggaggggaggggataagtatacaatatatgtataaatttaattttcagtttgcttggtatatataagtacatatagagattaatagctcccctaataaagagagggagagatggtgtagctgggaccggagtggggagcgagaaggtcggccttaaggggcttatgggttttatgggagcctgcaggaagatgccagtcttgcctcctgtacatgggtatgagagaccaaacaagttctgcttgagaggacttcagtcaaagtggtgccctgaggggacagacaggtttcagtgaaggcaaggctatggagggaatgttggagaagaggttgaggatactaggggtggctggctgctcctggagtaagagcttagccaaattctag

SEQ ID NO: 100451 - DNA, 1073 bp, Homo sapiens
agactctaagtgaaatatagctccctaaatggctgcctgatatgtgagattttgcaattcagatttgagtttttgaatcacagggagctgaaaagggctttaaaattcatctaattcattatttcttatatttgctacttagaagaatcccttgaggccacttaaacaacttccttgtcctacctcatacctgccgaatcaaaataaccaggagataggttttatttttatttttataagttcttcctttgaatctagtgcagccaagttatataatcagccagactcttaggctagaaacaactgattcagcccaaagttttgtataatgcacagcacatctcctgcatgtttgggcatgtaaaacattggcttgcgctgacatccagatcaaccaacttcacaaccatgactcacgctggcaacactatgctacatccaaatggctttaacaagcacatcagtacacacctcttctgacaactacacttgctctactcgacccatggcccaactgcactacccttattggaactactgaaacaccctacacctgtgttaacatagccacttaacctcctacactccggaccaccttactactggcactacgtacgcgctgacacaacgactcgcacgaagtacccctccagctatccacgttcccttctcccaacgctggagtcccctttaccatggctttctctacctcacgacgctggccacagtaatgggacatcacacaccagcttcctactaccctcaaatcttccggcaccacaatttgtcatttgatcttgtaactccccccaccaatatctgctaacactctctctactcaccctacaaatccacaaaacgataccataacagcgtatgaaacgaaaaactagaaagggtaagcagacaaacactagaaacccaccataatccacttttaggccccaaccaaaagaagattaacaccagcacagagcaaaacaggataggccacgaacgaactcccgacaacatacacagtccaatacactcccaaaagatactgcacactagaaacgctaccatatgggccc

SEQ ID NO: 100452 - DNA, 782 bp, Homo sapiens
agcgcagaagggctgggaggtccccaccccaggccccctcatttccagtgaggcctgcagaagacccagaaaatttctcataggccctgaggaggaaaagaacagaaaattagtctgtgtgccaggaatctgggtgccacttaggcgggcctgctggctcagggtctctcacaggctgaaatcaaggtgtcacctgaggctaccatcatctcaaggcttaactggcaaaggatgtacattcagccaccctagatggttgttggcaggacgcaaactcctcgtgggctattgaattgaggacctctgtttattgttcttgtcagcccaaggctgccctgagttccttgccataaggacctctccataaggcagcttgcaacatgggaggtgcttcatcagagccagctggtgacagagtacaagcaagatgaaagtgacagtcttctataacctgatcttggaagtgacagcctatcatttttgccatattcttctcattagaagcaagtcaatagtcccacactctaagtaaggagattgcagaagggcataaataggaggagatggggattgctgaaggccaattcagaagctgcctgcctagaaccaaggagtatacgaagcatgcacaagatggttcatcctggcagaggaggaacagttcttccctcataaccgagctggagaggcacacgtggcagaaggtagaggtgcgaattcacagaaatcaaggatgtaagatgaaggtatgtcttccaacatacggcaacgtccagttgatt

SEQ ID NO: 100453 - DNA, 522 bp, Homo sapiens
atcttagggagccttaaccctactgaattcgtatactccaaggaacttatgggtcgaaaatttctctccaccttaagctatctctgaggtgcgtgagccaccacgccccgcctggagtggctttaaacaacaaaaatctattctctcacagatgcgaagtctagaagtccagaatcaaggtgttagcagagtcctgctcccttggaagcctataggtttccttccttgcctctggtagcttctggtagccccaggcattccttggtttgtggcacagcctaactccagtccctgctgccaccttcacttggccatcttccctctgtgtctgtgcatctctctctgtcttcacatggcattctcttttgataagacatggtgtcactatgtggcccaggcgggaccttgaagtccttggctcaaataatcatctcacctcagcctactgaatagctgggattacaggtgtgtactactccaccggtctgtcatatggaatatgcaggaaccctgcctagctac

SEQ ID NO: 100454 - DNA, 5777 bp, Homo sapiens
  misc_feature (3365)..(3365): n is a, c, g, or t
  misc_feature (3674)..(3674): n is a, c, g, or t
cgcgttgatcccatcggacctggactggacagagagcggctatactgggagctgagccagctgaccaacagcatcacagagctgggaccctacaccctggatagggacagtctctatgtcaatggcttcaacccttggagctctgtgccaaccaccagcactcctgggacctccacagtgcacctggcaacctctgggactccatcctccctgcctggccacacagcccctgtccctctcttgataccattcaccctcaactttaccatcaccaacctgcattatgaagaaaacatgcaacaccctggttccaggaagttcaacaccacggagagggttctgcagggtctgctcaagcccttgttcaagagcaccagcgttggccctctgtactctggctgcagactgaccttgctcagacctgagaaacatggggcagccactggagtggacgccatctgcaccctccgccttgatcccactggtcctggactggacagagagcggctatactgggagctgagccagctgaccaacagcgttacagagctgggcccctacaccctggacagggacagtctctatgtcaatggcttcacccatcggagctctgtgccaaccaccagtattcctgggacctctgcagtgcacctggaaacctctgggactccagcctccctccctggccacacagcccctggccctctcctggtgccattcaccctcaacttcactatcaccaacctgcagtatgaggaggacatgcgtcaccctggttccaggaagttcaacaccacggagagagtcctgcagggtctgctcaagcccttgttcaagagcaccagtgttggccctctgtactctggctgcagactgaccttgctcaggcctgaaaaacgtggggcagccaccggcgtggacaccatctgcactcaccgccttgaccctctaaaccctggactggacagagagcagctatactgggagctgagcaaactgacccgtggcatcatcgagctgggcccctacctcctggacagaggcagtctctatgtcaatggtttcacccatcggaactttgtgcccatcaccagcactcctgggacctccacagtacacctaggaacctctgaaactccatcctccctacctagacccatagtgcctggccctctcctggtgccattcaccctcaacttcaccatcaccaacttgcagtatgaggaggccatgcgacaccctggctccaggaagttcaataccacggagagggtcctacagggtctgctcaggcccttgttcaagaataccagtatcggccctctgtactccagctgcagactgaccttgctcaggccagagaaggacaaggcagccaccagagtggatgccatctgtacccaccaccctgaccctcaaagccctggactgaacagagagcagctgtactgggagctgagccagctgacccacggcatcactgagctgggcccctacaccctggacagggacagtctctatgtcgatggtttcactcattggagccccataccaaccaccagcactcctgggacctccatagtgaacctgggaacctctgggatcccaccttccctccctgaaactacagccaccggccctctcctggtgccattcacactcaacttcaccatcactaacctacagtatgaggagaacatgggtcaccctggctccaggaagttcaacatcacggagagtgttctgcagggtctgctcaagcccttgttcaagagcaccagtgttggccctctgtattctggctgcagactgaccttgctcaggcctgagaaggacggagtagccaccagagtggacgccatctgcacccaccgccctgaccccaaaatccctgggctagacagacagcagctatactgggagctgagccagctgacccacagcatcactgagctgggaccctacaccctggatagggacagtctctatgtcaatggtttcacccagcggagctctgtgcccaccaccagcactcctgggactttcacagtacagccggaaacctctgagactccatcatccctccctggccccacagccactggccctgtcctgctgccattcaccctcaattttaccatcattaacctgcagtatgaggaggacatgcatcgccctggctccaggaagttcaacaccacggagagggtccttcagggtctgcttatgcccttgttcaagaacaccagtgtcagctctctgtactctggttgcagactgaccttgctcaggcctgagaaggatggggcagccaccagagtggatgctgtctgcacccatcgtcctgaccccaaaagccctggactggacagagagcggctgtactggaagctgagccagctgacccacggcatcactgagctgggcccctacaccctggacaggcacagtctctatgtcaatggtttcacccatcagagctctatgacgaccaccagaactcctgatacctccacaatgcacctggcaacctcgagaactccagcctccctgtctggacctacgaccgccagccctctcctggtgctattcacaattaacttcaccatcactaacctgcggtatgaggagaacatgcatcaccctggctctagaaagtttaacaccacggagagagtccttcagggtctgctcaggcctgtgttcaagaacaccagtgttggccctctgtactctggctgcagactgaccttgctcaggcccaagaaggatggggcagccaccaaagtggatgccatctgcacctaccgccctgatcccaaaagccctggactggacagagagcagctatactgggagctgagccagctaacccacagcatcactgagctgggcccctacaccctggacagggacagtctctatgtcaatggtttcacacagcggagctctgtgcccaccactagcattcctgggacccccacagtggacctgggaacatctgggactccagtttctaaacctggtccctcggctgccagccctctcctggtgctattcactctcaacttcaccatcaccaacctgcggtatgaggagaacatgcagcaccctggctccaggaagttcaacaccacggagagggtccttcagggcctgctcaggtccctgttcaagagcaccagtgttggccctctgtactctggctgcagactgactttgctcaggcctgaaaaggatgggacagccactggagtggatgccatctgcacccaccaccctgaccccaaaagccctaggctggacagagagcagctgtattgggagctgagccagctgacccacaatatcactgagctgggccnctatgccctggacaacgacagcctctttgtcaatggtttcactcatcggagctctgtgtccaccaccagcactcctgggacccccacagtgtatctgggagcatctaagactccagcctcgatatttggcccttcagctgccagccatctcctgatactattcaccctcaacttcaccatcactaacctgcggtatgaggagaacatgtggcctggctccaggaagttcaacactacagagagggtccttcagggcctgctaaggcccttgttcaagaacaccagtgttggccctctgtactctggctncaggctgaccttgctcaggccagagaaagatggggaagccaccggagtggatgccatctgcacccaccgccctgaccccacaggccctgggctggacagagagcagctgtatttggagctgagccagctgacccacagcatcactgagctgggcccctacacactggacagggacagtctctatgtcaatggtttcacccatcggagctctgtacccaccaccagcaccggggtggtcagcgaggagccattcacactgaacttcaccatcaacaacctgcgctacatggcggacatgggccaacccggctccctcaagttcaacatcacagacaacgtcatgaagcacctgctcagtcctttgttccagaggagcagcctgggtgcacggtacacaggctgcagggtcatcgcactaaggtctgtgaagaacggtgctgagacacgggtggacctcctctgcacctacctgcagcccctcagcggcccaggtctgcctatcaagcaggtgttccatgagctgagccagcagacccatggcatcacccggctgggcccctactctctggacaaagacagcctctaccttaacggttacaatgaacctggtctagatgagcctcctacaactcccaagccagccaccacattcctgcctcctctgtcagaagccacaacagccatggggtaccacctgaagaccctcacactcaacttcaccatctccaatctccagtattcaccagatatgggcaagggctcagctacattcaactccaccgagggggtccttcagcacctgctcagacccttgttccagaagagcagcatgggccccttctacttgggttgccaactgatctccctcaggcctgagaaggatggggcagccactggtgtggacaccacctgcacctaccaccctgaccctgtgggccccgggctggacatacagcagctttactgggagctgagtcagctgacccatggtgtcacccaactgggcttctatgtcctggacagggatagcctcttcatcaatggctatgcaccccagaatttatcaatccggggcgagtaccagataaatttccacattgtcaactggaacctcagtaatccagaccccacatcctcagagtacatcaccctgctgagggacatccaggacaaggtcaccacactctacaaaggcagtcaactacatgacacattccgcttctgcctggtcaccaacttgacgatggactccgtgttggtcactgtcaaggcattgttctcctccaatttggaccccagcctggtggagcaagtctttctagataagaccctgaatgcctcattccattggctgggctccacctaccagttggtggacatccatgtgacagaaatggagtcatcagtttatcaaccaacaagcagctccagcacccagcacttctacccgaatttcaccatcaccaacctaccatattcccaggacaaagcccagccaggcaccaccaattaccagaggaacaaaaggaatattgaggatgcgctcaaccaactcttccgaaacagcagcatcaagagttatttttctgactgtcaagtttcaacattcaggtctgtccccaacaggcaccacaccggggtggactccctgtgtaacttctcgccactggctcggagagtagacagagttgccatctatgaggaatttctgcggatgacccggaatggtacccagctgcagaacttcaccctggacaggagcagtgtccttgtggatgggtattctcccaacagaaatgagcccttaactgggaattctgaccttcccttctgggctgtcatcctcatcggcttggcaggactcctgggactcatcacatgcctgatctgcggtgtcctggtgaccacccgccggcggaagaaggaaggagaatacaacgtccagcaacagtgcccaggctactaccagtcacacctagacctggaggatctgcaatgactggaacttgccggtgcctggggtgcctttcccccagccagggtccaaagaagcttggctggggcagaaataaaccatattggtcggacacagtctctgagcct

SEQ ID NO: 100455 - DNA, 5604 bp, Homo sapiens
  misc_feature (3365)..(3365): n is a, c, g, or t
  misc_feature (3674)..(3674): n is a, c, g, or t
cgcgttgatcccatcggacctggactggacagagagcggctatactgggagctgagccagctgaccaacagcatcacagagctgggaccctacaccctggatagggacagtctctatgtcaatggcttcaacccttggagctctgtgccaaccaccagcactcctgggacctccacagtgcacctggcaacctctgggactccatcctccctgcctggccacacagcccctgtccctctcttgataccattcaccctcaactttaccatcaccaacctgcattatgaagaaaacatgcaacaccctggttccaggaagttcaacaccacggagagggttctgcagggtctgctcaagcccttgttcaagagcaccagcgttggccctctgtactctggctgcagactgaccttgctcagacctgagaaacatggggcagccactggagtggacgccatctgcaccctccgccttgatcccactggtcctggactggacagagagcggctatactgggagctgagccagctgaccaacagcgttacagagctgggcccctacaccctggacagggacagtctctatgtcaatggcttcacccatcggagctctgtgccaaccaccagtattcctgggacctctgcagtgcacctggaaacctctgggactccagcctccctccctggccacacagcccctggccctctcctggtgccattcaccctcaacttcactatcaccaacctgcagtatgaggaggacatgcgtcaccctggttccaggaagttcaacaccacggagagagtcctgcagggtctgctcaagcccttgttcaagagcaccagtgttggccctctgtactctggctgcagactgaccttgctcaggcctgaaaaacgtggggcagccaccggcgtggacaccatctgcactcaccgccttgaccctctaaaccctggactggacagagagcagctatactgggagctgagcaaactgacccgtggcatcatcgagctgggcccctacctcctggacagaggcagtctctatgtcaatggtttcacccatcggaactttgtgcccatcaccagcactcctgggacctccacagtacacctaggaacctctgaaactccatcctccctacctagacccatagtgcctggccctctcctggtgccattcaccctcaacttcaccatcaccaacttgcagtatgaggaggccatgcgacaccctggctccaggaagttcaataccacggagagggtcctacagggtctgctcaggcccttgttcaagaataccagtatcggccctctgtactccagctgcagactgaccttgctcaggccagagaaggacaaggcagccaccagagtggatgccatctgtacccaccaccctgaccctcaaagccctggactgaacagagagcagctgtactgggagctgagccagctgacccacggcatcactgagctgggcccctacaccctggacagggacagtctctatgtcgatggtttcactcattggagccccataccaaccaccagcactcctgggacctccatagtgaacctgggaacctctgggatcccaccttccctccctgaaactacagccaccggccctctcctggtgccattcacactcaacttcaccatcactaacctacagtatgaggagaacatgggtcaccctggctccaggaagttcaacatcacggagagtgttctgcagggtctgctcaagcccttgttcaagagcaccagtgttggccctctgtattctggctgcagactgaccttgctcaggcctgagaaggacggagtagccaccagagtggacgccatctgcacccaccgccctgaccccaaaatccctgggctagacagacagcagctatactgggagctgagccagctgacccacagcatcactgagctgggaccctacaccctggatagggacagtctctatgtcaatggtttcacccagcggagctctgtgcccaccaccagcactcctgggactttcacagtacagccggaaacctctgagactccatcatccctccctggccccacagccactggccctgtcctgctgccattcaccctcaattttaccatcattaacctgcagtatgaggaggacatgcatcgccctggctccaggaagttcaacaccacggagagggtccttcagggtctgcttatgcccttgttcaagaacaccagtgtcagctctctgtactctggttgcagactgaccttgctcaggcctgagaaggatggggcagccaccagagtggatgctgtctgcacccatcgtcctgaccccaaaagccctggactggacagagagcggctgtactggaagctgagccagctgacccacggcatcactgagctgggcccctacaccctggacaggcacagtctctatgtcaatggtttcacccatcagagctctatgacgaccaccagaactcctgatacctccacaatgcacctggcaacctcgagaactccagcctccctgtctggacctacgaccgccagccctctcctggtgctattcacaattaacttcaccatcactaacctgcggtatgaggagaacatgcatcaccctggctctagaaagtttaacaccacggagagagtccttcagggtctgctcaggcctgtgttcaagaacaccagtgttggccctctgtactctggctgcagactgaccttgctcaggcccaagaaggatggggcagccaccaaagtggatgccatctgcacctaccgccctgatcccaaaagccctggactggacagagagcagctatactgggagctgagccagctaacccacagcatcactgagctgggcccctacaccctggacagggacagtctctatgtcaatggtttcacacagcggagctctgtgcccaccactagcattcctgggacccccacagtggacctgggaacatctgggactccagtttctaaacctggtccctcggctgccagccctctcctggtgctattcactctcaacttcaccatcaccaacctgcggtatgaggagaacatgcagcaccctggctccaggaagttcaacaccacggagagggtccttcagggcctgctcaggtccctgttcaagagcaccagtgttggccctctgtactctggctgcagactgactttgctcaggcctgaaaaggatgggacagccactggagtggatgccatctgcacccaccaccctgaccccaaaagccctaggctggacagagagcagctgtattgggagctgagccagctgacccacaatatcactgagctgggccnctatgccctggacaacgacagcctctttgtcaatggtttcactcatcggagctctgtgtccaccaccagcactcctgggacccccacagtgtatctgggagcatctaagactccagcctcgatatttggcccttcagctgccagccatctcctgatactattcaccctcaacttcaccatcactaacctgcggtatgaggagaacatgtggcctggctccaggaagttcaacactacagagagggtccttcagggcctgctaaggcccttgttcaagaacaccagtgttggccctctgtactctggctncaggctgaccttgctcaggccagagaaagatggggaagccaccggagtggatgccatctgcacccaccgccctgaccccacaggccctgggctggacagagagcagctgtatttggagctgagccagctgacccacagcatcactgagctgggcccctacacactggacagggacagtctctatgtcaatggtttcacccatcggagctctgtacccaccaccagcaccggggtggtcagcgaggagccattcacactgaacttcaccatcaacaacctgcgctacatggcggacatgggccaacccggctccctcaagttcaacatcacagacaacgtcatgaagcacctgctcagtcctttgttccagaggagcagcctgggtgcacggtacacaggctgcagggtcatcgcactaaggtctgtgaagaacggtgctgagacacgggtggacctcctctgcacctacctgcagcccctcagcggcccaggtctgcctatcaagcaggtgttccatgagctgagccagcagacccatggcatcacccggctgggcccctactctctggacaaagacagcctctaccttaacggttacaatgaacctggtctagatgagcctcctacaactcccaagccagccaccacattcctgcctcctctgtcagaagccacaacagccatggggtaccacctgaagaccctcacactcaacttcaccatctccaatctccagtattcaccagatatgggcaagggctcagctacattcaactccaccgagggggtccttcagcacctgctcagacccttgttccagaagagcagcatgggccccttctacttgggttgccaactgatctccctcaggctatgcaccccagaatttatcaatccggggcgagtaccagataaatttccacattgtcaactggaacctcagtaatccagaccccacatcctcagagtacatcaccctgctgagggacatccaggacaaggtcaccacactctacaaaggcagtcaactacatgacacattccgcttctgcctggtcaccaacttgacgatggactccgtgttggtcactgtcaaggcattgttctcctccaatttggaccccagcctggtggagcaagtctttctagataagaccctgaatgcctcattccattggctgggctccacctaccagttggtggacatccatgtgacagaaatggagtcatcagtttatcaaccaacaagcagctccagcacccagcacttctacccgaatttcaccatcaccaacctaccatattcccaggacaaagcccagccaggcaccaccaattaccagaggaacaaaaggaatattgaggatgcgctcaaccaactcttccgaaacagcagcatcaagagttatttttctgactgtcaagtttcaacattcaggtctgtccccaacaggcaccacaccggggtggactccctgtgtaacttctcgccactggctcggagagtagacagagttgccatctatgaggaatttctgcggatgacccggaatggtacccagctgcagaacttcaccctggacaggagcagtgtccttgtggatgggtattctcccaacagaaatgagcccttaactgggaattctgaccttcccttctgggctgtcatcctcatcggcttggcaggactcctgggactcatcacatgcctgatctgcggtgtcctggtgaccacccgccggcggaagaaggaaggagaatacaacgtccagcaacagtgcccaggctactaccagtcacacctagacctggaggatctgcaatgactggaacttgccggtgcctggggtgcctttcccccagccagggtccaaagaagcttggctggggcagaaataaaccatattggtcggacacagtctctgagcct

SEQ ID NO: 100456 - DNA, 874 bp, Homo sapiens
tcccagttcttcctgcaatctccagtctcaccctctcctcactgatctcctttgtcccaggagctggatcagagataagagaatctctaaggaactgaactcaactttggtctctgtcattttggaaaattactgggaccaagtcagactcttccccaagcagaaaatctgaagctcatagcagaaaaggatttgaaatttgaacccagggccttctcccaaattacttcaccctgtagccacaacagaaaacaggcactagaagcataaaggaccaggaaaggaagagaaacaaaaggaatattgaggatgcgctcaaccaactcttccgaaacagcagcatcaagagttatttttctgactgtcaagtttcaacattcaggtctgtccccaacaggcaccacaccggggtggactccctgtgtaacttctcgccactggctcggagagtagacagagttgccatctatgaggaatttctgcggatgacccggaatggtacccagctgcagaacttcaccctggacaggagcagtgtccttgtggatgggtattctcccaacagaaatgagcccttaactgggaattctgaccttcccttctgggctgtcatcctcatcggcttggcaggactcctgggactcatcacatgcctgatctgcggtgtcctggtgaccacccgccggcggaagaaggaaggagaatacaacgtccagcaacagtgcccaggctactaccagtcacacctagacctggaggatctgcaatgactggaacttgccggtgcctggggtgcctttcccccagccagggtccaaagaagcttggctggggcagaaataaaccatattggtcggacacagtctctgagcct

SEQ ID NO: 100457 - DNA, 2998 bp, Homo sapiens
cgcgttgatcccatcggacctggactggacagagagcggctatactgggagctgagccagctgaccaacagcatcacagagctgggaccctacaccctggatagggacagtctctatgtcaatggcttcaacccttggagctctgtgccaaccaccagcactcctgggacctccacagtgcacctggcaacctctgggactccatcctccctgcctggccacacagcccctgtccctctcttgataccattcaccctcaactttaccatcaccaacctgcattatgaagaaaacatgcaacaccctggttccaggaagttcaacaccacggagagggttctgcagggtctgctcaagcccttgttcaagagcaccagcgttggccctctgtactctggctgcagactgaccttgctcagacctgagaaacatggggcagccactggagtggacgccatctgcaccctccgccttgatcccactggtcctggactggacagagagcggctatactgggagctgagccagctgaccaacagcgttacagagctgggcccctacaccctggacagggacagtctctatgtcaatggcttcacccatcggagctctgtgccaaccaccagtattcctgggacctctgcagtgcacctggaaacctctgggactccagcctccctccctggccacacagcccctggccctctcctggtgccattcaccctcaacttcactatcaccaacctgcagtatgaggaggacatgcgtcaccctggttccaggaagttcaacaccacggagagagtcctgcagggtctgctcaagcccttgttcaagagcaccagtgttggccctctgtactctggctgcagactgaccttgctcaggcctgaaaaacgtggggcagccaccggcgtggacaccatctgcactcaccgccttgaccctctaaaccctggactggacagagagcagctatactgggagctgagcaaactgacccgtggcatcatcgagctgggcccctacctcctggacagaggcagtctctatgtcaatggtttcacccatcggaactttgtgcccatcaccagcactcctgggacctccacagtacacctaggaacctctgaaactccatcctccctacctagacccatagtgcctggccctctcctggtgccattcaccctcaacttcaccatcaccaacttgcagtatgaggaggccatgcgacaccctggctccaggaagttcaataccacggagagggtcctacagggtctgctcaggcccttgttcaagaataccagtatcggccctctgtactccagctgcagactgaccttgctcaggccagagaaggacaaggcagccaccagagtggatgccatctgtacccaccaccctgaccctcaaagccctggactgaacagagagcagctgtactgggagctgagccagctgacccacggcatcactgagctgggcccctacaccctggacagggacagtctctatgtcgatggtttcactcattggagccccataccaaccaccagcactcctgggacctccatagtgaacctgggaacctctgggatcccaccttccctccctgaaactacagccaccggccctctcctggtgccattcacactcaacttcaccatcactaacctacagtatgaggagaacatgggtcaccctggctccaggaagttcaacatcacggagagtgttctgcagggtctgctcaagcccttgttcaagagcaccagtgttggccctctgtattctggctgcagactgaccttgctcaggcctgagaaggacggagtagccaccagagtggacgccatctgcacccaccgccctgaccccaaaatccctgggctagacagacagcagctatactgggagctgagccagctgacccacagcatcactgagctgggaccctacaccctggatagggacagtctctatgtcaatggtttcacccagcggagctctgtgcccaccaccagcactcctgggactttcacagtacagccggaaacctctgagactccatcatccctccctggccccacagccactggccctgtcctgctgccattcaccctcaattttaccatcattaacctgcagtatgaggaggacatgcatcgccctggctccaggaagttcaacaccacggagagggtccttcagggtctgcttatgcccttgttcaagaacaccagtgtcagctctctgtactctggttgcagactgaccttgctcaggcctgagaaggatggggcagccaccagagtggatgctgtctgcacccatcgtcctgaccccaaaagccctggactggacagagagcggctgtactggaagctgagccagctgacccacggcatcactgagctgggcccctacaccctggacaggcacagtctctatgtcaatggtttcacccatcagagctctatgacgaccaccagaactcctgatacctccacaatgcacctggcaacctcgagaactccagcctccctgtctggacctacgaccgccagccctctcctggtgctattcacaattaacttcaccatcactaacctgcggtatgaggagaacatgcatcaccctggctctagaaagtttaacaccacggagagagtccttcagggtctgctcaggcctgtgttcaagaacaccagtgttggccctctgtactctggctgcagactgaccttgctcaggcccaagaaggatggggcagccaccaaagtggatgccatctgcacctaccgccctgatcccaaaagccctggactggacagagagcagctatactgggagctgagccagggtgatgcatgttctcctcatatcgcaggttagtgatggtgaagttaattgtgaatagcaccaggagagggctggcggtcatgggtccagacagggagcctggagttctcgaggttgccaggtgcatgtc

SEQ ID NO: 100458 - DNA, 847 bp, Homo sapiens
tgcctgcccacatcaggtagctcttccttactcaatcactgattcaaatgccaatctcttccggaaacaccctcacagacataaccagaaataatgctttctgggtattccttgaccagctatctgggtattccttgacccagttgagtcgacatctaaaatgaatatcacagctatatagaaaagaagcctatttcaagtaacttgaaacataacatttgattgaaattattattatttgagacagggcctcgctctgtcactcaggctggaatgcagtggcccaatcatggctcaagcagcctcaacctcctgggctcaagtgatcctcctgcctcaacctcccaggtagctgggactatagacatgtgccatctcacctggctaattttactttttgtagagatggtgggggtggtctagctatgttgctcaggccggtctcaaacacctggcctcaagcaatcttcctgccttgaccttccaaagtgctgggattacaggagcgagccaccatgcccagctgattgcaattatttactcagtgtaccctaaagacaaaaacaaatagcaaagaagtcttaaattatattcaataatctcatgtttttttctttctttctttttctttgagtcggagtctctttctgtcacccaggctggagtgcagtggtgcgatcttggctcactgcaacctctgcctcctgggttcaactgattctcctgcctcagcctacaaagtagctgggactacaggcacatgccatcacacctggctaatttttgtatttttagtacaggtggggttccaccagtgtttgccagactggtctctaactcctgacct

SEQ ID NO: 100459 - DNA, 739 bp, Homo sapiens
tttttttttttgagatagagtctcactctgtcgcccaggttgaagtgcaatgccacaatctcagctaactgcaacctctgcctcccaggttcaagcgattcttgtgcctcggcctcccaggttgctgggaccacaggtgtgccaccacatccgactaatttttatatttttagtagagagggggtttcaccatgatggccaggctggtctcaaactcctggcctcaagtgatcttcccacctcaccctcccaaagtgctgggattacaggcgtgagccaccacgcctggccaatcctgattctgaaggtgggctgaacatacacttcattcgtgctactcaagtactgctacttcacatatttaatccctctgtgataaagactctcatgcccacctttaagatgatctgaaatttcaaagcaaatcagtaacaattttggcatggcatctaaccaccaattaagaatcacagctcttacaaatgccaaataccacccagagctgaggaagagttcgcagaacaacactattttggttctccactggttaagactttgttctaaattactttcagtgggcatcatattttacattagaactcctaggaggaacagcccagtgaaactcactgtggagttcatggacgatcctggtcttccttactatactgtgccctcttcctgagggctgtaggaaatctcagattccaggaccacgtgtgattctacttcttcagag

SEQ ID NO: 100460 - DNA, 730 bp, Homo sapiens
attttcttgttgagcactgattgggacacagtgttctcttcaagatggtttccaattattttaatagtactgctgaagatttaagtatatggataatcaaatgtgcctatcagtgtattcagtgacagagaaaaagacatgtttgatgtctctgtgaagtgagccctactttctgaggatgaggagtttagtcctttgctggaattctgatgttcaattataaatcctatgattgatttctatataccaaaagatcttcttataaccaacgacatacagtgttagtggttcttctcattttgctatttctataaccactgtaactctgaatcttattttaatctagaaaagatactgtattcttccctaaaccccaggttaaatcagacagggttggacttctcctcattgcatggcatcatcggaatgaatcaccctaacaaagcgacatgcttgtgtccctctgtggaaaattgcatttcatgcattgtgagaaaaaaactacatccagatttcatgtgagtgtttatcttgcagaaattcttggatacagttctgcttcatgattcattttccactctttattcatgttgagtcctctctagtgctggaatcatagcgaccagaggccatctctcttcaaatgtaaaaagtggttgattttcaaacagatgataaatgtgaaatcatctaaactactaagtaataaaaattaactggtagtttatca

SEQ ID NO: 100461 - DNA, 545 bp, Homo sapiens
cgagctcggtacccctcaacgctgtatacttgcctgattctaataatgatctcctacattccaatttttccccagttatacttccacatgatacaccagagaagaaagatcctttctcatactgaagaacacaagaaatttgaatagttcctgctttctgcacctcccaccaaaacaaacttttcaatgatcaaaaaatgctgcagattttttgagttcccaatacgtttcatagaaaataagtaagaactatttttaaaatattcaaacaaaactaaaacaaaaatccagtgtcacatgggcctgagattttattttagaaaaaggttgttacataaaacaccctggccagttcatttcagcatgctctttcaaccagaagttcttaatatttatgatggcactagaaagggatttggcattttatgtccttctgtgtccttcatgtatctgatcaatgaagacctgtaacactaagtacttgagagttacagtctgaataatgaagtataaagcgttgaggggtcctctagagtcaccgcgca

SEQ ID NO: 100462 - DNA, 4268 bp, Homo sapiens
agcggggctttgccctcagccaagatggcggctgccgtggaccctgtcccggctccgccccgcggccctggccccgcctgcccctcgtcccttcctccgccccctctcctcgcgtagtccggcccgagccgctcgcgctaggagagcgggcttcgggcacttgacatggcggcagtggcggcgactgcagcagcgaaggggaatgggggcggcggtgggagggccggggccggggacgccagcggcacgcggaagaagaagggcccggggcccctggccacggcgtacctggtcatctacaatgtggtgatgacagccgggtggctggttatagcggttggtctggtccgagcatacctggctaagggtagctaccatagcctttattattcaattgaaaagcctttgaaattctttcaaactggagccttattggagattttacattgtgctataggaattgttccatcttctgttgtcctgacttctttccaggtgatgtcaagagtttttctaatatgggcagtaacacatagcgtcaaagaggtacagagtgaagacagtgtcctcctgtttgttattgcatggacgatcacggaaatcatccgttactccttttatacattcagtctattaaaccatctgccttacctcatcaaatgggccaggtacacacttttcattgtgctgtacccaatgggagtgtcaggagaactgctcacaatatatgcagctctgccctttgtcagacaagctggcctatattccatcagtttacccaacaaatacaatttctcttttgactactatgcattcctgattctaataatgatctcctacattccaatttttccccagttatacttccacatgatacaccagagaagaaagatcctttctcatactgaagaacacaagaaatttgaatagttcctgctttctgcacctcccaccaaaacaaacttttcaatgatcaaaaaatgctgcagattttttgagttcccaatacgtttcatagaaaataagtaagaactatttttaaaatattcaaacaaaactaaaacaaaaatccagtgtcacatgggcctgagattttattttagaaaaaggttgttacataaaacaccctggccagttcatttcagcatgctctttcaaccagaagttcttaatatttatgatggcactagaaagggatttggcattttatgtccttctgtgtccttcatgtatctgatcaatgaagacctgtaacactaagtacttgagagttacagtctgaataatgaagtcgtaccagctgaatagcccagcttgcagtatagttatgtttcagtctgcagtgtgtttagcattcccttgtcaaagtgcttgactgcatgctggaaactttgtatttttgaagcggcaaactctgttctctggaatgctctgaagttatggctgggacctatcccctcacatctaatgaatgaattataaaatgtatatgtctatgaagcttcggggtagtgcctgtaatcagaaaacaacttagaacccttttgtttgtttccaattgagtcattactgcctgccactaagaaacgtgcttgaatctaataagtatgtgtgtaccgtaaagaatatatcttatctggagctcagcctcaatcatgtcttaacaaaatgacaggtctcagaaagggggagctcaatagctcaaaagtgacaagtccttttcacagcaccgttctcagaacacctctgagtaacgtgtttgccagtagctattctcactgatgcactgatggccctgaagaagcggatccagtcacataggaaaggaggctgtgttagtgaaagcacatggaaggtgttgctttagaaaggtagtcaggaaaaacattcaggaatagatttatacaccattattgttttatttttaaattttcattcactcttctgtttggatacttttgctaattaacgtcctatgttaatttccaccaagctataagtccatagtcagtaaaacattccccttgggctgtcatgagctaaaagcagtgtcatctccgcatgttggagcagccaagaaatagtttggtactaccgacattgtctaatccatgtcacatcctcatacaatttaattgctcaaccatgcatttaaaactcctcaagaaaggattggtactgcaactgtaggtaaactgaaaaaaaataagaaagaaagagttggatgaaaatgtgaaagcccaagtttagatgtgcattaagtattaaatagcacagtatcttcttcatggagccttttttcctcccccatcccctgcagctgcctttttttgggggcagggtgggggttgatgttgaactttaagagtttaaaagtttagcttattgagtagttgtcatttaaaatataattgcgaatatcagaaaactcatactggaaaactaaattttttttttctcttgagacggagtctcgctctgttgcccaggctggagtgcagtggcgcgatctcggctcactgcaagctccacctcccgggttcacgccatcctcctgcctcagcctcctgagtagctgggactacaggtgcctgccaccacacccagctaattttttttgtatttttagtagagacggggtttcaccgtgttagccaggatggtcttgatctcctgacctcgtgatccacccgcctcagcctcccaaagtgctgggattgcaggcatgagccactgcacccaacccctggaaaactaaatttttaagtgcttatttttatagaagtttgaaaatttaatgcaggcaggtgtgtaataaattatttttgaattgaacattaaaattctgcttcttaaagtcagcactcaacttggacatgttgaaattagaatctattcttgtatttgatagacaaaatatgtgggaaagattttttgcatgacttttctctcattttattcttccataatgtatttctactataaaatagaatcaacttgggttatatttgtcatttactttgttctgttagattttttcagttgtttttggaaaaattctagaaatcaggatgaaaaatgcagcttttccagggttgctggactgggggttttatttgggcctccttattataatttgtcactacttataaaaaacattctgttgcaaacagtggtgttgcattgaattgaactttggcaatgagaacacagcacacagctcccttttcaaaaagggtctcaaccccagtgtgtatttttgtacatcaacatttagaatacttatggcagataagtaaggcatgtcactgtgtccttcagtaacctctctcagtaactggtttctttatccctaacatgaattcatttctcctttgaagtcatttattattttataaattgagaacaaccacaccaccaaatgtcacaccttcttataaagtgtgaacaaggaaggtcatgtttttgtgggtattttgtcagacttagaggtttcatttcagggcatagtcaaaggcatcatcctcccaactacccacttgattatgtatttcagatccctccgtgggggccttcttctgacagagaattctttgaggtccgcagtagtgcttttgtcagcacagactgctaatctacatcttgctgcgttctgtttgctgaggttgggcttattcatttaacacgtaccaaccattatccagaggcaccatggagagttagtcatggaataaagcactgtccttgcagatgaaaaaagtctccagagcagacttctgacaggaaaggtttagatgctggagagttgaagaggtgtaagaagagatcgtgccctcatttttcacttatttttttggttattcatttataataaaaggttggcattgatatggtacaacctgcaaattacttgcagttctgagtttcagataaaacattataaaacattaaattcaatacatactgctcctttgaaatttgggtaaaaaattgtacaaccgtatatatagtcatttttgtattttttctatgttgtgaaaaccaaaattgtaattttataagtctttgattcactaaaattatataatttaaatgtattttttgtatatttagaaataaggagtccagagactacgcttaactttctatgcatgcatttgaaagctgtttttacctgataatgtagtaataagttgtattcataaaatactgatctgtgttgcatttcaaaataaactggtgtgtgctctgcctggatttgaaatacc

SEQ ID NO: 100463 - DNA, 3290 bp, Homo sapiens
cggacgcgtgggtcgacccacgcgtcggacccacgcgtcgagaataagtaagaactatttttaaaatattcaaacaaaactaaaacaaaaatccagtgtcacatgggcctgagattttattttagaaaaaggttgttacataaaacaccctggccagttcatttcagcatgctctttcaaccagaagttcttaatatttatgatggcactagaaagggatttggcattttatgtccttctgtgtccttcatgtatctgatcaatgaagacctgtaacactaagtacttgagagttacagtctgaataatgaagtcgtaccagctgaatagcccagcttgcagtatagttatgtttcagtctgcagtgtgtttagcattcccttgtcaaagtgcttgactgcatgctggaaactttgtatttttgaagcggcaaactctgttctctggaatgctctgaagttatggctgggacctatcccctcacatctaatgaatgaattataaaatgtatatgtctatgaagcttcggggtagtgcctgtaatcagaaaacaacttagaacccttttgtttgtttccaattgagtcattactgcctgccactaagaaacgtgcttgaatctaataagtatgtgtgtaccgtaaagaatatatcttatctggagctcagcctcaatcatgtcttaacaaaatgacaggtctcagaaagggggagctcaatagctcaaaagtgacaagtccttttcacagcaccgttctcagaacacctctgagtaacgtgtttgccagtagctattctcactgatgcactgatggccctgaagaagcggatccagtcacataggaaaggaggctgtgttagtgaaagcacatggaaggtgttgctttagaaaggtagtcaggaaaaacattcaggaatagatttatacaccattattgttttatttttaaattttcattcactcttctgtttggatacttttgctaattaacgtcctatgttaatttccaccaagctataagtccatagtcagtaaaacattccccttgggctgtcatgagctaaaagcagtgtcatctccgcatgttggagcagccaagaaatagtttggtactaccgacattgtctaatccatgtcacatcctcatacaatttaattgctcaaccatgcatttaaaactcctcaagaaaggattggtactgcaactgtaggtaaactgaaaaaaaataagaaagaaagagttggatgaaaatgtgaaagcccaagtttagatgtgcattaagtattaaatagcacagtatcttcttcatggagccttttttcctcccccatcccctgcagctgcctttttttgggggcagggtgggggttgatgttgaactttaagagtttaaaagtttagcttattgagtagttgtcatttaaaatataattgcgaatatcagaaaactcatactggaaaactaaattttttttttctcttgagacggagtctcgctctgttgcccaggctggagtgcagtggcgcgatctcggctcactgcaagctccacctcccgggttcacgccatcctcctgcctcagcctcctgagtagctgggactacaggtgcctgccaccacacccagctaattttttttgtatttttagtagagacggggtttcaccgtgttagccaggatggtcttgatctcctgacctcgtgatccacccgcctcagcctcccaaagtgctgggattgcaggcatgagccactgcacccaacccctggaaaactaaatttttaagtgcttatttttatagaagtttgaaaatttaatgcaggcaggtgtgtaataaattatttttgaattgaacattaaaattctgcttcttaaagtcagcactcaacttggacatgttgaaattagaatctattcttgtatttgatagacaaaatatgtgggaaagattttttgcatgacttttctctcattttattcttccataatgtatttctactataaaatagaatcaacttgggttatatttgtcatttactttgttctgttagattttttcagttgtttttggaaaaattctagaaatcaggatgaaaaatgcagcttttccagggttgctggactgggggttttatttgggcctccttattataatttgtcactacttataaaaaacattctgttgcaaacagtggtgttgcattgaattgaactttggcaatgagaacacagcacacagctcccttttcaaaaagggtctcaaccccagtgtgtatttttgtacatcaacatttagaatacttatggcagataagtaaggcatgtcactgtgtccttcagtaacctctctcagtaactggtttctttatccctaacatgaattcatttctcctttgaagtcatttattattttataaattgagaacaaccacaccaccaaatgtcacaccttcttataaagtgtgaacaaggaaggtcatgtttttgtgggtattttgtcagacttagaggtttcatttcagggcatagtcaaaggcatcatcctcccaactacccacttgattatgtatttcagatccctccgtgggggccttcttctgacagagaattctttgaggtccgcagtagtgcttttgtcagcacagactgctaatctacatcttgctgcgttctgtttgctgaggttgggcttattcatttaacacgtaccaaccattatccagaggcaccatggagagttagtcatggaataaagcactgtccttgcagatgaaaaaagtctccagagcagacttctgacaggaaaggtttagatgctggagagttgaagaggtgtaagaagagatcgtgccctcatttttcacttatttttttggttattcatttataataaaaggttggcattgatatggtacaacctgcaaattacttgcagttctgagtttcagataaaacattataaaacattaaattcaatacatactgctcctttgaaatttgggtaaaaaattgtacaaccgtatatatagtcatttttgtattttttctatgttgtgaaaaccaaaattgtaattttataagtctttgattcactaaaattatataatttaaatgtattttttgtatatttagaaataaggagtccagagactacgcttaactttctatgcatgcatttgaaagctgtttttacctgataatgtagtaataagttgtattcataaaatactgatctgtgttgcatttcaaaataaactggtgtgtgctctgcctggatttgaaatacc

SEQ ID NO: 100464 - DNA, 4333 bp, Homo sapiens
agcggggctttgccctcagccaagatggcggctgccgtggaccctgtcccggctccgccccgcggccctggccccgcctgcccctcgtcccttcctccgccccctctcctcgcgtagtccggcccgagccgctcgcgctaggagagcgggcttcgggcacttgacatggcggcagtggcggcgactgcagcagcgaaggggaatgggggcggcggtgggagggccggggccggggacgccagcggcacgcggaagaagaagggcccggggcccctggccacggcgtacctggtcatctacaatgtggtgatgacagccgggtggctggttatagcggttggtctggtccgagcatacctggctaagggtagctaccatagcctttattattcaattgaaaagcctttgaaattctttcaaactggagccttattggagattttacattgtgctataggaattgttccatcttctgttgtcctgacttctttccaggtgatgtcaagagtttttctaatatgggcagtaacacatagcgtcaaagaggtacagagtgaagacagtgtcctcctgtttgttattgcatggacgatcacggaaatcatccgttactccttttatacattcagtctattaaaccatctgccttacctcatcaaatgggccaggtacacacttttcattgtgctgtacccaatgggagtgtcaggagaactgctcacaatatatgcagctctgccctttgtcagacaagctggcctatattccatcagtttacccaacaaatacaatttctcttttgactactatgcattcctgattctaataatgatctcctacattccaatttttccccagttatacttccacatgatacaccagagaagaaagatcctttctcatactgaagaacacaagaaatttgaatagttcctgctttctgcacctcccaccaaaacaaacttttcaatgatcaaaaaatgctgcagattttttgagttcccaatacgtttcatagaaaataagtaagaactatttttaaaatattcaaacaaaactaaaacaaaaatccagtgtcacatgggcctgagattttattttagaaaaaggttgttacataaaacaccctggccagttcatttcagcatgctctttcaaccagaagttcttaatatttatgatggcactagaaagggatttggcattttatgtccttctgtgtccttcatgtatctgatcaatgaagacctgtaacactaagtacttgagagttacagtctgaataatgaagtcgtaccagctgaatagcccagcttgcagtatagttatgtttcagtctgcagtgtgtttagcattcccttgtcaaagtgcttgactgcatgctggaaactttgtatttttgaagcggcaaactctgttctctggaatgctctgaagttatggctgggacctatcccctcacatctaatgaatgaattataaaatgtatatgtctatgaagcttcggggtagtgcctgtaatcagaaaacaacttagaacccttttgtttgtttccaattgagtcattactgcctgccactaagaaacgtgcttgaatctaataagtatgtgtgtaccgtaaagaatatatcttatctggagctcagcctcaatcatgtcttaacaaaatgacaggtctcagaaagggggagctcaatagctcaaaagtgacaagtccttttcacagcaccgttctcagaacacctctgagtaacgtgtttgccagtagctattctcactgatgcactgatggccctgaagaagcggatccagtcacataggaaaggaggctgtgttagtgaaagcacatggaaggtgttgctttagaaaggtagtcaggaaaaacattcaggaatagatttatacaccattattgttttatttttaaattttcattcactcttctgtttggatacttttgctaattaacgtcctatgttaatttccaccaagctataagtccatagtcagtaaaacattccccttgggctgtcatgagctaaaagcagtgtcatctccgcatgttggagcagccaagaaatagtttggtactaccgacattgtctaatccatgtcacatcctcatacaatttaattgctcaaccatgcatttaaaactcctcaagaaaggattggtactgcaactgtaggtaaactgaaaaaaaataagaaagaaagagttggatgaaaatgtgaaagcccaagtttagatgtgcattaagtattaaatagcacagtatcttcttcatggagccttttttcctcccccatcccctgcagctgcctttttttgggggcagggtgggggttgatgttgaactttaagagtttaaaagtttagcttattgagtagttgtcatttaaaatataattgcgaatatcagaaaactcatactggaaaactaaattttttttttctcttgagacggagtctcgctctgttgcccaggctggagtgcagtggcgcgatctcggctcactgcaagctccacctcccgggttcacgccatcctcctgcctcagcctcctgagtagctgggactacaggtgcctgccaccacacccagctaattttttttgtatttttagtagagacggggtttcaccgtgttagccaggatggtcttgatctcctgacctcgtgatccacccgcctcagcctcccaaagtgctgggattgcaggcatgagccactgcacccaacccctggaaaactaaatttttaagtgcttatttttatagaagtttgaaaatttaatgcaggcaggtgtgtaataaattatttttgaattgaacattaaaattctgcttcttaaagtcagcactcaacttggacatgttgaaattagaatctattcttgtatttgatagacaaaatatgtgggaaagattttttgcatgacttttctctcattttattcttccataatgtatttctactataaaatagaatcaacttgggttatatttgtcatttactttgttctgttagattttttcagttgtttttggaaaaattctagaaatcaggatgaaaaatgcagcttttccagggttgctggactgggggttttatttgggcctccttattataatttgtcactacttataaaaaacattctgttgcaaacagtggtgttgcattgaattgaactttggcaatgagaacacagcacacagctcccttttcaaaaagggtctcaaccccagtgtgtatttttgtacatcaacatttagaatacttatggcagataagtaaggcatgtcactgtgtccttcagtaacctctctcagtaactggtttctttatccctaacatgaattcatttctcctttgaagtcatttattattttataaattgagaacaaccacaccaccaaatgtcacaccttcttataaagtgtgaacaaggaaggtcatgtttttgtgggtattttgtcagacttagaggtttcatttcagggcatagtcaaaggcatcatcctcccaactacccacttgattatgtatttcagatccctccgtgggggccttcttctgacagagaattctttgaggtccgcagtagtgcttttgtcagcacagactgctaatctacatcttgctgcgttctgtttgctgaggttgggcttattcatttaacacgtaccaaccattatccagaggcaccatggagagttagtcatggaataaagcactgtccttgcagatgaaaaaagtctccagagcagacttctgacaggaaaggtttagatgctggagagttgaagaggtgtaagaagagatcgtgccctcatttttcacttatttttttggttattcatttataataaaaggttggcattgatatggtacaacctgcaaattacttgcagttctgagtttcagataaaacattataaaacattaaattcaatacatactgctcctttgaaatttgggtaaaaaattgtacaaccgtatatatagtcatttttgtattttttctatgttgtgaaaaccaaaattgtaattttataagtctttgattcactaaaattatataatttaaatgtattttttgtatatttagaaataaggagtccagagactacgcttaactttctatgcatgcatttgaaagctgtttttacctgataatgtagtaataagttgtattcataaaatactgatctgtgttgcatttcaaaataaactggtgtgtgctctgcctggatttgaaataccaaaagacaccaaaaaagacaaatacactaaaaacgggggggccccctccacaagtttcccccagg

SEQ ID NO: 100465 - DNA, 3755 bp, Homo sapiens
agcggggctttgccctcagccaagatggcggctgccgtggaccctgtcccggctccgccccgcggccctggccccgcctgcccctcgtcccttcctccgccccctctcctcgcgtagtccggcccgagccgctcgcgctaggagagcgggcttcgggcacttgacatggcggcagtggcggcgactgcagcagcgaaggggaatgggggcggcggtgggagggccggggccggggacgccagcggcacgcggaagaagaagggcccggggcccctggccacggcgtacctggtcatctacaatgtggtgatgacagccgggtggctggttatagcggttggtctggtccgagcatacctggctaagggtagctaccatagcctttattattcaattgaaaagcctttgaaattctttcaaactggagccttattggagattttacattgtgctataggaattgttccatcttctgttgtcctgacttctttccaggtgatgtcaagagtttttctaatatgggcagtaacacatagcgtcaaagaggtacagagtgaagacagtgtcctcctgtttgttattgcatggacgatcacggaaatcatccgttactccttttatacattcagtctattaaaccatctgccttacctcatcaaatgggccaggtacacacttttcattgtgctgtacccaatgggagtgtcaggagaactgctcacaatatatgcagctctgccctttgtcagacaagctggcctatattccatcagtttacccaacaaatacaatttctcttttgactactatgcattcctgattctaataatgatctcctacattccaatttttccccagttatacttccacatgatacaccagagaagaaagatcctttctcatactgaagaacacaagaaatttgaatagttcctgctttctgcacctcccaccaaaacaaacttttcaatgatcaaaaaatgctgcagattttttgagttcccaatacgtttcatagaaaataagtaagaactatttttaaaatattcaaacaaaactaaaacaaaaatccagtgtcacatgggcctgagattttattttagaaaaaggttgttacataaaacaccctggccagttcatttcagcatgctctttcaaccagaagttcttaatatttatgatggcactagaaagggatttggcattttatgtccttctgtgtccttcatgtatctgatcaatgaagacctgtaacactaagtacttgagagttacagtctgaataatgaagtcgtaccagctgaatagcccagcttgcagtatagttatgtttcagtctgcagtgtgtttagcattcccttgtcaaagtgcttgactgcatgctggaaactttgtatttttgaagcggcaaactctgttctctggaatgctctgaagttatggctgggacctatcccctcacatctaatgaatgaattataaaatgtatatgtctatgaagcttcggggtagtgcctgtaatcagaaaacaacttagaacccttttgtttgtttccaattgagtcattactgcctgccactaagaaacgtgcttgaatctaataagtatgtgtgtaccgtaaagaatatatcttatctggagctcagcctcaatcatgtcttaacaaaatgacaggtctcagaaagggggagctcaatagctcaaaagtgacaagtccttttcacagcaccgttctcagaacacctctgagtaacgtgtttgccagtagctattctcactgatgcactgatggccctgaagaagcggatccagtcacataggaaaggaggctgtgttagtgaaagcacatggaaggtgttgctttagaaaggtagtcaggaaaaacattcaggaatagatttatacaccattattgttttatttttaaattttcattcactcttctgtttggatacttttgctaattaacgtcctatgttaatttccaccaagctataagtccatagtcagtaaaacattccccttgggctgtcatgagctaaaagcagtgtcatctccgcatgttggagcagccaagaaatagtttggtactaccgacattgtctaatccatgtcacatcctcatacaatttaattgctcaaccatgcatttaaaactcctcaagaaaggattggtactgcaactgtaggtaaactgaaaaaaaataagaaagaaagagttggatgaaaatgtgaaagcccaagtttagatgtgcattaagtattaaatagcacagtatcttcttcatggagccttttttcctcccccatcccctgcagctgcctttttttgggggcagggtgggggttgatgttgaactttaagagtttaaaagtttagcttattgagtagttgtcatttaaaatataattgcgaatatcagaaaactcatactggaaaactaaattttttttttctcttgagacggagtctcgctctgttgcccaggctggagtgcagtggcgcgatctcggctcactgcaagctccacctcccgggttcacgccatcctcctgcctcagcctcctgagtagctgggactacaggtgcctgccaccacacccagctaattttttttgtatttttagtagagacggggtttcaccgtgttagccaggatggtcttgatctcctgacctcgtgatccacccgcctcagcctcccaaagtgctgggattgcaggcatgagccactgcacccaacccctggaaaactaaatttttaagtgcttatttttatagaagtttgaaaatttaatgcaggcaggtgtgtaataaattatttttgaattgaacattaaaattctgcttcttaaagtcagcactcaacttggacatgttgaaattagaatctattcttgtatttgatagacaaaatatgtgggaaagattttttgcatgacttttctctcattttattcttccataatgtatttctactataaaatagaatcaacttgggttatatttgtcatttactttgttctgttagattttttcagttgtttttggaaaaattctagaaatcaggatgaaaaatgcagcttttccagggttgctggactgggggttttatttgggcctccttattataatttgtcactacttataaaaaacattctgttgcaaacagtggtgttgcattgaattgaactttggcaatgagaacacagcacacagctcccttttcaaaaagggtctcaaccccagtgtgtatttttgtacatcaacatttagaatacttatggcagataagtaaggcatgtcactgtgtccttcagtaacctctctcagtaactggtttctttatccctaacatgaattcatttctcctttgaagtcatttattattttataaattgagaacaaccacaccaccaaatgtcacaccttcttataaagtgtgaacaaggaaggtcatgtttttgtgggtattttgtcagacttagaggtttcatttcagggcatagtcaaaggcatcatcctcccaactacccacttgattatgtatttcagatccctccgtgggggccttcttctgacagagaattctttgaggtccgcagtagtgcttttgtcagcacagactgctaatctacatcttgctgcgttctgtttgctgaggttgggcttattcatttaacacgtaccaaccattatccagaggcaccatggagagttagtcatggatagctgtgtattgggtacgagctcg

SEQ ID NO: 100466 - DNA, 3797 bp, Homo sapiens
agcggggctttgccctcagccaagatggcggctgccgtggaccctgtcccggctccgccccgcggccctggccccgcctgcccctcgtcccttcctccgccccctctcctcgcgtagtccggcccgagccgctcgcgctaggagagcgggcttcgggcacttgacatggcggcagtggcggcgactgcagcagcgaaggggaatgggggcggcggtgggagggccggggccggggacgccagcggcacgcggaagaagaagggcccggggcccctggccacggcgtacctggtcatctacaatgtggtgatgacagccgggtggctggttatagcggttggtctggtccgagcatacctggctaagggtagctaccatagcctttattattcaattgaaaagcctttgaaattctttcaaactggagccttattggagattttacattgtgctataggaattgttccatcttctgttgtcctgacttctttccaggtgatgtcaagagtttttctaatatgggcagtaacacatagcgtcaaagaggtacagagtgaagacagtgtcctcctgtttgttattgcatggacgatcacggaaatcatccgttactccttttatacattcagtctattaaaccatctgccttacctcatcaaatgggccaggtacacacttttcattgtgctgtacccaatgggagtgtcaggagaactgctcacaatatatgcagctctgccctttgtcagacaagctggcctatattccatcagtttacccaacaaatacaatttctcttttgactactatgcattcctgattctaataatgatctcctacattccaatttttccccagttatacttccacatgatacaccagagaagaaagatcctttctcatactgaagaacacaagaaatttgaatagttcctgctttctgcacctcccaccaaaacaaacttttcaatgatcaaaaaatgctgcagattttttgagttcccaatacgtttcatagaaaataagtaagaactatttttaaaatattcaaacaaaactaaaacaaaaatccagtgtcacatgggcctgagattttattttagaaaaaggttgttacataaaacaccctggccagttcatttcagcatgctctttcaaccagaagttcttaatatttatgatggcactagaaagggatttggcattttatgtccttctgtgtccttcatgtatctgatcaatgaagacctgtaacactaagtacttgagagttacagtctgaataatgaagtcgtaccagctgaatagcccagcttgcagtatagttatgtttcagtctgcagtgtgtttagcattcccttgtcaaagtgcttgactgcatgctggaaactttgtatttttgaagcggcaaactctgttctctggaatgctctgaagttatggctgggacctatcccctcacatctaatgaatgaattataaaatgtatatgtctatgaagcttcggggtagtgcctgtaatcagaaaacaacttagaacccttttgtttgtttccaattgagtcattactgcctgccactaagaaacgtgcttgaatctaataagtatgtgtgtaccgtaaagaatatatcttatctggagctcagcctcaatcatgtcttaacaaaatgacaggtctcagaaagggggagctcaatagctcaaaagtgacaagtccttttcacagcaccgttctcagaacacctctgagtaacgtgtttgccagtagctattctcactgatgcactgatggccctgaagaagcggatccagtcacataggaaaggaggctgtgttagtgaaagcacatggaaggtgttgctttagaaaggtagtcaggaaaaacattcaggaatagatttatacaccattattgttttatttttaaattttcattcactcttctgtttggatacttttgctaattaacgtcctatgttaatttccaccaagctataagtccatagtcagtaaaacattccccttgggctgtcatgagctaaaagcagtgtcatctccgcatgttggagcagccaagaaatagtttggtactaccgacattgtctaatccatgtcacatcctcatacaatttaattgctcaaccatgcatttaaaactcctcaagaaaggattggtactgcaactgtaggtaaactgaaaaaaaataagaaagaaagagttggatgaaaatgtgaaagcccaagtttagatgtgcattaagtattaaatagcacagtatcttcttcatggagccttttttcctcccccatcccctgcagctgcctttttttgggggcagggtgggggttgatgttgaactttaagagtttaaaagtttagcttattgagtagttgtcatttaaaatataattgcgaatatcagaaaactcatactggaaaactaaattttttttttctcttgagacggagtctcgctctgttgcccaggctggagtgcagtggcgcgatctcggctcactgcaagctccacctcccgggttcacgccatcctcctgcctcagcctcctgagtagctgggactacaggtgcctgccaccacacccagctaattttttttgtatttttagtagagacggggtttcaccgtgttagccaggatggtcttgatctcctgacctcgtgatccacccgcctcagcctcccaaagtgctgggattgcaggcatgagccactgcacccaacccctggaaaactaaatttttaagtgcttatttttatagaagtttgaaaatttaatgcaggcaggtgtgtaataaattatttttgaattgaacattaaaattctgcttcttaaagtcagcactcaacttggacatgttgaaattagaatctattcttgtatttgatagacaaaatatgtgggaaagattttttgcatgacttttctctcattttattcttccataatgtatttctactataaaatagaatcaacttgggttatatttgtcatttactttgttctgttagattttttcagttgtttttggaaaaattctagaaatcaggatgaaaaatgcagcttttccagggttgctggactgggggttttatttgggcctccttattataatttgtcactacttataaaaaacattctgttgcaaacagtggtgttgcattgaattgaactttggcaatgagaacacagcacacagctcccttttcaaaaagggtctcaaccccagtgtgtatttttgtacatcaacatttagaatacttatggcagataagtaaggcatgtcactgtgtccttcagtaacctctctcagtaactggtttctttatccctaacatgaattcatttctcctttgaagtcatttattattttataaattgagaacaaccacaccaccaaatgtcacaccttcttataaagtgtgaacaaggaaggtcatgtttttgtgggtattttgtcagacttagaggtttcatttcagggcatagtcaaaggcatcatcctcccaactacccacttgattatgtatttcagatccctccgtgggggccttcttctgacagagaattctttgaggtccgcagtagtgcttttgtcagcacagactgctaatctacatcttgctgcgttctgtttgctgaggttgggcttattcatttaacacgtaccaaccattatccagaggcaccatggagagttagtcatggaataaagcactgtccttgcagatgacgccccggatgacacacagcatgccgcacagtataggaccggc

SEQ ID NO: 100467 - DNA, 1214 bp, Homo sapiens
taggaataataacttcatcactagaattcttcacctggttgttgtgaagttaatcagaataaatgtggagataatacatgaatgagcgtacagaatattatttggctgttctgtggcatcgatataggtcatgatagtgacaatagtgtctgtcattgtattccacaccacttcttccctcagctaaagcaggaaaagaaaggaggtaagtctctctgtgttttttcttcctttccccaagcccactttgttaccttccttggttgctggatgagaaattagtcagagggtcagagaggacctcaacttcatatgctttaaatagagcatatgcaattttaaaccatcctcttaaccaatttttcttttcttttcagtttttccccagttatacttccacatgatacaccagagaagaaagatcctttctcatactgaagaacacaagaaatttgaatagttcctgctttctgcacctcccaccaaaacaaacttttcaatgatcaaaaaatgctgcagattttttgagttcccaatacgtttcatagaaagtagtgcttttgtcagcacagactgctaatctacatcttgctgcgttctgtttgctgaggttgggcttattcatttaacacgtaccaaccattatccagaggcaccatggagagttagtcatggaataaagcactgtccttgcagatgaaaaaagtctccagagcagacttctgacaggaaaggtttagatgctggagagttgaagaggtgtaagaagagatcgtgccctcatttttcacttatttttttggttattcatttataataaaaggttggcattgatatggtacaacctgcaaattacttgcagttctgagtttcagataaaacattataaaacattaaattcaatacatactgctcctttgaaatttgggtaaaaaattgtacaaccgtatatatagtcatttttgtattttttctatgttgtgaaaaccaaaattgtaattttataagtctttgattcactaaaattatataatttaaatgtattttttgtatatttagaaataaggagtccagagactacgcttaactttctatgcatgcatttgaaagctgtttttacctgataatgtagtaataagttgtattcataaaatactgatctgtgttgcatttcaaaataaactggtgtgtgctctgcctggatttgaaatacc

SEQ ID NO: 100468 - DNA, 2726 bp, Homo sapiens
agcggggctttgccctcagccaagatggcggctgccgtggaccctgtcccggctccgccccgcggccctggccccgcctgcccctcgtcccttcctccgccccctctcctcgcgtagtccggcccgagccgctcgcgctaggagagcgggcttcgggcacttgacatggcggcagtggcggcgactgcagcagcgaaggggaatgggggcggcggtgggagggccggggccggggacgccagcggcacgcggaagaagaagggcccggggcccctggccacggcgtacctggtcatctacaatgtggtgatgacagccgggtggctggttatagcggttggtctggtccgagcatacctggctaagggtagctaccatagcctttattattcaattgaaaagcctttgaaattctttcaaactggagccttattggagattttacattgtgctataggaattgttccatcttctgttgtcctgacttctttccaggtgatgtcaagagtttttctaatatgggcagtaacacatagcgtcaaagaggtacagagtgaagacagtgtcctcctgtttgttattgcatggacgatcacggaaatcatccgttactccttttatacattcagtctattaaaccatctgccttacctcatcaaatgggccaggtacacacttttcattgtgctgtacccaatgggagtgtcaggagaactgctcacaatatatgcagctctgccctttgtcagacaagctggcctatattccatcagtttacccaacaaatacaatttctcttttgactactatgcattcctgattctaataatgatctcctacattccaatttttccccagttatacttccacatgatacaccagagaagaaagatcctttctcatactgaagaacacaagaaatttgaatagttcctgctttctgcacctcccaccaaaacaaacttttcaatgatcaaaaaatgctgcagattttttgagttcccaatacgtttcatagaaaataagtaagaactatttttaaaatattcaaacaaaactaaaacaaaaatccagtgtcacatgggcctgagattttattttagaaaaaggttgttacataaaacaccctggccagttcatttcagcatgctctttcaaccagaagttcttaatatttatgatggcactagaaagggatttggcattttatgtccttctgtgtccttcatgtatctgatcaatgaagacctgtaacactaagtacttgagagttacagtctgaataatgaagtcgtaccagctgaatagcccagcttgcagtatagttatgtttcagtctgcagtgtgtttagcattcccttgtcaaagtgcttgactgcatgctggaaactttgtatttttgaagcggcaaactctgttctctggaatgctctgaagttatggctgggacctatcccctcacatctaatgaatgaattataaaatgtatatgtctatgaagcttcggggtagtgcctgtaatcagaaaacaacttagaacccttttgtttgtttccaattgagtcattactgcctgccactaagaaacgtgcttgaatctaataagtatgtgtgtaccgtaaagaatatatcttatctggagctcagcctcaatcatgtcttaacaaaatgacaggtctcagaaagggggagctcaatagctcaaaagtgacaagtccttttcacagcaccgttctcagaacacctctgagtaacgtgtttgccagtagctattctcactgatgcactgatggccctgaagaagcggatccagtcacataggaaaggaggctgtgttagtgaaagcacatggaaggtgttgctttagaaaggtagtcaggaaaaacattcaggaatagatttatacaccattattgttttatttttaaattttcattcactcttctgtttggatacttttgctaattaacgtcctatgttaatttccaccaagctataagtccatagtcagtaaaacattccccttgggctgtcatgagctaaaagcagtgtcatctccgcatgttggagcagccaagaaatagtttggtactaccgacattgtctaatccatgtcacatcctcatacaatttaattgctcaaccatgcatttaaaactcctcaagaaaggattggtactgcaactgtaggtaaactgaaaaaaaataagaaagaaagagttggatgaaaatgtgaaagcccaagtttagatgtgcattaagtattaaatagcacagtatcttcttcatggagccttttttcctcccccatcccctgcagctgcctttttttgggggcagggtgggggttgatgttgaactttaagagtttaaaagtttagcttattgagtagttgtcatttaaaatataattgcgaatatcagaaaactcatactggaaaactaaattttttttttctcttgagacggagtctcgctctgttgcccaggctggagtgcagtggcgcgatctcggctcactgcaagctccacctcccgggttcacgccatcctcctgcctcagcctcctgtagtcccagccactgaggaggctgagtcaggaggatcatttgagcccaggaggttgaggctgcagtgagctgtgattacaccactgacgccagctgggtgactgagcaagacctgtctcaaaaagaagatcaatgcctcccctgacgagtggggcg

SEQ ID NO: 100469 - DNA, 1395 bp, Homo sapiens
agcggggctttgccctcagccaagatggcggctgccgtggaccctgtcccggctccgccccgcggccctggccccgcctgcccctcgtcccttcctccgccccctctcctcgcgtagtccggcccgagccgctcgcgctaggagagcgggcttcgggcacttgacatggcggcagtggcggcgactgcagcagcgaaggggaatgggggcggcggtgggagggccggggccggggacgccagcggcacgcggaagaagaagggcccggggcccctggccacggcgtacctggtcatctacaatgtggtgatgacagccgggtggctggttatagcggttggtctggtccgagcatacctggctaagggtagctaccatagcctttattattcaattgaaaagcctttgaaattctttcaaactggagccttattggagattttacattgtgctataggaattgttccatcttctgttgtcctgacttctttccaggtgatgtcaagagtttttctaatatgggcagtaacacatagcgtcaaagaggtacagagtgaagacagtgtcctcctgtttgttattgcatggacgatcacggaaatcatccgttactccttttatacattcagtctattaaaccatctgccttacctcatcaaatgggccaggtacacacttttcattgtgctgtacccaatgggagtgtcaggagaactgctcacaatatatgcagctctgccctttgtcagacaagctggcctatattccatcagtttacccaacaaatacaatttctcttttgactactatgcattcctgattctaataatgatctcctacattccaatttttccccagttatacttccacatgatacaccagagaagaaagatcctttctcatactgaagaacacaagaaatttgaatagttcctgctttctgcacctcccaccaaaacaaacttttcaatgatcaaaaaatgctgcagattttttgagttcccaatacgtttcatagaaagtttcgctgttgttgcccaggctggagtgcaatggcacgatctcagctcactgcaaccttcacctcccggattcaagcgatgtttctgcctcagcctcccaagtagctgggattacaggcacccgccaccacacctggctaattttttgtatttttagtagagatggggtttcaccatgttggccaggctggtctcgaactcctaacctcaggtgatccacccgccttggcctcccaccacgcctgggattacaggtgtgagccaccacgcccagcctgttagtgtaacttttctaacagaagttcagcgggagatcctgttgcccagcactgttcatcttacattaaagcaagatgtggtgaagttcaagtac

SEQ ID NO: 100470 - DNA, 1200 bp, Homo sapiens
agcggggctttgccctcagccaagatggcggctgccgtggaccctgtcccggctccgccccgcggccctggccccgcctgcccctcgtcccttcctccgccccctctcctcgcgtagtccggcccgagccgctcgcgctaggagagcgggcttcgggcacttgacatggcggcagtggcggcgactgcagcagcgaaggggaatgggggcggcggtgggagggccggggccggggacgccagcggcacgcggaagaagaagggcccggggcccctggccacggcgtacctggtcatctacaatgtggtgatgacagccgggtggctggttatagcggttggtctggtccgagcatacctggctaagggtagctaccatagcctttattattcaattgaaaagcctttgaaattctttcaaactggagccttattggagattttacattgtgctataggaattgttccatcttctgttgtcctgacttctttccaggtgatgtcaagagtttttctaatatgggcagtaacacatagcgtcaaagaggtacagagtgaagacagtgtcctcctgtttgttattgcatggacgatcacggaaatcatccgttactccttttatacattcagtctattaaaccatctgccttacctcatcaaatgggccaggtacacacttttcattgtgctgtacccaatgggagtgtcaggagaactgctcacaatatatgcagctctgccctttgtcagacaagctggcctatattccatcagtttacccaacaaatacaatttctcttttgactactatgcattcctgattctaataatgatctcctacattccaagttaaatcagacagggttggacttctcctcattgcatggcatcatcggaatgaatcaccctaacaaagcgacatgcttgtgtccctctgtggaaaattgcatttcatgcattgtgagaaaaaaactacatccagatttcatgtgagtgtttatcttgcagaaattcttggatacagttctgcttcatgattcattttccactctttattcatgttgagtcctctctagtgctggaatcatagcgaccagaggccatctctcttcaaatgtaaaaagtggttgattttcaaacagatgataaatgtgaaatcatctaaactactaagtaataaaaattaactggtagtttatca

SEQ ID NO: 100471 - DNA, 407 bp, Homo sapiens
tagaccaaaataatgtcaacactaacaaacactagtcaacttttctgattcacatgtttgttatggctaaagagttccaggtcagagttccaggtcatgtcaatatagctgagataaagctcacattcactgtaggaactgggttaatagtgggaaacatatcccagatatgcagtgttgttaaaaagaagactgattaaatggtaaagtcctgtaatctgagttctcatggaggttcagatggtgtggatgtggtctgcaactcagttatatttttctgatatcttgttcgtatcatgttgcccaggccgctctcgaactcctgagctcaagcaatctgcctgcctcactctccccaaattctaggatttcaggcatgagccaccacacctgacccaagtcatcat

SEQ ID NO: 100472 - DNA, 762 bp, Homo sapiens
agtctaggataaatcagtttttgaaattatgtaggctactagatgcatttattattttgttcaccaagaggtactatggaagattgccttttcattttacctaattcatattgcagttctcctggaaccatgtgaacatatcatttaaaattttgcatttcaagagttaatccttcccatgttggtaaaatgcttataatatatacattgggttagccaatgatttgtttttttttttctcatgtttagaaaaaaacaaaagataatgagccaagatttattaagatttattaagtgttttctatgtcaggaattaggttaaacactttatatatcttattctttattttgaaaaatttatatacctcaagcatacatcaaaatatagaagataaaactaatacctgtgtacctaccacccaattgtgtcagttcttaactttttgccatatttgtttcagattttgttatgtttcatgttttatttttgttaagaaattaaatatcgcagaaataaatgaatctctgtatgcacttatttcctcacctgtttccttctgtcccttcccagtggtaattactatccttaacttagtgtttttcaatactattcatgctttaatactttatatgattatacctgaaattactttatagtgccatttgtcacatttttaaactaataagtgatgatagcatgctgtatgtatcctgcaaaagctattatgtgctcaacattatttttaatatttgaaatatatt

SEQ ID NO: 100473 - DNA, 351 bp, Homo sapiens
cttttccatcttagctaagcgcttatgcactgtggctgtaacttttgcggcttgagggatgatggcaaaactagcacaaaattctttttccttcttcacagtttcaaggatagaagattcattcttaccatagatcttgcaacctcagcatatgacttttccttccttcctcaagaaactttccaccaaaaggaagccctgtatggcttctctttggcttatctgcattgccagcatcattgcttgcactacggggcaatcatgaagcagaatacaactgcttgatcacaagaaccgtgataccacaatagttgatctgatcatggagctggctacgtagtgactaacggg

SEQ ID NO: 100474 - DNA, 533 bp, Homo sapiens
cttgtctacacttacatgtttgtatactcttatggtgtaaaaccctggcctcttctgtctccatgaacatgccatcccttggctcacagtctgcagaaaactaatgatagaaagccaaggtcctggccttaatctgtgagaatcagtcatcctgctgtgcttcatggtcacagactttatccttcatgcaggatctgagcacagatcagcatattcagtggtcattacggtgagtctctgcttaaagaccaaataggggaaagtatggataaaacagcacaaatcgaagagcaccatgaagtaactttcagtgttttaaatataatgatgaaataaaaatgagatatcatttttaatatcttgacaaattataaaatgcttctcccacctcttcatccttcctcttcttcattcttcattgacattggcatatatacttgttcccatgaaatgagttagtggagacaaatgctaatttattaaacacttgcatgccatattgatggtaagtgtcattggcagaactggatatc

SEQ ID NO: 100475 - DNA, 262 bp, Homo sapiens
ttcagaatcgcttaagcaccactttaggtgaactctatctgttttgattaacttttatctttcattatatattttataattttcattatttcttttaaagagatgtttttaaaaacatttttaaaatttctgtgtacacacacacacacacttgggttctgtaactgtccattgggtcaagtttttctccttcaaccgtgccttatgacactttattgaaatgtaccaattcaataaaatacactatggtagtaggtgatca

SEQ ID NO: 100476 - DNA, 807 bp, Homo sapiens
ctttgacccaaagacaacttgcttacaggaatgccttatcaccaccttccaggaagcctactttgtttcagaaagttttgaagaagccaaagaaaagatgaggtacagattggcaatatggcccgtacaagcactgtttggggtgctgttgttacagaaacacaactgatgtctcctaggggtggtaagacaacaggataagtgcaaagagaaataagagcatcaggttgatgcttaagggacttcactggtaataccaatccagaagcagttgctgtagtacaatgatggaatggcctactgaagactcattgtatgacagcattgctcactcttgggtccatgcggcttgtatgaactgtaacacttgccgcgaagatctgcaggttcactcctgagcccagcgagatcacgagcccagccgggaggaacgcagcaagatccagacgcgctgcttaagagcgtgtaacagtcacagcgaaggtctgctagcttcactcctgagcgccagggagaccagaggcaccaggaggaacgagacaatgccagacgcgcggcttaagagctgtaacactcaccgcagaggtgctggagctgtccactcctggagccaggcgagacctacgaacccaccagaaggaagaaacttccgaaaagaaatctgaacatcagaaggggcagactctcgaggcgccactgaaagagctgtataaaactcaaccgagaaggcgcggcgggttcatcctgacagcagtgcgaccagaacccgcggatccgacacaatggatggaaaaaaaaatccctggg

SEQ ID NO: 100477 - DNA, 753 bp, Homo sapiens
ctttgacccaaagacaacttgcttacaggaatgccttatcaccaccttccaggaagcctactttgtttcagaaagttttgaagaagccaaagaaaagatgagatgggatttttctacttacccatatgcatgatggaatatggtgactttataacttctgaggtacagattggcaatatggcccgtacaagcactgtttggggtgctgttgttacagaaacacaactgatgtctcctaggggtggtaagacaacaggataagtgaattctttatctaacaggtaataactcaaatgcttcgtcaaaggctggttttccaggcctgttggagacagaccacttggataagaaacagtcaagagactttatcatctgtttctcccatgtccaactgctgtggaatgaactgggtgcctccagaattcccaactgaagccctaacttgcagtgtgactgtatttggaaataggacctgcaggaagtaattaagcctaagtgaggtcataagggtagggcgctaatccgataagtctggtgccttatgagaagaggaagagacaccagagctgtctttctaccatgtgaggacacagcgaggcttgttggtgttgattacatggctctaggaactgtctgagaatcaaggaatttctacaactgttctcgaaaaagctgtcatcttttgtagcctcaagactaatttagatggaaatcagatggaaagcctgatgctgcagtttgttgaattataag

SEQ ID NO: 100478 - DNA, 595 bp, Homo sapiens
ctttgacccaaagacaacttgcttacaggaatgccttatcaccaccttccaggaagcctactttgtttcagaaagttttgaagaagccaaagaaaagatgaggtacagattggcaatatggcccgtacaagcactgtttggggtgctgttgttacagaaacacaactgatgtctcctaggggtggtaagacaacaggataagtgaagagaaactgaggcacaagtgttatgtggtcaagatcatacagctaataggtggcagtctgactccaagtgtgtgcttttcactgctgtgatatgccaataaagcatctacttatcagttggctttgaacttggaatagaaaaggagcatgattatattactctaaaacctcagtctcaaactcgaaaagccattaaaaaagaaaacaataaataaaacttctatcaaggctcaagacttctctcatcattgaaggtcatggtaaatcttttactttccatctcccaacctttatactgatattccttgtttggcacttacttattgccatgtgtatttatagatttggttgtatgatgtagtctcctttagagtgtgaacttgttgaag

SEQ ID NO: 100479 - DNA, 469 bp, Homo sapiens
ttggccaggctggtctcaaactcctgaccttaggtgatccatgtgcctcagcctcccaaagtgttgggattacaggcatgagccaccatgcctggccaatcatgccatattatcccctctatcagtatagaatatggacactgtttctattttggtgattaccctagaccaggggtccccagtccctggggctgcagaccagtactggtctgtggcctcacagcaggcagcaagcagcaggagagtgagcattaccacctgagctctgcctcctgtaagatcagtggcggcatttgattctaataggagcacaaaccctattgtgaactatgcatgcgagggatctaggttgtgtgctccttatgagactaatacctgatgatctgagatggaacagtttcatctgcaaaccatccccacacccccaccccagtccatggaaaaattgtcttctatgaaactggtccct

SEQ ID NO: 100480 - DNA, 455 bp, Homo sapiens
caaggagcctgggagccacttcggcagaagcagagcttggacgttggtgatgggagcccagtgaccccagccagcctttctggctgagcgactgcactggcatgaaaccaagatggggttcggctcctgaggtttcctccttcctgcccctgattgcttttcccacctcactgtctttcccctactcccaccagtctgctgtatggggctcctgcccttgcccacttcttacctttccatttgtctccttcccttcatcgacccgaagcatcttcctcatcctccttggagagatggtttgctggttcacgtgtatctctcactccaaaactatggccaaaatcctgtgtaattatttacttagtaaagatatttgttcctgctctctcagtttttatagcagtgatgtgaatcatttctatttcctcactttaaaggaaaatgcttttattatt

SEQ ID NO: 100481 - DNA, 535 bp, Homo sapiens
atcttcaaccagggcagagccaccacgactgggatctgaaacatcatggccacagcacagcatcttcaaccagggcagagccaccacgactgggatcggaaacatcacggccacagcacagcatctccaacaagggccgagccagtgtcttgagggagaggagagaaatgctgtgtgcgttttggtggtagtgctggtccgaggacaaaattccaggaagtccatttacggatcctgtaggtcagacccttcacatccagacagccctggctggacgggaggagacccagcctgaaggccagagcactctgctgggaccaggctcatcggagctacggaagggacttacagcaaagcaaaagtccaaagacaaaagctctttttggccaaacgtggttggagaagcatgagacagccccttggtctacggccccttggtctacgactcctacagctccagaactggcatttctaggagattcctttgcccatttcttcaccaacccccaggaaccaagggccaggcagtgtcctc

SEQ ID NO: 100482 - DNA, 200 bp, Homo sapiens
tcagatgaagtgaaaataattatacaatctgaaaaatgctttataataagacatttatgatctttcacagataagataaaaaggaaaaacattcataatgaagactaagaaaatataaaacaaaaccatgcaaaaatgatatgataacaggcagatctaaaaatagcttattaaacaattagagaaaccgtcgcataaac

SEQ ID NO: 100483 - DNA, 301 bp, Homo sapiens
gtttcctcctctgaaaacttatactgttcttgggagttctgagttgtctggtgtatctgtttcttttgctgggtgcttcaccttggcttcctcccaaatgcctccagcaactgtttatttttataaatgttgtatacacagggcagaagatagagaaaggggtgagccagagtcatttacgaaagcactttggcattctgctctggaaatcatttccgcaggaggctgccctggacagagtgcacttactctcagacctcccatccccacttccaagcagaagtcaatgcaatttttattt

SEQ ID NO: 100484 - DNA, 1749 bp, Homo sapiens
tgggaagatcatttgagcctgggaagttgagccttcattgagctgtgattgtgccactgcacttcagcctgggtgacagagggaggccttgtctcaaaaaaacaaaaacaaacacatgtttacggatggtttaggtttcttcaaatatcttaaggtggttggttttcctaaagaggtttctttaatggtgatagactgtcactgtgctatgactttaagctagattgcagtagttacttttttaaaaagaaatgtttttaaagtaaaacttgagtttgcattaatagtttggctctaacaacctaatattttcaaattaggaaaaatttgaagctctcacaagtaattcagcattaaatatgagaatgtactaaagcatagggtggattgaggcactgtatgttatgctactactaaggtagtagcaaaataagctcttatgggtgttatctgctgccaggatggccagattgaatcagaaacaaagtcaagatttcagctggtcaacctgttttatttaggacaatgtttggcaaattggagagtgtgacctgtaagtgggttgtaaaattaatttagtggatcacgaccagtgttaagaaaactgtaatagaagagaatagaaaagatgacagtatgttacatgcagtaacggtaattacttgtttgttgcagttgttgtatgtattggttcatggtgtgaaatgtatttcttaactacatggtgtttactatgagcacttagcacagctcatagaacattcaagataataggcagtcaatgaatgttcaactgcactaaatttaatttaaacttatataggaaaaaattgcacaagtaatttcagaaaagttttctaacacaaaatggcattaggaaaattggtagaactttaactgttgtgctggaattatcttgttatatgcctgtgaccttcttgggtctgtggggacttagctttatatcagtgtgcatgatggaagagcctgatttttagagtcagaaagaactgcgttccaattttgtctcttgacccatataaacttctggacattgggcaatttttttcagcactctgagcttcaaattcctcatttaaaaaagacgacataatagcacttacctaacgattaagagagggatcaattctaaacatctaatactttgcctggaacatagtagatgcttaataaacagttaattaaaagggtatgaaacataattgaatactagtatatattttaaaacactgttttgagtatccaggaaaaagtatgaagtgtaagagtaattaaatcacatgcatgggtagaaattccttgtgaccttttgaaaaattgaaaaaaagcataattgtaaaagattgcttccttttttaaaaaaaaaattgcccagttagcataatatgcaagatgtaaactagaaattaaatgagccaaaaccagagttagttgcttgtaaagattaaaagtgaactcacactgggtgtggtggctcacacctgtagtcctagcactttgggaggatgaggcttgagccaggagtttgagaacagcctggacaaaatagtgagactttatctctacttaaaaaaaaaaaaaaaaaaattagccggggtggtggtgtgtgcctatagtcctagctactctggaggctgaggtagggggattgctggagcctaggagtttgagcttgcagtgagctacgatcttgcttgtacttcagcctgggtgacagagcaagacttt

SEQ ID NO: 100485 - DNA, 1026 bp, Homo sapiens
ctcattggtggaaggaacttgccttgtctcagctgtcatgtaagacatgctgccttgcttccccttcaccttccaccatgattctaagtttcctgaggtctctccagccatgcagaacttttcaaacccctggaatcatctgattggttcgcttaaaagtccaccttcgtccaattggttttctcaaagaggacagatttgcacatggcaaacgtgactcatgaacaaattctctatgtgtccccatgaatgaaaggccagttgctagagaaagaaaatcatatattgggcagatgcctaaaagttgttacctgatgactgtgagagagaggagaagcagtaaacttttagtggaaaatgaataaataaaaggacatcaggacgagatgcaaaggaaagatgagaagatgatgactttgaatcagaatggcagagagatttgaagtcaacaatcacagaagaatcatccataatttagtgggtaatctctctactcttggtctcaagtggacattgagtaagtattaccagatacatatatgtttcagatgtgtagatttatagtatatacttgcatcaggattaggcagtatgagattcaacctatgaatattttcccacttctgttacttcttctacatttataaatcaagagtaacacaaaaattcatttcataatacattattttgatattctttcatcatttgaatgaaaagcagcttatatttaaaagggagagaagaaaaaaaaccaactaaccttgagtttctgctgaagtagctgaggatccaagatgctctaggctgcaagctgaagtttgaagaaaattcagcctgctgacttttatcctctcttttggacaagatgactgtgggcaatttgggcctctggctatgaaacatgaacctgtctatccgcgttattaatggatacttgatgggatgagctaacaatgactttggtttctttgaaaaaaggaaatttcttgagataggaaaagccaaataaacagaaatacggtgaca

SEQ ID NO: 100486 - DNA, 1059 bp, Homo sapiens
  misc_feature (4)..(4): n is a, c, g, or t
  misc_feature (233)..(237): n is a, c, g, or t
aaantcttaactataaacgggggggccttctttttttttacaccccccccaccccctttggggagggacttcctttttttccctcctttttaaaaaaggcctttttcccctccccctccccaaaaaatataaaaaccggggggtttccccccccccaaaattttttaaaccccggaaattttttttttttttttttaaaaaaccccccctctctccccgccggggtttttttnnnnnaacacagctgcggctcatgaacaaattctctatgtgtccccatgaatgaaaggccagttgctagagaaagaaaatcatatattgggcagatgcctaaaagttgttacctgatgactgtgagagagaggagaagcagtaaacttttagtggaaaatgaataaataaaaggacatcaggacgagatgcaaaggaaagatgagaagatgatgactttgaatcagaatggcagagagatttgaagtcaacaatcacagaagaatcatccataatttagtgggtaatctctctactcttggtctcaagtggacattgagtaagtattaccagatacatatatgtttcagatgtgtagatttatagtatatacttgcatcaggattaggcagtatgagattcaacctatgaatattttcccacttctgttacttcttctacatttataaatcaagagtaacacaaaaattcatttcataatacattattttgatattctttcatcatttgaatgaaaagcagcttatatttaaaagggagagaagaaaaaaaaccaactaaccttgagtttctgctgaagtagctgaggatccaagatgctctaggctgcaagctgaagtttgaagaaaattcagcctgctgacttttatcctctcttttggacaagatgactgtgggcaatttgggcctctggctatgaaacatgaacctgtctatccgcgttattaatggatacttgatgggatgagctaacaatgactttggtttctttgaaaaaaggaaatttcttgagataggaaaagccaaataaacagaaatacggtgaca

SEQ ID NO: 100487 - DNA, 1026 bp, Homo sapiens
ctgaaggcttgccctggctattctgccgttgacatgggcctcaccctaccacggggataggtcttggatggagggaagagggagactcaccgggggcctcctgagtcctttgagtgtccccatgaccccagcacctgggacagctgctggaaagagggtactggcaaaaatttgctaaatggacaatcataggcccagtgtggtggctcacgtctgtaatcccagcactttgggaggccgaggtgtgcagatcactgaagtccaggagtttgagaccagcctgggcaacatggtgaaaccccatttctacagaaaactacaaaaattagctggacacggtagcacacacctatagttcctgctactcaggaggctaaggtgggaggatcgcttgagcccaggagatcaaggctatggtgagccgtgatcgtgccactgtactccagcctggatgacagaggaagaccctgtctcaaaacaaacaaaacaacagcaacaacaagaaaacaataatagggacattgagtaccctttctggcacctggcactctgccaaatgctatgcacactccgcccttcagtcttcccaggaaccctgtgcagtttgtagcgtggctcacatttgccaagaaggaagtgaggctcagcgaggttaagcagtgcctgtggagtcacatggctgcaagtagtggcctggactggactgcagagcccatgctccccaccgctttccatggggcaactctaggccatcattctccacccctcagacccaaagctgccttttcataatgcttgctgttgctccctttatgctcctgaaatgaaatttatggctaatatgccagcctttacatctaattaaaaatcatccaatggtttttttgtccttattaatatataagaaataaaaggtaatgataatgtgtttgtgaagtgcccagttgctggggaggtcacagctctgtgtacagactgatgctcgggtgtggtggtgtcaacgtctgaaacgatgaatttggtaaa

SEQ ID NO: 100488 - DNA, 948 bp, Homo sapiens
ctgaaggcttgccctggctattctgccgttgacatgggcctcaccctaccacggggataggtcttggatggagggaagagggagactcaccgggggcctcctgagtcctttgagtgtccccatgaccccagcacctgggacagctgctggaaagagggtactggcaaaaatttgctaaatggacaatcataggcccagtgtggtggctcacgtctgtaatcccagcactttgggaggccgaggtgtgcagatcactgaagtccaggagtttgagaccagcctgggcaacatggtgaaaccccatttctacagaaaactacaaaaattagctggacacggtagcacacacctatagttcctgctactcaggaggctaaggtgggaggatcgcttgagcccaggagatcaaggctatggtgagccgtgatcgtgccactgtactccagcctggatgacagaggaagaccctgtctcaaaacaaacaaaacaacagcaacaacaagaaaacaataatagggacattgagtaccctttctggcacctggcactctgccaaatgctatgcacactccgcccttcagtcttcccaggaaccctgtgcagtttgtagcgtggctcacatttgccaagaaggaagtgaggctcagcgaggttaagcagtgcctgtggagtcacatggctgcaagtagtggcctggactggactgcagagcccatgctccccaccgctttccatggggccagaattttgcccactgccttggccgagatttgaagaccatcagccatattgagtttctgtgggttgtattcctgtttcttcaaggggtgtatgtcagtgactgtttgcacaggtagcttatttatgtgcagcattgctgggagtgcatgagcatgtttaatgcctgccatccacggaatatcggggtgtgttgcagtgtgctttcct

SEQ ID NO: 100489 - DNA, 684 bp, Homo sapiens
tgtcagaactggccacattttttacccaacaattgctaacaagattagtgtcattttaaaaaaaatcttagtactcatcatactaaaaacatgcttgacccttgcagccctttctttacctcctaatgcaaagggagccttaaatgcccacatgaaaggaaagcaaagctcttgagttttactcactaaactgtaagctccttaagggccgaaatgtatcttagtcatataaatatctgggcactcagttgatgtttgtggatagatggacagatgttgaaagaggcaggtattcgtactcctgttttagatatgaaaaatgtaagcaaaaaggattaattaccatggctgtggtatgaaacttgtttaaagttggcatttaaattcaagtctgcaacattaaagttctgtgtacagagccgttttcccactgtagcagcagcgcagcagcagcgctgctatgattgattaagcacttgctatgtgccagagttaataattgtgataatatattaactcatttaattttcaggaaactaagacatggaaaggttaggtaacttgcccaaggtcgcacagctagtaagtggcagacatccagagtctctgctctgctcttaactctcaccatactacctctgtatccatttcataaataaagatagtagtttcttataacagtaa

SEQ ID NO: 100490 - DNA, 357 bp, Homo sapiens
ccttcttgctgcatcatcccatggcagaggatagaaaggcaggagagcacgcccaaggcagagtaggaaggaggccaaaaccatcctttataaggaagccactcctgctgtagtgaacccactcccaaaaaaatggcattaatccatccatgatggcagagtctccatgacctaatcaccttttaacagtcccaattctcaacactgttgcacccggaattaaatttccaacacaaaacctttaggggacacattcaaatcatagcaatagtattatgactgttttacagagatggaacctgaagcccagagaggttacccagcttgctcaaggttatgattctaatacacagtgga

SEQ ID NO: 100491 - DNA, 941 bp, Homo sapiens
taatggatttggtaatgatggaagcaattttggaggtggtggaagctacaaggattttggcaattacaacaatcagtcttcaaattttggacccatgaagggaggaaattttggaggcagaagctctggccccctatggcggtggaggccagtactttgcaaaaccacgaaaccaaggtggctatggcggttccagcagcagcagtagctatggcagtggcagaagattttaattaggaaacaaagcttagcaggagaggagagccagagaagtgacagggaagctacaggttacaacagatttgtgaactcagccaagcacagtggtggcagggcctagctgctacaaagaagacatgttttagacaaatactcatgtgtatgggcaaaaaactcgaggactgtatttgtgactaattgtataacaggttattttagtttctgttctgtggaaagtgtaaagcattccaacaaagggttttaatgtagatttttttttttgcaccccatgctgttgattgctaaatgtaacagtctgatcgtgacgctgaataaatgtcttttttttaatgtgctgtgtaaagttagtctactcttaagccatcttggtaaatttccccaacagtgtgaagttagaattccttcagggtgatgccaggttctatttggaatttatatacaacctgcttgggtgaagaagccattgtcttcggaaaccttggtgtagttgaactgatagttactgttgtgacctgaagttcaccattaaaagggattatccaagcaaaatcatggaattattggttataaaagtgattgttggtacatcctatgcaatatatctaaattgaataatggtaccagataaaattatagatgggaatgaagcttgtgtatcatccattatcgtatgtaatcaataaacgatttaattctcttga

SEQ ID NO: 100492 - DNA, 388 bp, Homo sapiens
agcctaggacacaggttttagagcaaaatttactagctgaattacttgatataagtgatttagcctccctgagtctcaatttctcacctaataaaatggaaatgacatcacccacttcactaggattccgtgtgaattaaatgagatgatgtaggcaaaacacctggtttatggtaggtacttaataatgttagctaccttccctgaatccctaatgctggcccataatttgtcctcaaaacagataagccattcatggataaataggagttgaccatagtactatttacgattacttgtgcttctgctgcaaaatacaggagtgagctaagattgtactgaacgcattcattttctttttaattttttttttttgagatagggtctc

SEQ ID NO: 100493 - DNA, 777 bp, Homo sapiens
catgatttttcagcaattctggggcattgatatgaaacactagataagtaggtggcaatggctctgaaaatattcttgaggtgcaaattgaacaattaattgaagaacttagagaaacactgactagagaaaatcaaggggctggctatggtggctcacacctgtaatcccagcactttgagaggcggaggtgggcagattgcttgagcccaggagttcaaaaccagcttgggcaacatggcgaaaccctgtctgtacaaaaaatagaaaaattaaccaggtgtgctggcatgcgcctgtggtcccagctacttgggaggctgaggtgggagaatggcttgagcccatgaggcaaaggttggagtgagctgagccgagattgcaccactgcactccagcctgggcgacagagccagatcctatctgaacaagaagatccacaagagaagtaacgtgaaatcacctgttttcgggcgactcggggacttccgaagaggtttctcacacaccattacgcttggtgcgtcagggcgccccagtgtggtacggtcgaccctgggctcaaggcggtgttcacgagagaaagccgcgggtcaatccgccaacagcgcgtgaggattcccacacccattaaaaacacaccgccgcgggggagcaaccacacggctttccggaaaacaaaccccacgacgggcgttctccaggggcccataagggggcaccatcacaacagggcagctcccagagggaaagcgcggactaccaaatgtagccccg

SEQ ID NO: 100494 - DNA, 756 bp, Homo sapiens
ggaacagaaaatggagccattgcttacgcgaatcgtttgagggaaggggcgggagttggggaggtggagttccctgttaaaacgggccacttgattagcaaagtggtagctgttattttgggggaattcccgtcttgattgcattaaggcgggtctccatctttccaggccaggaggaatgtggtggtggaggtggaggattgtggtatgtggtcaggagtgagaagaaatagtaaggccgtcccggtgagggagaaatgtaacctaaaacctgtctctgctgttgttggattgggtcacccctggtctatggcatgaaagttttattgggaggagatctgctgcaagagtctgattgcttgggtcagtgcaacaggacagaatctagtcgctgcatacctccttccctgtcctcaatcaggatcacagtctatccatacacagggaccaggccaacaccagactgccaatgaccctacattgggacaccacagatcccccagacaagcagctgctgtgatcatgggcaatatctaaggcaaccttctacaagagcctgatcggcgcaaacaggagactgcgcatcctgactgggttgggacatgggatgccggaagggaaagaaccaaagatccttatacaatgctgaaactgggggaagaatcgtcaacacacaatgcattaccaattgggttcacatggtggatacaggtggagtataataaacattagattttaaaggtgtggggaatgtgg

SEQ ID NO: 100495 - DNA, 779 bp, Homo sapiens
gggaatcaggactcagagaacagacactaatactctggttactgtgatttctctgaataataaactgtcctttatctttgacccagaagtctttgtcttctgtcagcatccatggaactgtggctcaagcagggtaaaatctcagagtcttcatagttcttgacaggaagcaggaaagtatgatgcacaggaaaagaaaagttgataaatggaactcaacccataaatgatgcagatgatagaattaatatgaaagggcatgttaaaagttgttataactctgttccacatatttacaaaattaaaattaggactgaccatgttaattcgagacaaagaagttatagaaagacccaaattgaatttcaaggaattcaaaacacagtgcctgaattaaaaattatacttgatgagaacagtggcagattagatactatagaagaaaagattaatgaacttgaagatgaagcaatagaagctatccaaatgaaaacagaataagtgactgaggggaaaaaaaaagagcatccatgagctatgagacatcttgaagggtggttctaattacaatataaatgaatgtgaatctctgagggtgaatgtgggagaaagggacagaaaaaatatttgaagtaaaactgattaaaatgtttcaatgtgatgaaattatcaacccacatatgcaagaagttctatgaccccaaagcataagaaacataatgaaaattacacctaagtacatcataatcaatttattcaacaccagcaataaagagaaa

SEQ ID NO: 100496 - DNA, 224 bp, Homo sapiens
tgggttttgagggtcacaatggccaggccctcccctatggccataccaagcaacccagggcaggggtcacattttatatccaagtactagggacacacgaaccaaggcatggccttttcttacaatttaaaaaattgagatgcaattcatataaaattcatcattttattatacaatgtagtgttttttagtacattgaccgtgttgtgcaacccttaccccaa

SEQ ID NO: 100497 - DNA, 192 bp, Homo sapiens
taacctcatttcacaagcgaggaaaacagggccatccaaggaggctgaaaggcacgcccagaatcccaccactagctgtgagcagcacagctgcggcactcgctgggtcctaggcctgcagaatgagcatctacgtctgtcttcctatgattcatgctcaagtctctcttcacacttgcagcaccaatgaaa

SEQ ID NO: 100498 - DNA, 201 bp, Homo sapiens
tctgcatcccccatccccttgagaagggctttggtataacaggagttcaggaatatcagacattcagagtaagtcaccaggataaggcaaatcatgccttggagaatatcacccacatctgtatagagttacagagaagggtccccatgcgtctcattgactgtatatgggaccaactggtggctggctggttgtcatggc

SEQ ID NO: 100499 - DNA, 692 bp, Homo sapiens
gatcttggctcactgcaacctctgattcccgggttcaagcgattctcctgtctcagcctcccgagtagctgggattacaggcgcccaccaccatgcctgtctaatttttgtacttttagtatagacagagtttcaccatgttggccaggctggcctcgatctcctcacctcaggtcatccactgccttggactcccaaagtgctgggattacagctgatggttttataaaggggagtttccctacacaagctcttttgcctgctgccatgtaagagatgtgactttgttcctcacctgccttctgccatgagtgtgaggcctctccgaccatgtgcaactgtgagtcaattaaacctctttttttataaattacccagcctcagatatgtctttattagcagcgtgagaacagactaatacaacctgtatgccagaaaggctgggagcacctgtggactctgacaggctgtacagaaagcatagcactggcttctgcttctggtgaagcctctgacaactgacaatcaaggtgaaaaataaatccggtgcttgcacatcacatgccgcaatactgacatgacagcagggcgcttggtacacagcttccactgacctggatttggattggtttggcctctataatgaagtttgatgtctctgctttactgacaaggtattaatgtggttgttt

SEQ ID NO: 100500 - DNA, 4256 bp, Homo sapiens
gagtccagctgccgtcgccgccgccagcggacggggcggggatcctggtgccaggtcttcgttaacccgcccccgcctgcctcagtcagctgtcccagcccgggcccgaccgtcatggagcggtgcggggcctacgcctgttccgtgtgaggcgcatcgctgccgccgccgccgacgccgccttcgtttgtcgaggcctccggaacccccgccgcctcccggagcccctcgcccttggcagcctgtcaccgccccctgggcgggctcgaatgcgcgtccggtgaaggtgcaggcccggcgccgccactgccgcagccaggagatggttcgggcctagcggagccgggactggagcaacatgaaccgtgaagaccggaatgtgctgcgtatgaaagaacgggaaaggcggaatcaggaaattcagcagggcgaagacgccttcccacctagctctcctctctttgcagagccatacaaagttactagcaaagaagataagttatcaagtcgtattcagagtatgcttggaaactacgatgaaatgaaggatttcataggagacagatctataccaaagcttgttgcaattcccaagcctacagtaccaccatcagcagatgaaaaatctaacccaaatttctttgaacagagacatggaggctctcatcagagtagcaaatggactccagtaggacccgcacccagcacttctcagtctcagaaacggtcctcaggcttacagagtggacatagtagccagcggaccagcgcaggtagcagtagtggcactaacagtagtggtcagaggcacgaccgtgagtcatataacaatagtgggagcagtagccggaaaaaaggccagcatggatcagaacactccaaatcacgttcttccagccctggaaaaccccaggctgtttcttcattaaactctagtcattccaggtctcatgggaatgatcaccatagcaaggaacatcaacgctccaaatcacctcgggaccctgatgcaaactgggattctccttcccgtgtacctttttcaagtgggcagcactcaactcaatctttcccaccctcattgatgtcaaagtccaattcaatgttacagaaacccactgcctatgtgcggcccatggacggacaggagtccatggaaccaaagctgtcctctgagcactacagcagccaatcccatggcaacagcatgactgagctgaagcccagcagcaaagcacatctcaccaagctgaaaataccttcccaaccactggatgcatcagcttctggtgatgtgagctgtgtggatgaaatcctaaaagagatgacgcattcatggcctccccctctaacggctattcatacaccatgcaaaacagaaccttccaaatttccttttccaactaaggagtctcagcagtccaattttggcactggagaacaaaaaagatataatccttctaaaacttcaaatgggcaccagtctaaatctatgttaaaagatgacttaaaactaagcagcagtgaagacagtgatggggaacaggattgtgataagacaatgccgaggagtacaccaggaagtaactctgaaccttcacaccataatagtgaaggagcagataactccagggatgattctagtagccacagtggatctgaaagcagctctggatctgactcagagagtgaaagtagttccagtgacagtgaggcaaatgagccatcccagagtgcatctcccgagcctgaacccccgccaacaaacaaatggcaacttgataattggctgaataaagtgaacccacataaagtgtcacccgcctcttcagtggacagtaacatcccatcatctcaaggctacaaaaaggaaggccgagagcagggcactgggaatagctacactgatacaagtggacctaaagaaacgagttccgctactccgggacgagactccaaaaccatccaaaagggatcagaaagtgggcgtgggaggcagaaatctcctgcacagagtgacagcacaacacagagaagaactgtaggcaaaaaacaacccaaaaaggctgagaaggcagctgctgaagagcctcgtggaggcctgaagatagaaagtgaaacccctgtagacttggctagcagcatgccctccagcagacacaaagcagccaccaaaggctcaaggaaacccaatataaagaaggagtctaagtcttcccctcgacctacagcagagaaaaagaaatataagtcaacaagtaaatcttcccagaaatcaagggaaatcatagaaacagatacctcatcctcagattcagatgaaagtgagagccttcctccttcctcacaaactcctaagtaccccgagagcaataggactcctgttaaaccctcctcagtggaggaagaagatagcttttttcggcaacgaatgttctctcctatggaagagaaggaacttctttcacccctcagtgagcctgatgacaggtacccacttattgtgaagattgacctgaatcttttgactagaataccaggaaagccttacaaagaaacagagccgcccaagggggaaaagaaaaatgtgccagaaaagcacacgagagaggctcagaaacaagcctcagaaaaagtttccaacaaaggcaagaggaagcataagaatgaagatgataaccgagccagtgagagcaagaaacccaaaacggaggacaagaattcagcaggccataagccatccagcaacagagagtcatctaagcagagtgctgcaaaagaaaaggatttgttgccttctcccgctgggcctgttccttcaaaagatccaaaaacagagcatggctctcggaagaggactattagtcagtcttcttccttaaagtcaagcagtaacagcaacaaggagacgagtggcagcagcaaaaacagttcctccacatcaaagcagaagaagaccgaagggaagacttccagtagctccaaggaggttaaggaaaaggctccaagtagctcctctaactgtcctccatctgcaccaactcttgattcttctaagcctcggagaacaaagcttgtctttgatgacagaaattattcagcagaccattatttacaagaagcaaaaaagctaaagcacaatgcagatgcattgtctgataggtttgagaaagctgtatactatcttgatgctgtggtatctttcattgaatgtgggaatgcattagagaagaatgctcaggaatccaaatccccattccctatgtattcagagacggtggatctcatcaaatacactatgaagctaaagaattacttggcaccagatgctacagctgcagataaacgactcacagtactttgcctgcgatgcgagtctttgctgtacctgaggctgttcaaactgaagaaggaaaatgctctgaagtactcaaagacactgacagagcacctgaagaattcttataataattctcaagcaccatcgcctggcttgggaagcaaagctgtggggatgccttcccctgtttctccaaagctgtcaccaggcaattcaggaaattattcatctggggccagtagtgcttctgcaagtggttcttcagtgaccattccacagaagatccaccagatggcagccagctatgttcaggtcacatccaacttcctctatgccaccgaaatttgggaccaagctgaacagctttccaaagagcaaaaagaattctttgctgaactggataaagtaatgggccctctcatctttaatgcaagcatcatgacagatctagttcgttatacccggcagggactgcactggcttcgccaggatgccaagttgatatcttgaactgaacacattctcgttgcctctgattttctccacaacactgtgtcacatcacgaaggaaaactgccataacataccacctagtcgacactaagaatgaggaatagttttctcctcgttggttcatgtgttgttgtttttgataatccaaagcgatcatgtcagttggccctttaatatttccaatgtgaaagattatttaaatgcttttaaatctgcagcacattgataagatggtttccgtgagctatgataagattgaaattccagttgcaattcataactaatgaattgaaattttatttattttaatttttttaagttcccagattggggctagtttaagacttagttatttctgcctataaatttactctgttgaatatttagcataaatttaatgtag

SEQ ID NO: 100501 - DNA, 747 bp, Homo sapiens
gagtccagctgccgtcgccgccgccagcggacggggcggggatcctggtgccaggtcttcgttaacccgcccccgcctgcctcagtcagctgtcccagcccgggcccgaccgtcatggagcggtgcggggcctacgcctgttccgtgtgaggcgcatcgctgccgccgccgccgacgccgccttcgtttgtcgaggcctccggaacccccgccgcctcccggagcccctcgcccttggcagcctgtcaccgccccctgggcgggctcgaatgcgcgtccggtgaaggtgcaggcccggcgccgccactgccgcagccaggagatggttcgggcctagcggagccgggactggaggtaagaagggccgacagactgacccagggccgggccgggccgcgggggttgtggccggggccgggtgggggtgggggcccgcaagttctgcggggagcctcggggagaccctccgggctggggctgctcaatcaggcgtcacccctcctctcatctgcgcgtcccaccccaccaccttcccgcaaagataagaaaataaaaaaagctaacccaatcctaacaaaaattcccagaaatccatccgtttagtgtttctcctttcctctttctttcctcagacgttccatcggctgatttgttactttttcatatcctcctcaatttcaaattatgtctaattaaagagaaaataggcccagattctggctaacattacccagctagttctcgctt

SEQ ID NO: 100502 - DNA, 499 bp, Homo sapiens
agatggagtctcgccctgttgccaggctggagtgcagtggcgcgatctcggctcactgcaacctccgcctcccagggttcaagtgattctcctgcctcagcctcccgagtagctgggactacaggtgcacgccaccacgcccaactaatttttgtatttttcgtagagacggggtttcaccatgttggccaggatggtcttgatctcctgacctcatgatccgccagcctcggcctcccaaaaaagtggtatacttctaatggataaaggttatacagctatcttcacctggtacactgtcttcggtattacctttagttttaaatgaagtgttttcttaagaccaagaattttaaattgaaattagttattttataaagggctctaaataaggatatgactacaatggatgctgctgaaagaattgaatgataaagattattaggtggcttaatgctttttgtattaatctctgggaaagtccattattgatcccaaa

SEQ ID NO: 100503 - DNA, 733 bp, Homo sapiens
gagtccagctgccgtcgccgccgccagcggacggggcggggatcctggtgccaggtcttcgttaacccgcccccgcctgcctcagtcagctgtcccagcccgggcccgaccgtcatggagcggtgcggggcctacgcctgttccgtgtgaggcgcatcgctgccgccgccgccgacgccgccttcgtttgtcgaggcctccggaacccccgccgcctcccggagcccctcgcccttggcagcctgtcaccgccccctgggcgggctcgaatgcgcgtccggtgaaggtgcaggcccggcgccgccactgccgcagccaggagatggttcgggcctagcggagccgggactggagcaacatgaaccgtgaagaccggaatgtgctgcgtatgaaagaacgggaaaggcggaatcaggaaattcagcagggcgaagacgccttcccacctagctctcctctctttgcagagccatacaaagttactagcaaagaagataagttatcaagtcgtattcagagtatgcttggaaactacgatgaaatgaaggattttgaggagatgaggaaggctggtatctttcagagtgtaaagtaatcttggaatataaagaatttcttcaggttgaattacctagaagtttgtcactgacttgtgttcctgaactatgacacatgaatatgtgggctaagaaatagttcctcttgataaataaacaattaacaaatactttgg

SEQ ID NO: 100504 - DNA, 4774 bp, Homo sapiens
agtgttgcagattccctggtaatccctagtgccagagtttgccagcctttactaccattgtctgtttaatcaaaatccttgctgctataaattggctgtatttctcttggtttgttctagtgaaaataagacaaactgtcctgattatagagatgggacttccattttcccctcactccaaagacttcctttttcaatacaagtttagttgctgttactaatccaagttaatttttgattctatcactgaaaacctgggttttgccatttattgaggtgttaattgaaatattaatatatttagagcagaaatgtcgttttttagggaatctagagcaacagcaaagctgaggtcaaactaccgtaaggatggacaccaaggaagctgtgtttgggacaaaaagaaatcaagataaggtagatgcaaagtagagaaaagaactggaccctggggggaagggtggtagttgggagtgggttatatgcttctaagggcaaagaataggcagatttctgaagaggagggcccaaaaggaaatactgaggatttgtgttcaaatactacgttccctctgaatgtacaagtttttgcttttagctaacagagtacttcaaacattgataaggttaagtgttttgttggggtgggttctaatattctgggctagtgtttccttggaatagttgtggaagacactattggtatttgttgataaaaccattaccaaaacccagcttcagcactaatgcctgttattacttggaggtcaaaagggaatctgtgattgaagtgttaagctgacaaaatctgtacagaatatttaatttttccttttatttctgtgatacaaagattgtgtttcttttcatagcaacatgaaccgtgaagaccggaatgtgctgcgtatgaaagaacgggaaaggcggaatcaggaaattcagcagggcgaagacgccttcccacctagctctcctctctttgcagagccatacaaagttactagcaaagaagataagttatcaagtcgtattcagagtatgcttggaaactacgatgaaatgaaggatttcataggagacagatctataccaaagcttgttgcaattcccaagcctacagtaccaccatcagcagatgaaaaatctaacccaaatttctttgaacagagacatggaggctctcatcagagtagcaaatggactccagtaggacccgcacccagcacttctcagtctcagaaacggtcctcaggcttacagagtggacatagtagccagcggaccagcgcaggtagcagtagtggcactaacagtagtggtcagaggcacgaccgtgagtcatataacaatagtgggagcagtagccggaaaaaaggccagcatggatcagaacactccaaatcacgttcttccagccctggaaaaccccaggctgtttcttcattaaactctagtcattccaggtctcatgggaatgatcaccatagcaaggaacatcaacgctccaaatcacctcgggaccctgatgcaaactgggattctccttcccgtgtacctttttcaagtgggcagcactcaactcaatctttcccaccctcattgatgtcaaagtccaattcaatgttacagaaacccactgcctatgtgcggcccatggacggacaggagtccatggaaccaaagctgtcctctgagcactacagcagccaatcccatggcaacagcatgactgagctgaagcccagcagcaaagcacatctcaccaagctgaaaataccttcccaaccactggatgcatcagcttctggtgatgtgagctgtgtggatgaaatcctaaaagagatgacgcattcatggcctccccctctaacggctattcatacaccatgcaaaacagaaccttccaaatttccttttccaactaaggagtctcagcagtccaattttggcactggagaacaaaaaagatataatccttctaaaacttcaaatgggcaccagtctaaatctatgttaaaagatgacttaaaactaagcagcagtgaagacagtgatggggaacaggattgtgataagacaatgccgaggagtacaccaggaagtaactctgaaccttcacaccataatagtgaaggagcagataactccagggatgattctagtagccacagtggatctgaaagcagctctggatctgactcagagagtgaaagtagttccagtgacagtgaggcaaatgagccatcccagagtgcatctcccgagcctgaacccccgccaacaaacaaatggcaacttgataattggctgaataaagtgaacccacataaagtgtcacccgcctcttcagtggacagtaacatcccatcatctcaaggctacaaaaaggaaggccgagagcagggcactgggaatagctacactgatacaagtggacctaaagaaacgagttccgctactccgggacgagactccaaaaccatccaaaagggatcagaaagtgggcgtgggaggcagaaatctcctgcacagagtgacagcacaacacagagaagaactgtaggcaaaaaacaacccaaaaaggctgagaaggcagctgctgaagagcctcgtggaggcctgaagatagaaagtgaaacccctgtagacttggctagcagcatgccctccagcagacacaaagcagccaccaaaggctcaaggaaacccaatataaagaaggagtctaagtcttcccctcgacctacagcagagaaaaagaaatataagtcaacaagtaaatcttcccagaaatcaagggaaatcatagaaacagatacctcatcctcagattcagatgaaagtgagagccttcctccttcctcacaaactcctaagtaccccgagagcaataggactcctgttaaaccctcctcagtggaggaagaagatagcttttttcggcaacgaatgttctctcctatggaagagaaggaacttctttcacccctcagtgagcctgatgacaggtacccacttattgtgaagattgacctgaatcttttgactagaataccaggaaagccttacaaagaaacagagccgcccaagggggaaaagaaaaatgtgccagaaaagcacacgagagaggctcagaaacaagcctcagaaaaagtttccaacaaaggcaagaggaagcataagaatgaagatgataaccgagccagtgagagcaagaaacccaaaacggaggacaagaattcagcaggccataagccatccagcaacagagagtcatctaagcagagtgctgcaaaagaaaaggatttgttgccttctcccgctgggcctgttccttcaaaagatccaaaaacagagcatggctctcggaagaggactattagtcagtcttcttccttaaagtcaagcagtaacagcaacaaggagacgagtggcagcagcaaaaacagttcctccacatcaaagcagaagaagaccgaagggaagacttccagtagctccaaggaggttaaggaaaaggctccaagtagctcctctaactgtcctccatctgcaccaactcttgattcttctaagcctcggagaacaaagcttgtctttgatgacagaaattattcagcagaccattatttacaagaagcaaaaaagctaaagcacaatgcagatgcattgtctgataggtttgagaaagctgtatactatcttgatgctgtggtatctttcattgaatgtgggaatgcattagagaagaatgctcaggaatccaaatccccattccctatgtattcagagacggtggatctcatcaaatacactatgaagctaaagaattacttggcaccagatgctacagctgcagataaacgactcacagtactttgcctgcgatgcgagtctttgctgtacctgaggctgttcaaactgaagaaggaaaatgctctgaagtactcaaagacactgacagagcacctgaagaattcttataataattctcaagcaccatcgcctggcttgggaagcaaagctgtggggatgccttcccctgtttctccaaagctgtcaccaggcaattcaggaaattattcatctggggccagtagtgcttctgcaagtggttcttcagtgaccattccacagaagatccaccagatggcagccagctatgttcaggtcacatccaacttcctctatgccaccgaaatttgggaccaagctgaacagctttccaaagagcaaaaagaattctttgctgaactggataaagtaatgggccctctcatctttaatgcaagcatcatgacagatctagttcgttatacccggcagggactgcactggcttcgccaggatgccaagttgatatcttgaactgaacacattctcgttgcctctgattttctccacaacactgtgtcacatcacgaaggaaaactgccataacataccacctagtcgacactaagaatgaggaatagttttctcctcgttggttcatgtgttgttgtttttgataatccaaagcgatcatgtcagttggccctttaatatttccaatgtgaaagattatttaaatgcttttaaatctgcagcacattgataagatggtttccgtgagctatgataagattgaaattccagttgcaattcataactaatgaattgaaattttatttattttaatttttttaagttcccagattggggctagtttaagacttagttatttctgcctataaatttactctgttgaatatttagcataaatttaatgtag

SEQ ID NO: 100505 - DNA, 1806 bp, Homo sapiens
gagtccagctgccgtcgccgccgccagcggacggggcggggatcctggtgccaggtcttcgttaacccgcccccgcctgcctcagtcagctgtcccagcccgggcccgaccgtcatggagcggtgcggggcctacgcctgttccgtgtgaggcgcatcgctgccgccgccgccgacgccgccttcgtttgtcgaggcctccggaacccccgccgcctcccggagcccctcgcccttggcagcctgtcaccgccccctgggcgggctcgaatgcgcgtccggtgaaggtgcaggcccggcgccgccactgccgcagccaggagatggttcgggcctagcggagccgggactggagcaacatgaaccgtgaagaccggaatgtgctgcgtatgaaagaacgggaaaggcggaatcaggaaattcagcagggcgaagacgccttcccacctagctctcctctctttgcagagccatacaaagttactagcaaagaagataagttatcaagtcgtattcagagtatgcttggaaactacgatgaaatgaaggatttcataggagacagatctataccaaagcttgttgcaattcccaagcctacagtaccaccatcagcagatgaaaaatctaacccaaatttctttgaacagagacatggaggctctcatcagagtagcaaatggactccagtaggacccgcacccagcacttctcagtctcagaaacggtcctcaggcttacagagtggacatagtagccagcggaccagcgcaggtagcagtagtggcactaacagtagtggtcagaggcacgaccgtgagtcatataacaatagtgggagcagtagccggaaaaaaggccagcatggatcagaacactccaaatcacgttcttccagccctggaaaaccccaggctgtttcttcattaaactctagtcattccaggtctcatgggaatgatcaccatagcaaggaacatcaacgctccaaatcacctcgggaccctgatgcaaactgggattctccttcccgtgtacctttttcaagtgggcagcactcaactcaatctttcccaccctcattgatgtcaaagtccaattcaatgttacagaaacccactgcctatgtgcggcccatggacggacaggagtccatggaaccaaagctgtcctctgagcactacagcagccaatcccatggcaacagcatgactgagctgaagcccagcagcaaagcacatctcaccaagctgaaaataccttcccaaccactggatgcatcagcttctggtgatgtgagctgtgtggatgaaatcctaaaagagatgacgcattcatggcctccccctctaacggctattcatacaccatgcaaaacagaaccttccaaatttccttttccaactaaggtaagtaaataaaatgtatctttcataatgtaagaaaactctaaatggcttgactaaaatcatatggattaaaaattgtcttgccattcctattctagtgggagacagacagtaaataagtgaataaatagataaattcagatagtgacaactgttatgaagataattagcagggtaatggaactgagagcatcttggatcaagaggtattaagaaagctttgaaggcaatatgcgagagagatttaaaagacattaatacagccggacacggtggctcactcctgtaatcccagcactttggaaggctgagccaagagactctcttgaggccaggagtttgcgaccagcctggtcaacatagcaagaccctgtctctaccaaaaattggaaggaaaa

SEQ ID NO: 100506 - DNA, 4093 bp, Homo sapiens
gagtccagctgccgtcgccgccgccagcggacggggcggggatcctggtgccaggtcttcgttaacccgcccccgcctgcctcagtcagctgtcccagcccgggcccgaccgtcatggagcggtgcggggcctacgcctgttccgtgtgaggcgcatcgctgccgccgccgccgacgccgccttcgtttgtcgaggcctccggaacccccgccgcctcccggagcccctcgcccttggcagcctgtcaccgccccctgggcgggctcgaatgcgcgtccggtgaaggtgcaggcccggcgccgccactgccgcagccaggagatggttcgggcctagcggagccgggactggagcaacatgaaccgtgaagaccggaatgtgctgcgtatgaaagaacgggaaaggcggaatcaggaaattcagcagggcgaagacgccttcccacctagctctcctctctttgcagagccatacaaagttactagcaaagaagataagttatcaagtcgtattcagagtatgcttggaaactacgatgaaatgaaggatttcataggagacagatctataccaaagcttgttgcaattcccaagcctacagtaccaccatcagcagatgaaaaatctaacccaaatttctttgaacagagacatggaggctctcatcagagtagcaaatggactccagtaggacccgcacccagcacttctcagtctcagaaacggtcctcaggcttacagagtggacatagtagccagcggaccagcgcaggtagcagtagtggcactaacagtagtggtcagaggcacgaccgtgagtcatataacaatagtgggagcagtagccggaaaaaaggccagcatggatcagaacactccaaatcacgttcttccagccctggaaaaccccaggctgtttcttcattaaactctagtcattccaggtctcatgggaatgatcaccatagcaaggaacatcaacgctccaaatcacctcgggaccctgatgcaaactgggattctccttcccgtgtacctttttcaagtgggcagcactcaactcaatctttcccaccctcattgatgtcaaagtccaattcaatgttacagaaacccactgcctatgtgcggcccatggacggacaggagtccatggaaccaaagctgtcctctgagcactacagcagccaatcccatggcaacagcatgactgagctgaagcccagcagcaaagcacatctcaccaagctgaaaataccttcccaaccactggatgcatcagcttctggtgatgtgagctgtgtggatgaaatcctaaaagagatgacgcattcatggcctccccctctaacggctattcatacaccatgcaaaacagaaccttccaaatttccttttccaactaaggagtctcagcagtccaattttggcactggagaacaaaaaagatataatccttctaaaacttcaaatgggcaccagtctaaatctatgttaaaagatgacttaaaactaagcagcagtgaagacagtgatggggaacaggattgtgataagacaatgccgaggagtacaccaggaagcctgaacccccgccaacaaacaaatggcaacttgataattggctgaataaagtgaacccacataaagtgtcacccgcctcttcagtggacagtaacatcccatcatctcaaggctacaaaaaggaaggccgagagcagggcactgggaatagctacactgatacaagtggacctaaagaaacgagttccgctactccgggacgagactccaaaaccatccaaaagggatcagaaagtgggcgtgggaggcagaaatctcctgcacagagtgacagcacaacacagagaagaactgtaggcaaaaaacaacccaaaaaggctgagaaggcagctgctgaagagcctcgtggaggcctgaagatagaaagtgaaacccctgtagacttggctagcagcatgccctccagcagacacaaagcagccaccaaaggctcaaggaaacccaatataaagaaggagtctaagtcttcccctcgacctacagcagagaaaaagaaatataagtcaacaagtaaatcttcccagaaatcaagggaaatcatagaaacagatacctcatcctcagattcagatgaaagtgagagccttcctccttcctcacaaactcctaagtaccccgagagcaataggactcctgttaaaccctcctcagtggaggaagaagatagcttttttcggcaacgaatgttctctcctatggaagagaaggaacttctttcacccctcagtgagcctgatgacaggtacccacttattgtgaagattgacctgaatcttttgactagaataccaggaaagccttacaaagaaacagagccgcccaagggggaaaagaaaaatgtgccagaaaagcacacgagagaggctcagaaacaagcctcagaaaaagtttccaacaaaggcaagaggaagcataagaatgaagatgataaccgagccagtgagagcaagaaacccaaaacggaggacaagaattcagcaggccataagccatccagcaacagagagtcatctaagcagagtgctgcaaaagaaaaggatttgttgccttctcccgctgggcctgttccttcaaaagatccaaaaacagagcatggctctcggaagaggactattagtcagtcttcttccttaaagtcaagcagtaacagcaacaaggagacgagtggcagcagcaaaaacagttcctccacatcaaagcagaagaagaccgaagggaagacttccagtagctccaaggaggttaaggaaaaggctccaagtagctcctctaactgtcctccatctgcaccaactcttgattcttctaagcctcggagaacaaagcttgtctttgatgacagaaattattcagcagaccattatttacaagaagcaaaaaagctaaagcacaatgcagatgcattgtctgataggtttgagaaagctgtatactatcttgatgctgtggtatctttcattgaatgtgggaatgcattagagaagaatgctcaggaatccaaatccccattccctatgtattcagagacggtggatctcatcaaatacactatgaagctaaagaattacttggcaccagatgctacagctgcagataaacgactcacagtactttgcctgcgatgcgagtctttgctgtacctgaggctgttcaaactgaagaaggaaaatgctctgaagtactcaaagacactgacagagcacctgaagaattcttataataattctcaagcaccatcgcctggcttgggaagcaaagctgtggggatgccttcccctgtttctccaaagctgtcaccaggcaattcaggaaattattcatctggggccagtagtgcttctgcaagtggttcttcagtgaccattccacagaagatccaccagatggcagccagctatgttcaggtcacatccaacttcctctatgccaccgaaatttgggaccaagctgaacagctttccaaagagcaaaaagaattctttgctgaactggataaagtaatgggccctctcatctttaatgcaagcatcatgacagatctagttcgttatacccggcagggactgcactggcttcgccaggatgccaagttgatatcttgaactgaacacattctcgttgcctctgattttctccacaacactgtgtcacatcacgaaggaaaactgccataacataccacctagtcgacactaagaatgaggaatagttttctcctcgttggttcatgtgttgttgtttttgataatccaaagcgatcatgtcagttggccctttaatatttccaatgtgaaagattatttaaatgcttttaaatctgcagcacattgataagatggtttccgtgagctatgataagattgaaattccagttgcaattcataactaatgaattgaaattttatttattttaatttttttaagttcccagattggggctagtttaagacttagttatttctgcctataaatttactctgttgaatatttagcataaatttaatgtag

SEQ ID NO: 100507 - DNA, 4169 bp, Homo sapiens
gagtccagctgccgtcgccgccgccagcggacggggcggggatcctggtgccaggtcttcgttaacccgcccccgcctgcctcagtcagctgtcccagcccgggcccgaccgtcatggagcggtgcggggcctacgcctgttccgtgtgaggcgcatcgctgccgccgccgccgacgccgccttcgtttgtcgaggcctccggaacccccgccgcctcccggagcccctcgcccttggcagcctgtcaccgccccctgggcgggctcgaatgcgcgtccggtgaaggtgcaggcccggcgccgccactgccgcagccaggagatggttcgggcctagcggagccgggactggagcaacatgaaccgtgaagaccggaatgtgctgcgtatgaaagaacgggaaaggcggaatcaggaaattcagcagggcgaagacgccttcccacctagctctcctctctttgcagagccatacaaagttactagcaaagaagataagttatcaagtcgtattcagagtatgcttggaaactacgatgaaatgaaggatttcataggagacagatctataccaaagcttgttgcaattcccaagcctacagtaccaccatcagcagatgaaaaatctaacccaaatttctttgaacagagacatggaggctctcatcagagtagcaaatggactccagtaggacccgcacccagcacttctcagtctcagaaacggtcctcaggcttacagagtggacatagtagccagcggaccagcgcaggtagcagtagtggcactaacagtagtggtcagaggcacgaccgtgagtcatataacaatagtgggagcagtagccggaaaaaaggccagcatggatcagaacactccaaatcacgttcttccagccctggaaaaccccaggctgtttcttcattaaactctagtcattccaggtctcatgggaatgatcaccatagcaaggaacatcaacgctccaaatcacctcgggaccctgatgcaaactgggattctccttcccgtgtacctttttcaagtgggcagcactcaactcaatctttcccaccctcattgatgtcaaagtccaattcaatgttacagaaacccactgcctatgtgcggcccatggacggacaggagtccatggaaccaaagctgtcctctgagcactacagcagccaatcccatggcaacagcatgactgagctgaagcccagcagcaaagcacatctcaccaagctgaaaataccttcccaaccactggatgcatcagcttctggtgatgtgagctgtgtggatgaaatcctaaaagagtctcagcagtccaattttggcactggagaacaaaaaagatataatccttctaaaacttcaaatgggcaccagtctaaatctatgttaaaagatgacttaaaactaagcagcagtgaagacagtgatggggaacaggattgtgataagacaatgccgaggagtacaccaggaagtaactctgaaccttcacaccataatagtgaaggagcagataactccagggatgattctagtagccacagtggatctgaaagcagctctggatctgactcagagagtgaaagtagttccagtgacagtgaggcaaatgagccatcccagagtgcatctcccgagcctgaacccccgccaacaaacaaatggcaacttgataattggctgaataaagtgaacccacataaagtgtcacccgcctcttcagtggacagtaacatcccatcatctcaaggctacaaaaaggaaggccgagagcagggcactgggaatagctacactgatacaagtggacctaaagaaacgagttccgctactccgggacgagactccaaaaccatccaaaagggatcagaaagtgggcgtgggaggcagaaatctcctgcacagagtgacagcacaacacagagaagaactgtaggcaaaaaacaacccaaaaaggctgagaaggcagctgctgaagagcctcgtggaggcctgaagatagaaagtgaaacccctgtagacttggctagcagcatgccctccagcagacacaaagcagccaccaaaggctcaaggaaacccaatataaagaaggagtctaagtcttcccctcgacctacagcagagaaaaagaaatataagtcaacaagtaaatcttcccagaaatcaagggaaatcatagaaacagatacctcatcctcagattcagatgaaagtgagagccttcctccttcctcacaaactcctaagtaccccgagagcaataggactcctgttaaaccctcctcagtggaggaagaagatagcttttttcggcaacgaatgttctctcctatggaagagaaggaacttctttcacccctcagtgagcctgatgacaggtacccacttattgtgaagattgacctgaatcttttgactagaataccaggaaagccttacaaagaaacagagccgcccaagggggaaaagaaaaatgtgccagaaaagcacacgagagaggctcagaaacaagcctcagaaaaagtttccaacaaaggcaagaggaagcataagaatgaagatgataaccgagccagtgagagcaagaaacccaaaacggaggacaagaattcagcaggccataagccatccagcaacagagagtcatctaagcagagtgctgcaaaagaaaaggatttgttgccttctcccgctgggcctgttccttcaaaagatccaaaaacagagcatggctctcggaagaggactattagtcagtcttcttccttaaagtcaagcagtaacagcaacaaggagacgagtggcagcagcaaaaacagttcctccacatcaaagcagaagaagaccgaagggaagacttccagtagctccaaggaggttaaggaaaaggctccaagtagctcctctaactgtcctccatctgcaccaactcttgattcttctaagcctcggagaacaaagcttgtctttgatgacagaaattattcagcagaccattatttacaagaagcaaaaaagctaaagcacaatgcagatgcattgtctgataggtttgagaaagctgtatactatcttgatgctgtggtatctttcattgaatgtgggaatgcattagagaagaatgctcaggaatccaaatccccattccctatgtattcagagacggtggatctcatcaaatacactatgaagctaaagaattacttggcaccagatgctacagctgcagataaacgactcacagtactttgcctgcgatgcgagtctttgctgtacctgaggctgttcaaactgaagaaggaaaatgctctgaagtactcaaagacactgacagagcacctgaagaattcttataataattctcaagcaccatcgcctggcttgggaagcaaagctgtggggatgccttcccctgtttctccaaagctgtcaccaggcaattcaggaaattattcatctggggccagtagtgcttctgcaagtggttcttcagtgaccattccacagaagatccaccagatggcagccagctatgttcaggtcacatccaacttcctctatgccaccgaaatttgggaccaagctgaacagctttccaaagagcaaaaagaattctttgctgaactggataaagtaatgggccctctcatctttaatgcaagcatcatgacagatctagttcgttatacccggcagggactgcactggcttcgccaggatgccaagttgatatcttgaactgaacacattctcgttgcctctgattttctccacaacactgtgtcacatcacgaaggaaaactgccataacataccacctagtcgacactaagaatgaggaatagttttctcctcgttggttcatgtgttgttgtttttgataatccaaagcgatcatgtcagttggccctttaatatttccaatgtgaaagattatttaaatgcttttaaatctgcagcacattgataagatggtttccgtgagctatgataagattgaaattccagttgcaattcataactaatgaattgaaattttatttattttaatttttttaagttcccagattggggctagtttaagacttagttatttctgcctataaatttactctgttgaatatttagcataaatttaatgtag

SEQ ID NO: 100508 - DNA, 3524 bp, Homo sapiens
agagagagagagagagagagagagagagagagaccagacttttgaggatgaaatataatgttcattatttactaagtgtatggccttgaataaataacttttgtgcttcagtttcatcctaaatagaggtaggataataatggtatctacctcataatgtcattgtgagtactaaatgagtaataaacatgtaaaacacttagcacagtgtctggcccattcaaggtacacagtaaatgttagctgttttccttatcattgtcccttcctcccactctcctagcaagctcttcctgattagcgttttattatgtgccttgtatttgattacaggctgatttctgtaactattcacaggtttcataatttgaattgtaaactcctcaaagccagggagcatttattaatcttcttattacctacaccatagtgcctagcacacaattgtgcttaatatttattgactaagtatgtagaattttggaggagctgtcatgaaaccagtatttataaatacaaatctggtttttagctgtataatttttatccttgacctggttgaaaacaaactgtaataattacatttcaggagatgacgcattcatggcctccccctctaacggctattcatacaccatgcaaaacagaaccttccaaatttccttttccaactaaggagtctcagcagtccaattttggcactggagaacaaaaaagatataatccttctaaaacttcaaatgggcaccagtctaaatctatgttaaaagatgacttaaaactaagcagcagtgaagacagtgatggggaacaggattgtgataagacaatgccgaggagtacaccaggaagtaactctgaaccttcacaccataatagtgaaggagcagataactccagggatgattctagtagccacagtggatctgaaagcagctctggatctgactcagagagtgaaagtagttccagtgacagtgaggcaaatgagccatcccagagtgcatctcccgagcctgaacccccgccaacaaacaaatggcaacttgataattggctgaataaagtgaacccacataaagtgtcacccgcctcttcagtggacagtaacatcccatcatctcaaggctacaaaaaggaaggccgagagcagggcactgggaatagctacactgatacaagtggacctaaagaaacgagttccgctactccgggacgagactccaaaaccatccaaaagggatcagaaagtgggcgtgggaggcagaaatctcctgcacagagtgacagcacaacacagagaagaactgtaggcaaaaaacaacccaaaaaggctgagaaggcagctgctgaagagcctcgtggaggcctgaagatagaaagtgaaacccctgtagacttggctagcagcatgccctccagcagacacaaagcagccaccaaaggctcaaggaaacccaatataaagaaggagtctaagtcttcccctcgacctacagcagagaaaaagaaatataagtcaacaagtaaatcttcccagaaatcaagggaaatcatagaaacagatacctcatcctcagattcagatgaaagtgagagccttcctccttcctcacaaactcctaagtaccccgagagcaataggactcctgttaaaccctcctcagtggaggaagaagatagcttttttcggcaacgaatgttctctcctatggaagagaaggaacttctttcacccctcagtgagcctgatgacaggtacccacttattgtgaagattgacctgaatcttttgactagaataccaggaaagccttacaaagaaacagagccgcccaagggggaaaagaaaaatgtgccagaaaagcacacgagagaggctcagaaacaagcctcagaaaaagtttccaacaaaggcaagaggaagcataagaatgaagatgataaccgagccagtgagagcaagaaacccaaaacggaggacaagaattcagcaggccataagccatccagcaacagagagtcatctaagcagagtgctgcaaaagaaaaggatttgttgccttctcccgctgggcctgttccttcaaaagatccaaaaacagagcatggctctcggaagaggactattagtcagtcttcttccttaaagtcaagcagtaacagcaacaaggagacgagtggcagcagcaaaaacagttcctccacatcaaagcagaagaagaccgaagggaagacttccagtagctccaaggaggttaaggaaaaggctccaagtagctcctctaactgtcctccatctgcaccaactcttgattcttctaagcctcggagaacaaagcttgtctttgatgacagaaattattcagcagaccattatttacaagaagcaaaaaagctaaagcacaatgcagatgcattgtctgataggtttgagaaagctgtatactatcttgatgctgtggtatctttcattgaatgtgggaatgcattagagaagaatgctcaggaatccaaatccccattccctatgtattcagagacggtggatctcatcaaatacactatgaagctaaagaattacttggcaccagatgctacagctgcagataaacgactcacagtactttgcctgcgatgcgagtctttgctgtacctgaggctgttcaaactgaagaaggaaaatgctctgaagtactcaaagacactgacagagcacctgaagaattcttataataattctcaagcaccatcgcctggcttgggaagcaaagctgtggggatgccttcccctgtttctccaaagctgtcaccaggcaattcaggaaattattcatctggggccagtagtgcttctgcaagtggttcttcagtgaccattccacagaagatccaccagatggcagccagctatgttcaggtcacatccaacttcctctatgccaccgaaatttgggaccaagctgaacagctttccaaagagcaaaaagaattctttgctgaactggataaagtaatgggccctctcatctttaatgcaagcatcatgacagatctagttcgttatacccggcagggactgcactggcttcgccaggatgccaagttgatatcttgaactgaacacattctcgttgcctctgattttctccacaacactgtgtcacatcacgaaggaaaactgccataacataccacctagtcgacactaagaatgaggaatagttttctcctcgttggttcatgtgttgttgtttttgataatccaaagcgatcatgtcagttggccctttaatatttccaatgtgaaagattatttaaatgcttttaaatctgcagcacattgataagatggtttccgtgagctatgataagattgaaattccagttgcaattcataactaatgaattgaaattttatttattttaatttttttaagttcccagattggggctagtttaagacttagttatttctgcctataaatttactctgttgaatatttagcataaatttaatgtag

SEQ ID NO: 100509 - DNA, 455 bp, Homo sapiens
ataaaggttatacagctatcttcacctggtacactgtcttcggtattacctttagttttaaatgaagtgttttcttaagaccaagaattttaaattgaaattagttattttataaagggctctaaataaggatatgactacaatggatgctgctgaaagaattgaatgataaagattattaggtggcttaatgctttttgtattaatctctgggaaagtccattattgatcccaaaattgccaaggctgatcagacaggatcattacattctttctgtgctttttcaagtacttgaagtgtttttatgtaatttaagcatttttcactaatctttcttttttagtgtaactttgtataattttatgttcctttttcttaggagtctcagcagtccaattttggcactggagaacaaagtgagtatttctttccctctttgttttcaaattaagct

SEQ ID NO: 100510 - DNA, 815 bp, Homo sapiens
cctgatggcttactttgaactaaatgccagaaataatatactctctccttattctgatacttctgtctccttggcttatctaacatacacattgtaatcttaccagacctcacccagacatatttggcattaagattaggcagaaggcattgaatgaaatcaaacttagggtcttgcttttctgttttcctcctcatgtgcttttgaaatttctcttctgatttcttcccctgacaaaatttttctacgagtatatataggctctatagccagacttttgaggatgaaatataatgttcattatttactaagtgtatggccttgaataaataacttttgtgcttcagtttcatcctaaatagaggtaggataataatggtatctacctcataatgtcattgtgagtactaaatgagtaataaacatgtaaaacacttagcacagtgtctggcccattcaaggtacacagtaaatgttagctgttttccttatcattgtcccttcctcccactctcctagcaagctcttcctgattagcgttttattatgtgccttgtatttgattacaggctgatttctgtaactattcacaggtttcataatttgaattgtaaactcctcaaagccagggagcatttattaatcttcttattacctacaccatagtgcctagcacacaattgtgcttaatatttattgactaagtatgtagaattttggaggagctgtcatgaaaccagtatttataaatacaaatctggtttttagctgtataatttttatccttgacctggttgaaaacaaactgtaataat

SEQ ID NO: 100511 - DNA, 244 bp, Homo sapiens
gggagtacaggcactggccaccacaccaagctaatttttatacttttgtagagacggtttcactatgttggccaggctggtctcgaattcctgggcttaagcgatcttcccacctcatcctctcaaaatgctgggattacaggcatgagccactgctcccggccaagacatgaaatttcaagtagggatgtacatacaattacaggagcccttcaagtcacctgtcatactccgtacctggcct

SEQ ID NO: 100512 - DNA, 894 bp, Homo sapiens
agcggagctgctgcaacccgctgccgtctggtgtcctgctgtgggagctttgttctttcactctcgtaataagtcttgctgctgctcactctttgggtccgcactgtctctgtgagctgtaacactcaccgcgaggttctgtgccttcgttctttaagtcagggagaccacgaacccaccgggaggaacaaacaactgtgatgcgccatctttaagagctgtaacattcaccgccggggtctgcggcttcattcctggagtgagtgagaccacgaacccaccagaaggaagaaactctggacccatctgaacagctgaaggaacaaactccggacacaccatctttaagaactgtaacactcaccgggagtctccgtggcttcattcttgaagacagcgagaccaagaacccaccagaaggaatgaattccgcacacagcaacagcacaaagttaaaccaggaagtccctctgccttgctagggatccaggtttgccttcctgttgaggtatcccatttcattacagttgacctaagtttgaacaaacactgccacctgatgcatgaaagctctactgtgacctacgttaaaaggagctgacactccctcaggctaccttagtcagtgggggcttactgcagcatacctgtggcgatgagagagagaggcacatcacaggagcatctggcaccagtggcatcctggtgagtggaacccccagctattagagggtcccacccaaactcagtttgattacacagtcaccaatctagctggtggtccgaaacatattctcttacgatctcataccatgagacacctgaaggggggctgttggtgggacgtgatcagtgggttgccgaatgtttgcttggggaaagagctggggagac

SEQ ID NO: 100513 - DNA, 975 bp, Homo sapiens
agcggagctgctgcaacccgctgccgtctggtgtcctgctgtgggagctttgttctttcactctcgtaataagtcttgctgctgctcactctttgggtccgcactgtctctgtgagctgtaacactcaccgcgaggttctgtgccttcgttctttaagtcagggagaccacgaacccaccgggaggaacaaacaactgtgatgcgccatctttaagagctgtaacattcaccgccggggtctgcggcttcattcctggagtgagtgagaccacgaacccaccagaaggaagaaactctggacccatctgaacagctgaaggaacaaactccggacacaccatctttaagaactgtaacactcaccgggagtctccgtggcttcattcttgaagacagcgagaccaagaacccaccagaaggaatgaattccgcacacattgttgtattataggtaagggctagagtattggcgttggagagacggactaaattctcagctccaacccttaccagcttgggcaacagcacaaagttaaaccaggaagtccctctgccttgctagggatccaggtttgccttcctgttgaggtatcccatttcattacagttgacctaagtttgaacaaacactgccacctgatgcatgaaagctctactgtgacctacgttaaaaggagctgacactccctcaggctaccttagtcagtgggggcttactgcagcatacctgtggcgatgagagagagaggcacatcacaggagcatctggcaccagtggcatcctggtgagtggaacccccagctattagagggtcccacccaaactcagtttgattacacagtcaccaatctagctggtggtccgaaacatattctcttacgatctcataccatgagacacctgaaggggggctgttggtgggacgtgatcagtgggttgccgaatgtttgcttggggaaagagctggggagac

SEQ ID NO: 100514 - DNA, 351 bp, Homo sapiens
ctgcttcctccaacttaaatttgtccaacggcagcctttgactctaggctaacgtactagggaaatgcccacagcaccacctttcgcctctcctggctttgcctccaaagggctgggcacaccaagcttgcagaactgaattaaatcagagaaccatctcgccacttacatgaatttcccaggtagcaaagctttaagcccctcaagcttctcttaggatgcctttggctggacacagtagtagctcacacctgtaatcccagtactttgggaggccgaggtgggtggatcacttgaggccaggagtttgagaccaacctggacaacatggagaaatgccatctctactaa

SEQ ID NO: 100515 - DNA, 462 bp, Homo sapiens
gcccactctggcatgagaggctgcctgattcttgaattgttctttgctcagttaaacactgtgaaacttacctgagctaaagttttccttttaacactgagcatcctgtattttatctgttaaccctggattgatatttacaacttctttcttccatacccattctatgttcctttggttcttttacttcatgaggtgacccaaacttcattcctgaagggtctgagtccttggttattctgcttgtattgagtcacttgaggctttcattaacactgtcactgaacctggcaatcctcagagatatttcaggggatcccctggatacgatggactccttgtctccgttgtatggcagcaacagcttctcggtggacagtcagggtcagtcttcctcttagagctcttggtcctgaggcaaagcgacagcggggcagcctttacttccggttcaaaaaaagc

SEQ ID NO: 100516 - DNA, 530 bp, Homo sapiens
  misc_feature (46)..(46): n is a, c, g, or t
  misc_feature (59)..(59): n is a, c, g, or t
  misc_feature (61)..(61): n is a, c, g, or t
  misc_feature (74)..(74): n is a, c, g, or t
cataatcacacctgcaaccgcgaaacccgcgtgtgaagacgccgcnggagacctccgtngnctacgacaaaatnctggttataatggaaaattgcaaggggtttttcctgatctactttgaaatgcaattccgcttaaagcttttcttagtgcctaaagtgtctgcacatggaaatccagaggtagacagagagaaactgagttccggacaatgcattcactaaagaaagtgacttttgaagatgtagctattgacttcacccaggaagagtgggccatgatggacacatccaagagaaagctgtacagagatgtgatgctggaaaatatcagtcacctggtgtccctcgggtaccagataagcaaatcctatataattttgcagctggagcaaggaaaagagctgtggcgggaaggaagagaatttcttcaagaccagaatccagacagggaaagtgcccttaagaaaaaacacatgatatccatgcatcctatcaccagaaaagacgcatccaccagtatgacaatgg

SEQ ID NO: 100517 - DNA, 262 bp, Homo sapiens
aataccaacagcaacacccttttgtatatcagcacagtgacattaaacttactgaaacaaacaaaaaaggagatacaacatattaaagcctttgggaagtagcaaagggaattccaaaagggaagtttatagccgtaaatgcctacattaaaaaaaaaaagatctcaaataaacaatctaactttatactgcaaggaactaggaaaagaaaagcaaactaaacccaaaattaacagaagaaaggaagtaataaaggtcatag

SEQ ID NO: 100518 - DNA, 262 bp, Homo sapiens
ttcaagcgatcctcccaaagtgctgggattacaggcgtgagtcaccatgcccggcttcttcccctgtgttcttacgtactacttatattttgatgcttatcacaggacattcccatgcttatcttactcctgtgttgagaaagacagtagactgttatgtggtgataaatatcgtcttaaatcctcataataaggcaacaggtctaattacccagtttataggaaactcataatcattaccagttttgagaaaaagttggag

SEQ ID NO: 100519 - DNA, 314 bp, Homo sapiens
cagtatatttcacagatggttggttgaattgggatcagaataggtgtgacacattacatttagttactatatctcatatctaagggatttctctttctcttttcccttaaaatttatgttcaagaaacagaattataaatcctatccagtctcccatattccttattttgcttcccgcatccctctggtgttatttaacatctcctgcctcctgtatttcttattaacttgtattaagatctagaggcttggggagcttcaggtttgattttttttttttttggaacaagtacttcataggtattgctgagatg

SEQ ID NO: 100520 - DNA, 262 bp, Homo sapiens
tggtaaccatcagaggctagtggaatgctccctaacaggtgtgtgcatttctgtttctacaagcaaatgtcagaagagtcaatagtgtttgctcccaaacgtgatcgtaccagttgtaaatgacatactgtaaatgtcatagttaaacattatataaactgaaagtgtgaaaatgaaatttttaaacaataactcagagattctataaagattaactgccgagcgcagtggctcacgcctgtaatctcagcactttgggagg

SEQ ID NO: 100521 - DNA, 236 bp, Homo sapiens
tgtaatctcagtcagaagaagccacgctagtacagttactagttgactgctcgcagccagtttattgtgttcaaaatgcttttgtttaggggaaagttacctagtatgatttcacctggggtggaatcacagggcacctttatctgggaatgtctaaatggagcaaagtctttagcacattcaacagacgtgcttttgaataaatatgttcaatacacacagaatgaaaaatacag

SEQ ID NO: 100522 - DNA, 368 bp, Homo sapiens
atgctgccaaaagtgagaatgaagtttggagtggatttttctgcaaagccccagatgacaactcagcctggctaacaccctgatttcagctttgtgataatttgaccagagagcccagagaacctagtgagctattaaataattgtaattaattttaagctgctaagtctgtggtaatttgtcctgcagcatcagaaaactcatatagcaggccatgtgcagtctctggtgcagatttttgctctttttttctacttttcttggataatagttaaacatttacaaacctttattaacttgtgggccataaaacaaaaacaaaaatcaggccacaagatgagctgtcatttgctgattcctgccctaga

SEQ ID NO: 100523 - DNA, 691 bp, Homo sapiens
aatgctatcctttattggaccatgcctttgcccatttgttctatgactccttttgtgctacagtggcagagttgagtagttgctacagagactgttctggcctgcaaaaccaaaattctttaccctcttggcttgttacagaggagtttttcagcccctgtatgacaacatcagtaacttggtcttttaattctagaaagtaattatttctgttagagattaaacctggaaacagcctattttagaaatagtgtattatttgaaatggtcaatggacttctgaattctggtgcagagtgtttttttttcataatactataaaagttatatttccttttgaggaactaaaatgcaatcttcgcctgtggtttaggaactgggttttttgtttgtttttttttttccttcttacaagagctttttatgggagaagttgtatgtatatcctttagcctatcttgaactattctgtagcttctaaacaccttccttgataaagagtatatctgattttcttgtgtcttttgaaaattgttctgaaatagaactgtaaataaattagtggtttttaatggtcacatacatgatatttaattaaagttattcagtgggattttgaagatagaacaagaggtgattcatgtattttataaaaccaggtcttcagggatcagtcatctttaaaaaaaaa

SEQ ID NO: 100524 - DNA, 1094 bp, Homo sapiens
ctaaagagtcgccgcagacaagcaggcccccagatggagaaccagcctgtgaggtggcgggccctgccaggcctcccacgccctcctgggctccccgcagccccctggctcctccttggcgtgctgctgctgcccgggaccctgcgactggcaggaggacagtcagtgacccacaccggcctgcccatcatggcctccctggccaacacagctatctccttcagctgcaggatcacctatccatacactccccaattcaaggttttcacagtcagctactttcatgaagatctccagggacagaggagccctaagaagccaacaaactgccaccctggactgggcacagagaaccagagccacaccctggactgccaggtcacccttgtgctgccgggagcatcggccactggcacctactactgctctgtccactggccacactccacggtgagaggcagcggcaccttcatcctggtcagagacgcagggtaccgagagcccccgcagagtccacagaagctcctgctctttggcttcaccggcctcctgagtgtcctgagtgtagtgggcacggccctgctgctctggaacaagaagcggatgcggggtccagggaaggaccccaccaggaagtgcccagatccaagatctgccagcagccccaagcagcatccttcagaatctgtctacacagctctgcagcgccgcgagaccgaggtctatgcctgcatcgagaatgaggatggcagctcacccaccgccaagcagagccccctctcccaggagagaccgcatagattcgaagatgatggcgaacttaacctggtctatgaaaatctctaggatgggctccacacgctcatagagcttgccctgggtcagaggaccggggcagcccctgccaccaaaggacttgatctgagttgggagtaaggcccccaggaacaccccatcatttcaccctcacattcaaggcccttcctgtcttggccggccccactgcccccccattctatgccccaaccaccaaggctttcccatcttggggcctttgcccaggctgttccttctgccaggcaggcccttcctcc

SEQ ID NO: 100525 - DNA, 981 bp, Homo sapiens
ctaaagagtcgccgcagacaagcaggcccccagatggagaaccagcctgtgaggtggcgggccctgccaggcctcccacgccctcctgggctccccgcagccccctggctcctccttggcgtgctgctgctgcccgggaccctgcgactggcaggaggacagtcagtgacccacaccggcctgcccatcatggcctccctggccaacacagctatctccttcagctgcaggatcacctatccatacactccccaattcaaggttttcacagtcagctactttcatgaagatctccagggacagaggagccctaagaagccaacaaactgccaccctggactgggcacagagaaccagagccacaccctggactgccaggtcacccttgtgctgccgggagcatcggccactggcacctactactgctctgtccactggccacactccacggtgagaggcagcggcaccttcatcctggtcagagaagcggatgcggggtccagggaaggaccccaccaggaagtgcccagatccaagatctgccagcagccccaagcagcatccttcagaatctgtctacacagctctgcagcgccgcgagaccgaggtctatgcctgcatcgagaatgaggatggcagctcacccaccgccaagcagagccccctctcccaggagagaccgcatagattcgaagatgatggcgaacttaacctggtctatgaaaatctctaggatgggctccacacgctcatagagcttgccctgggtcagaggaccggggcagcccctgccaccaaaggacttgatctgagttgggagtaaggcccccaggaacaccccatcatttcaccctcacattcaaggcccttcctgtcttggccggccccactgcccccccattctatgccccaaccaccaaggctttcccatcttggggcctttgcccaggctgttccttctgccaggcaggcccttcctcc

SEQ ID NO: 100526 - DNA, 452 bp, Homo sapiens
gtaaaaaggtaatccatggaatggtagcgaacatttgcaaatcatatatctgataaggggttaatatccagaatatataaggaacttctacaactcaacaccaacaaaaaacaacacagttaaaaaatggagagttctccaaagaagctatacaaatggccaataagcatatgaaaagatgctcaacattacaaatcataagacaaatgccaatcaaaaccacagtgaattatcacctcccacccactgggatggcctctatcaaaagaaaagaaaataacgtgttggtgaggatgtggagaaattggaacccttgtgcactgttggtggaaatgtaaaatgatgcagccactatggaaaacaacatggaggtgcctcaaaatattaaaaatagaattatcatgtgatcctatttctgatacatagatacatacctatttctgggtatatat

SEQ ID NO: 100527 - DNA, 854 bp, Homo sapiens
atctgggtttggtgctgggaactgttgcatctacgaggtaaaaaaaacaaagtcagcgtccattatgaaaggaagaaaacttgtcgggggctaaagcaagaacctgtcctagctggccggttgttggcctggggatgttttgtatcccaacctccctgcagtagttccccagagcctacaaaatgaaaaagaaagtactcacacatcttctatttttaggattctaccccgtgggcacttgcacatgtgtacaaaaaaagctcgggatccagctttattgggggacacggggggaaataacaaaaaattggaaacctagtcattcatcgatagaggaaagacaagatatactatggtacattcgcattttgaaatactgtgcagctcttgagcaagataaatctgcgtgaaaagatcaagataaattgagagaaaaaaaagccaagttgctgcaaactatatatttgcacacataggcatttaaatgtgaaggagtaagtctgaaaggggaaagggcaaagtagtaactctgagggccaggattcggattggaggaagaaggtggtcaagagctactttaccttcatttgtattttaaattttttacaaaacaaataattttaaagtatatttttaacaaagggaagaaaataaagctccaaacaatgtgaaaagtagaggaggctttccaaatgctgtggtccaccttgatttatagaactttcctgcctaaacaatgtttctgctcaaatgaactacttcctgggtgctaaaatactgtttttccagccttttttgcccaacaaccacaataaatacattttacatcttatcacggtacacctatacaaaat

SEQ ID NO: 100528 - DNA, 260 bp, Homo sapiens
cccccaaatcaacactgtcccaaggaccaacctttcaagccacagcttgaattcaggcttacttgtgcctacctgctcacctttagggcactcatcctccccctcagctcagggtcagccagcatgtgaactgggtacctctaggcctgggattttcaacttgtggatgataaaacattagggagtccagggagtcatttttgtggcccatgaccaacgtgttgtttaaagaaataagaatagaaaaatcagaatgtgtt

SEQ ID NO: 100529 - DNA, 328 bp, Homo sapiens
ctcaaaaggaaataagccatattttctaataaacacaaagagaaggccaggcgcagtggctcagcctatgctctcagcatcctaggaggccgaggcgagtggagaattcaagaccagcctggacaacacggcaaaaccctgtgtctactataaatgcaaaaaatcagctgggcaggcatggcatcacgggtctacagtctcagctacttgggaggctgtgatgagaggactaccttgagccccagaagtcaaggcttcagtgagctgtgatgcactccactgcactccagcctaggcaatgggagtgagaccctgtgctaaaaaaaaa

SEQ ID NO: 100530 - DNA, 373 bp, Homo sapiens
ggatttgttctaggtatgcagggctggttcaacatttgaaaatcagttaatgtaatttaccatgtcgataaactaaagaataaaatcataaatcatatcaattgacacagaaaaaggatttacaaaacccacatccattcattatgaaaaacaagacaaaacaggccaggtgcggtggctcacaccataatcccagcactttgggaggccgaggcaggcggatcagctgaggtcaggagttcgagaccagcctgaccaacatggtgaaacccagtctctactaaaaatagaaaaattagctgggtgtggtggcactcacctgtaatcccagctacttgggaggctgaggcaggagacttgcttgaacctggga

SEQ ID NO: 100531 - DNA, 370 bp, Homo sapiens
ttataatatttgcctttagaatgtcttaatcctgattcccaactgtattaactaattcagaccacaggcttaatgagtgatcattgattggtgtctttgtcttcttatgtagcatttttttaacagagccagataaggacaagctctgtggtaatataacagaatgattagcagtgcacctatttggttttacaaggtggatatgatgacaatgtacaaaaaagaaaaacttatttctgtagacttattaatttctaccctgaatgcaatatcaagcatgtattattgatttttatgttatgttcagctaaaaagtccttcagtctagagatttcagataataaaaagtccaggtcagaacagtcccgac

SEQ ID NO: 100532 - DNA, 464 bp, Homo sapiens
aggaagaagtgggcagtttccattgatccctagcatcagtttgacgggaaaaccggtgcatttcatcaacctcaaggaaaggaagtgccatgcatggaggcctggtgataggcaacatccatttagaagaacagtcacacaagcaacagaagaactatccaagactagaagcttagaagcttataccaaactctctgtctctctctctctctctcacacacacacacacagagtggatgggaggggacattaagaggaaccctagtgcagttcccccaaaaaaccttggcatagagtataacagggaaaaagtaattactgggaagctgaaaacaatcaaatatgtgaggaatgactgaatatgagctgaggataatgtaaattgttctggattgtctataagataaagatacagagcctgaatctatgtttttctgaataaagagaccccatattctcttttg

SEQ ID NO: 100533 - DNA, 334 bp, Homo sapiens
gagacaggatatcactatatgttggccaggctggtcttgaactcatgaccttaggtgatctgcctgccttggcctcccaaagtgctgggattacaggcatgagccaccacgtccagcctagttggaaggcattgttgatgtaagttttcatcaagcagagttaattcaaacacagccttgggaatatgcccagagaatgtaaggtggcttactggctgtcaataaaagaaatgccaactcctcagtcctcagcagctccatgttggagcgagaaaggctttttttgctttatgagttgttaggagagaaagccctggaatggaaggcaggcaag

SEQ ID NO: 100534 - DNA, 552 bp, Homo sapiens
cagcatcagtcatggacttaaccttcttttgttaatgagaccttagaaatgtaaaaatgatacactcttctttaaaataattgtagtcagtacacataactcttaccatcttaaccatttctaagtgtacagttcagtgacattaaatatattcacatttttgtacagccatcgccaccctccaacctccagaattcttcatgttgcaaaactgaaacactgcacccatgaagcggggactcccctgcccctggcagctctttctgtctctgagtcccactactctaagtacctcatacaatatttgtcctttgtgactggcttacttcactgagcatagtgtcctcagggttcctccatgctgtagctgtgacaggagccccctcctgttaaaggctggataacattccactgtatgcagacgccacattttgatcatgagaatgcccgtttgtggagggacacactgttgcttccccctcgtggctgttgtggataatgtcgctgtgagcatgggtgtgcagacatggctttgagaccctgttttcagtt

SEQ ID NO: 100535 - DNA, 459 bp, Homo sapiens
atgattataccactgttccccaacctgaacaatagagcaagactgtctctaaatgaagtatacagagttttagtgtattcagagttgtgtaactaatcatcacaatctaacgttataacattttcaacacccaaaaagaaaccccatacacattagcagtcattcctcattcccactccattctccccagctggagccccagtcaaccccaaatctaccttctgcctgtatagatttgcctactgggggtcaggtacagtggctcacacctgtaatcccagcactttgggaggccgaggcgggtgggtcacttgaggtcaggagttcaagaccagcctgggcaacgtggtgaaaccccatctctactacaaatataaaaattaccgggcatggtggcaggcgcctgtagtcccagctactcaggaggctgaggcaggagaatggcgtgaacccgggagg

SEQ ID NO: 100536 - DNA, 404 bp, Homo sapiens
ctcggaattaacagaaattaaaactgcatcaaaaaatacctgtcttcaatttctccatcgaccaggcaaatagctgtgtacattttcctgtagttaaaaagaacaggccggacgcggtggctcacgcctgtaatcccagcactttaggaggtcgaggcggatggatcacctcaggtcaggagtttgagaccagcctgaccaacatggtgaaactctgtctctactaaaataaataaataaataaataaataaataaaataaaaattaaaaaaaaaagtagtggcacatgcctgtaatcccagctactcaggaggctgagacaggagaattgcttgaacccaggaggtggaggctgcatgagccaagatggcgccattgcattccagactgggcaacaagaccca

SEQ ID NO: 100537 - DNA, 325 bp, Homo sapiens
gataaagcaatcgctcagcaaatgcataacaagtgaactcagtaccaaatacacactgagatcacagtgcagtaaaaatagaagactaagaaactctgcactcaaaaacaacagaatatgcattcctcacatcatcatatgccacatactctaaaatcaaccacataattggacataaagcaatcctcagcaaatgcaaaacaactgaactcataccaaatacacactgagatcacagtgcagtaaaaatagaagactaagaaaattgctgaaaatcatgcaattacatggaaatcaatcaacatgctcctgaatgactttttaa

SEQ ID NO: 100538 - DNA, 437 bp, Homo sapiens
ctgtaatcccagtactttgggaggctgaggtgggtggattacttgtcaggagttcgagaccaacttggccaacatggtgaaaccctgtctctataaaaatacaaaaaattaactgggcatcgtgacaggtgcctgtaatcccagctactcaggaggctgaggcaggagaatcacttgaacccaggaggtggaggttgcagtatcagctgagttactcctctagctgatatattttatctagccatcattctgcagatggtggtggtggacacataatcatagaaataataacggtggctatttattgagcccttcctccttcctatatgccaggcactgtgaatgacccacaccctttagattcagggtttaaatggcagacactggcaagaactattaacttagccaggcgcagtggctcatgcctgtaatccaag

SEQ ID NO: 100539 - DNA, 158 bp, Homo sapiens
cggggagtctacattgcttataggagaaagtccagacgtgcaatatcttctataacctccacccttctcactcgctgtgccccttcttccccacctcagccatcctaaacagctggcagttctctgaacatatcacacttcactcacaatgtggcttc

SEQ ID NO: 100540 - DNA, 282 bp, Homo sapiens
tgtttgtacctgtgtattttatactgtattctgtaatcacactgcattctgtagaactccaatatcaataaagtgcccttggcccagatgaagcggttcttggctcgtaaccagacctgttgacaggctggactggccatgcctcacatgtacaaggctggccccgggggaggcaggtaactttctgagaattagaggtgattctaactcatgtaggcattaccagccacaaccatgcaccccgggatgttgggatccagatgcctgcacggccgtccaacc

SEQ ID NO: 100541 - DNA, 960 bp, Homo sapiens
tacaggatggagatctagtttcaggcctttatgaaagcatttatctcctgtatgacataggttctctgatcctgtttctttaacataattggatagtgaaaatatattctacttgatagtctcaaatgaagaacatctgtatataaggagtatatgaaataccatgactgttgatcatgctgagaggcctttagcataggggagtgtgtaacataccatgactattgataacgctaagaggcatttagcataggtgatttttttgactcattctacctaccacctacaaatcgtaaccaacctgtgaagccagcgtcccatcttatccttatgtagtaggggagtaataatgtttcaacctatatttatgtaagtaagccgcccttaggagcagctattatttgggtaacacagaggaattagataggggaagccacaagattttttttttattttgacagtcctcactctgttgccccaggcaggagtgcagtggcatgatccctggctcactgcaacctccacctcctgggttcaaggaattctgcctcggccttccaaagtgctgggattacaggcgtgagccaccgcacccagctgaggaatattttttataactgagctaagaatgtgtactatccttgttagtggtgacagttgggaaacataaaagtgtattaatattcttttatatattagaagaacttcattttgagtccatcttggtatgtattccaaatataaactacgtaagtatgtctggcagaaaggcatagttagagcaagtgttttaaaatattgcttaattaatggtttccaattggctgcctgcagatcaaagtaagacgcaaatggttcaccactagagagtaagtttttttttgtttttattttgttttgttttgttttgtttttttttgagacagcctgggcaacagaacaagactgtgtctcaaagga

SEQ ID NO: 100542 - DNA, 194 bp, Homo sapiens
ccactgcactcagcataggtgacaagagcaagaccctgtctcaaaaaaaaaaaaaaaaaagaaaagaaatcaatagaagagtcacatggccagtgggtggcaagtcaagaagctttgagctgttttctccagaaaatagacattgggaaggtggaagtattcaccttctcttagatcacactctacagaggaac

SEQ ID NO: 100543 - DNA, 352 bp, Homo sapiens
tactgaataggtgtgggttgaattgatgtcatcgggaatcaggaactcccttggtggatgacatcatcgggcagtctgtacccaggggtggggatgaagggtgtaagataagtgaggtttttctcaccattgccccactatggaacaggccaccttgcaaggaagtgagcatctctctggagtgtctgagcagaagcagggtacctgtttgccagttatgcttgggaacagagtctgggattggacaggggggtggggcccaggctacaggccctctgaagacctgagttctgagattgatgagtttagagatacagacacagaaggggcttcagagatcatggagttcaag

SEQ ID NO: 100544 - DNA, 312 bp, Homo sapiens
ggagggaggatcctctatagtggacactcctttatttaaaaaatgtttaataaaatattgtttatagtgaaatcagctccccaaagaaggaactcctacatgcccaaactaattacagttgaacatactgattaaaaatgccatagatcacagctagtcaggaggcctcaaataaactgcaaataatgcttaaaactttaaaagaaggagaaccagcagtcttccgaaccatgggacagttccaaggtaatagcctaccttgcctaggataagtgaagtcctaaatgatggctatcttcagggcctggagca

SEQ ID NO: 100545 - DNA, 454 bp, Homo sapiens
gagatttcaccatgttgtccaggctggtctcaaactgctgacctcaggtgatctactcgccccggcctcccaaaatgctgggattacaggcatgagccacagcacctgtccccaatttaatttttttttatgtaaagtattagcatgattccaatattaaaaaaaatggaccagaggagattctctctcctgtcctatcctcagcacccagttcccctccccacaggcctctcagatgttacatgctgataactatgtacatgtattccttaaatgtttttttaagttttatattcttggcactggtcttcaaatgtgtacatgtgtgccagggagcaaatgccttcttgtttctgaaattggtcttttagactgttcttttttcccatcttctcacctcctgcccctccttcagggtacttccgtggccagaacccctccaggtcagaggcag

SEQ ID NO: 100546 - DNA, 634 bp, Homo sapiens
aggctggagtgcaatggcgatctcagctcactgcaacctccacctcctgggttcaagcgattctcctgccttagcctcctgagtagctgggattacaggtgcccaccaacacgcctggctaattttttgtatttttagtagagatggggttttgccatattggccgggctggtctcgaactcctgacctcaggtgatctgcctgcctcggcctcccaaagtactgggattacaggcgtgagccactgcacccagccacatcaatcaacactttgattgtctccacattctggctactgtgaacatgggtgtggaactatcttcatgaagccctactttaatttcttttgtatatacccagaagtaaaattgctggatcacatataattctattttaaaattttttcttagttttaaattatcttttggagacagggtattgctctgtacccaggctggagtaagtggcacagtcacagttcactgcatccttgacatcctgggctcaagagatcctcctgcctcagatttccaagtagctaggactaaaagtgtgccaccaccatgcctggtgaattttttttattttttattttttgaggcaggtcttcctctggcactcaggctggagtggt

SEQ ID NO: 100547 - DNA, 700 bp, Homo sapiens
ccaacctaatatttgactgagctcttttctgttaaagctgcaccattgccatgtttctttttcttttattttcttttcctatctcagtctttgtgaggaaatcagaagattttctgagtcagcagcattgcagtttctttttttatgtgataagaattcctgcccatttaattgaaagtatatagtaatgaaaagccttataacgtcgggcctctagcaatgcgattatacagcaatgattataaagctgggcaagtaagacaaaggctcactgggtaaaagaacattcaataaaggataacttatggtcagagaatgacaaccaatgtatgtagtccagaaggactttaaaaatgcatatgtacctatccctgaccctcctttttgtttgccaatctggatattatctaaacaacacaattagactaatatgccctatggctggaaattgagactagggaagtctctggttattattgatctgatctcgtacttcataaaatttaaaaagttatacacatctaaagactccattaagaaaatgaaagagcaaaccatattcagaaaaagctgttctcaaatcataaacctgataaaggtcttaaacccagaaaatacaaacaacttcaacaaatcaatgacaaaatgacgattcaaacaataataaatgatttggagtcttcgcaagagtagatgtcca

SEQ ID NO: 100548 - DNA, 232 bp, Homo sapiens
ctggcctgatcccctcccagcctgagcccctcctggcagtttggtttttctccactcggcctttgcaccatctttatgtttccagtctccccagctagaaggtaagcgccaagagagcagggaggcttccctcttgtgcactattcacacccagtcccgggaacagtgcctggcatgtggcaggtgttcaataaatattcatgacatgaacaaagtcatgccgtgtggccag

SEQ ID NO: 100549 - DNA, 551 bp, Homo sapiens
tgctcggccttagtcccactggatgcggcgagggttgaccggtcaggcccttgctggtggcctgggtagatgtctggagagggggcctgggctccggactcctgcccttcccccatcagtgatcctatcccacactctttggcgatggtcagtgagctgggcaggggcgggggtctgtccctgtccctcaggtggagatgtccaggccagtgcccacaactgggttagatgggctgcacaaggctggggaccagtctcccaggctgtcggggggcttcagtaatggctgtgggaagacccagcacgtgaggagacgggagcttagaaattttgtatggccaggtgcggtggctcatgcctgtaatccaagtactttgagaggccgagtcaggcagatcactcaagtccaggagttcgagaccagcctgggcaacatgacgagacccctgtctctactaaaaatgcaaaaaattagccagacttggtgatgtgcacctgtagtcccagctacctgggtggctaaggtgggaggatcacttgagtccaggagg

SEQ ID NO: 100550 - DNA, 489 bp, Homo sapiens
taagaagtactatttggaaaataaaagggttgggaatatagggctactttaaacttggaggtcaaaggtctctctggggtgacatctgaattgagatctaaatgaatggcaaggatgaggctgataatgtctgagtgtagggctttccgggcatacagaatggcttgcacaaaggccctgaggcaggaacaagtttggcaagttggagacacctaacgaaagcccaggcagctggagcataatgaatgaggctgtgattcttggcagatgaggtcagagaaaccagcagggcccggatcacatgaacctcatatgccactggagaattttaagctcctatccaccagctgtaaaacctcagaccaattacttaatctctcagagccttagctttcttatcccaaaacatgggatggcaacacttcatatggtttgtcaaagagcaatgttaaaagcagagtagacaccaactccataaatgtttaatca

SEQ ID NO: 100551 - DNA, 873 bp, Homo sapiens
cccttccctacacatcaagctcaaggatttgcccccgcccaggactggcaagttagctttactcaacatgcaccgagtcacaaaaactaaaatacctcttagtctaggtagacactttcactggataggtagaggcctttcctacagggtctgagaaggccacacagtcatttcttcccttctgtcagacataattcctcagtttagccttcccacctctatacagtctgataacagaccagcccttattagtcaaatcagccaagcagtttctcaggctcttagtattcagtgaaacctttatatcccttacggtcctccgtcttcaggaaaagtagaacggactaaaggtcttttaaaaacacttcaccaagctcagccaccaacttaaaaaggactggacaatacttttaccactttcccttctcagaagtcagacctgtcctcagaatgctacaaggtacagcccatttgagctcctgtatagacgttcctttttatttggtcccagtctcattccagacaccagaccaacttagactgtgccccaaaaaacttgtcatccctactatcttctgtctagtcatactcctattcaccattctcaactactcatgcattccctgctcttgtttacactgctggtttacactatttctccaagccatcacagctgatatctcctggtgctatccccaaactgccactcttaactcttgaagtaaataaataatctttgctggcaaggctatgctgaatctccttaggtactctaattagatgtcctaggtcctcccaattcttagacctttaatacctgtttttctccttctcttattccgtttagtttttcaattcatacaaaaccgtatc

SEQ ID NO: 100552 - DNA, 1024 bp, Homo sapiens
  misc_feature (986)..(986): n is a, c, g, or t
aaaaaaaaattaacagcatataacatcaaggaccttgtaataaatctaatataatccagacctctatagagaacattatacagctttaataagagataccaaagaagagctaaataaatggagaaagatataatgttcacggatagaaagtattgtaaagatgtcatgatttaaaaagtcagtaaatcaaacaaaaccccaatagggaccttcatggaacttgatattagaatttttaaatttatattgaggaataaagggccaagacatttctgaagaagaccagagaggacttaccctactagataccaggatttttattttgaaactctaatggaacagattagtgagcccagaaacagacccatggatatatgtacctctgatatatgacaaaggtggcatatcagatcttgtgggaagatggaatggctcaccaaatgaatccctatggaaaaagatgcacttaatccctccctcacgttataaagaaaatcaaataatggccttacagtaatattgtttgacttattgtaaacaatgacttaataagttgaaaaggataaatatcttttagaccctaaggaaatattaagacacaagcattcatatatttgaccatattaaaatacttttgttcattgagaacttttactcactaaaaggcaatttaaagaaagtgaaaagacgatgcataaacaaacttggagaaggtaatcataatatctacctacacttgacagaggattattatcaagaatacagagtattttatcatagttaaaaataaaaatttttaaaagatcacataaagaacttttttttgagatggagtctcactctgtcgcccagcctgggccaacctgggtgaaaccctgtctctacttaaaaatataaaaaattagccagggcgtgggtggcacacacctgttggtccccagctacttcgggaaaggctggagggcagggaggaagtgcttgaaccncgggggagttgggaggttgccgttttccccaggttggt

SEQ ID NO: 100553 - DNA, 3171 bp, Homo sapiens
  misc_feature (1205)..(1205): n is a, c, g, or t
attaaagtttccacgcatctttttccaataccgaaaagatacatgcccctctaagtagtttcctatagaagaagctaatgtggctaaaacttgatgggaagtccgacccagattcccttcatattgcccccaataatgtccccatttattcaggagactaaattcagatcccagaaaactaaacagtaaggtcaacctaatgatttgtctaggttttaagtgaagcccagtggccaggtgggtatggagatgtgtcactggtgccaagaagtgtccctgtcacaaagcctgccgacacctagccacttaggttaggcaatgaatgaaggcgcttgcgcagtagagtccagagcggggaagcgggcgcctgcgcagagacatagtgaccgtccgctcgccgccccgcctctgccaagccgcgccagcgcagtgaataacgagccagcagagacagcgtctgcgcagccgtggctgaggagcctgtggcggcagcggcgatggaaccagcggagcagccgagcgagttagtgtcagccgagggccgaaaccggaaggcggtgctgtgccagcgttgcggctcccgggtgctgcagccagggaccgctctcttctctcgccgacagcttttccttccctccatgagaaagaagccagctctgtctgacggcagcaatcctgacggcgatctcctccaggaacactggctggttgaggacatgttcatttttgagaatgtgggcttcaccaaggacgtgggcaacatcaagtttctggtctgcgcagactgtgaaattggaccaattggctggcattgcctagatgacaagaacagtttctatgtggccttggaacgagtttcccatgagtaactgaggggaggggtactcagctccatctccaaagataaacctactccccacaagaactggcctttaatgtggtataactgttccgctgccttcttgtctgtgctaatataaatactgagtaccagcatgtccatttgaacatgcagagggttaatcctgcttcctaaagcctcaagtacatgcctcctgcttagttcactttgtatcacatttcctaagctcccttttcccccagttttgggacactgtgcttacctccaaaaatctcatctcttccctggcattctccctaggctctgttttgcccaggggctcccgctttttcttgctctagangagcagtattcaaccttttagctatgatgacacataacaaaagatgtttatgtactaatagttgaaatctgcctttttctcattcaagaaggcatacaaatatctgagagtgactttgttgtatggctacccttgtgatctacagtaatttattctttctaaaagtaaagcattttcaaaactcagtatttaaaccactaaccagaaacattactttggatgcatctctaataccatgtttgagcacctctgctctaggttgagaatgacattttattgtgaagatgggtgtggtccctcttcccttgaaatcttgtagtttctttttatattagctcctcactgctacagcctagaaggtgagaagcagattttaaccccatctggcagccattcaaggaaaacccagccctggctgtttactcaggctctcttagaatgagagtggagggtgtaggatatgagggttaggcctttgccacattatacaaaagtttataatttgccacatctggacaagtaactttcttcttttgttcataggcaagacttctttaatggatagtatcatttactgaacctactgggcatggtcctcatggagttttggttcaactggaatctctgtgccaacccaggatacaaacttccatccagatgcatggatacaaatttccatagctccggggctgctctaacagtttgatatcagcagacgtgtttaagccttcaacttgatttccaattattccatcatttctattctgaaatgactcactgtcgtagaaggaagtttattatataaccaaggtttcaggtatcctcctgtcaccacctctactattcaggaggcctaaaattgaaataagtactaaacagaaaccttaccatctgaagtcccttccattgttttctagttgcttcctcattcctttacccccaaactttctaagggctccccgactgcagtgcaaggtggccttgggcacagttttgcaaccaacctactcccctggaaagatggcttccttctccaattagcctgaatgagctttagtaagcaattgagagaactgtgtttttccgacaaacggtcacatgtccatcgttatggcatgtgcagaaaaacagagttatccacacaagtcaggagcaaaacccaagtagatgcctctaggggcatatggcccctcacatcacaagccagaacctaagctaagcattttttaaattgagtttgagactagcctgggcaacatagtgagaccccatctctatttaaaaaatgaacaaaattacctgggcatagtggtgtatacctgtagtccctgctacttgggaggctcaggtgggaggatcacttgagccccaaagatggtggctgcagtaagccaagatcacaccactggcactccagcctgggcaacagagtgagaccctgtctcaaacaaacaacaacagtaacaacaaaaaaatatatagcgacttgaataggaaaccatagtatttcattgttttaatttgcatttattttatttctagtgaaacttttatatacgtatcggtcatttctatttccttttttgagaactgccaaatgttgccctagtagccaaaaatatcaggttgctattctgccttttcagtttgatctgaaagaaataaaggcatttaagcaatggaaattagatttctgcatgtccttgggaagaatatataaattgaaaaaacaaaggagagctgaaacctgaaccttggggtttagcttaaggtcaaccaactgattatctagtcagctataaaatgcaaacgtcatttcttcatttccctcacacctaataggctctcagtacatacttgtgaatcagctgctatttgctgtgggtagatagaggcaacctgtgctttctgctccgagtatagaaacttccgttttctattggggagagcagttgattttgtgaaa

SEQ ID NO: 100554 - DNA, 1343 bp, Homo sapiens
attaaagtttccacgcatctttttccaataccgaaaagatacatgcccctctaagtagtttcctatagaagaagctaatgtggctaaaacttgatgggaagtccgacccagattcccttcatattgcccccaataatgtccccatttattcaggagactaaattcagatcccagaaaactaaacagtaaggtcaacctaatgatttgtctaggttttaagtgaagcccagtggccaggtgggtatggagatgtgtcactggtgccaagaagtgtccctgtcacaaagcctgccgacacctagccacttaggttaggcaatgaatgaaggcgcttgcgcagtagagtccagagcggggaagcgggcgcctgcgcagagacatagtgaccgtccgctcgccgccccgcctctgccaagccgcgccagcgcagtgaataacgagccagcagagacagcgtctgcgcagccgtggctgaggagcctgtggcggcagcggcgatggaaccagcggagcagccgagcgagttagtgtcagccgagggccgaaaccggaaggcggtgctgtgccagcgttgcggctcccgggtgctgcagccagggaccgctctcttctctcgccgacagcttttccttccctccatgagaaagaagccagctctgtctgacggcagcaatcctgacggcgatctcctccaggaacactggctggttgaggacatgttcatttttgagaatgtgggcttcaccaaggacgtgggcaacatcaagtttctggtctgcgcagactgtgaaattggaccaattggctggcattgcctagatgacaagaacagtttctatgtggccttggaacgagtttcccatgagtaactgaggggaggggtactcagctccatctccaaagataaacctactccccacaagaactggcctttaatgtggtataactgttccgctgccttcttgtctgtgctaatataaatactgagtaccagcatgtccatttgaacatgcagagggttaatcctgcttcctaaagcctcaagtacatgcctcctgcttagttcactttgtatcacatttcctaagctcccttttcccccagttttgggacactgtgcttacctccaaaaatctcatctcttccctggcattctccctaggctctgttttgcccaggggctcccgctttattgtcagatagaagataacctttgcttgttggacttacaaaatggtgttaacatttaaatggcttgccctcggaagttcgagggattatagaccagggccggaattccaagaggtacacgacacgggggcgaccaggaccgcgcggagccc

SEQ ID NO: 100555 - DNA, 2498 bp, Homo sapiens
  misc_feature (532)..(532): n is a, c, g, or t
ggaccctaaacagaatcctcactatggatggctggttgaggacatgttcatttttgagaatgtgggcttcaccaaggacgtgggcaacatcaagtttctggtctgcgcagactgtgaaattggaccaattggctggcattgcctagatgacaagaacagtttctatgtggccttggaacgagtttcccatgagtaactgaggggaggggtactcagctccatctccaaagataaacctactccccacaagaactggcctttaatgtggtataactgttccgctgccttcttgtctgtgctaatataaatactgagtaccagcatgtccatttgaacatgcagagggttaatcctgcttcctaaagcctcaagtacatgcctcctgcttagttcactttgtatcacatttcctaagctcccttttcccccagttttgggacactgtgcttacctccaaaaatctcatctcttccctggcattctccctaggctctgttttgcccaggggctcccgctttttcttgctctagangagcagtattcaaccttttagctatgatgacacataacaaaagatgtttatgtactaatagttgaaatctgcctttttctcattcaagaaggcatacaaatatctgagagtgactttgttgtatggctacccttgtgatctacagtaatttattctttctaaaagtaaagcattttcaaaactcagtatttaaaccactaaccagaaacattactttggatgcatctctaataccatgtttgagcacctctgctctaggttgagaatgacattttattgtgaagatgggtgtggtccctcttcccttgaaatcttgtagtttctttttatattagctcctcactgctacagcctagaaggtgagaagcagattttaaccccatctggcagccattcaaggaaaacccagccctggctgtttactcaggctctcttagaatgagagtggagggtgtaggatatgagggttaggcctttgccacattatacaaaagtttataatttgccacatctggacaagtaactttcttcttttgttcataggcaagacttctttaatggatagtatcatttactgaacctactgggcatggtcctcatggagttttggttcaactggaatctctgtgccaacccaggatacaaacttccatccagatgcatggatacaaatttccatagctccggggctgctctaacagtttgatatcagcagacgtgtttaagccttcaacttgatttccaattattccatcatttctattctgaaatgactcactgtcgtagaaggaagtttattatataaccaaggtttcaggtatcctcctgtcaccacctctactattcaggaggcctaaaattgaaataagtactaaacagaaaccttaccatctgaagtcccttccattgttttctagttgcttcctcattcctttacccccaaactttctaagggctccccgactgcagtgcaaggtggccttgggcacagttttgcaaccaacctactcccctggaaagatggcttccttctccaattagcctgaatgagctttagtaagcaattgagagaactgtgtttttccgacaaacggtcacatgtccatcgttatggcatgtgcagaaaaacagagttatccacacaagtcaggagcaaaacccaagtagatgcctctaggggcatatggcccctcacatcacaagccagaacctaagctaagcattttttaaattgagtttgagactagcctgggcaacatagtgagaccccatctctatttaaaaaatgaacaaaattacctgggcatagtggtgtatacctgtagtccctgctacttgggaggctcaggtgggaggatcacttgagccccaaagatggtggctgcagtaagccaagatcacaccactggcactccagcctgggcaacagagtgagaccctgtctcaaacaaacaacaacagtaacaacaaaaaaatatatagcgacttgaataggaaaccatagtatttcattgttttaatttgcatttattttatttctagtgaaacttttatatacgtatcggtcatttctatttccttttttgagaactgccaaatgttgccctagtagccaaaaatatcaggttgctattctgccttttcagtttgatctgaaagaaataaaggcatttaagcaatggaaattagatttctgcatgtccttgggaagaatatataaattgaaaaaacaaaggagagctgaaacctgaaccttggggtttagcttaaggtcaaccaactgattatctagtcagctataaaatgcaaacgtcatttcttcatttccctcacacctaataggctctcagtacatacttgtgaatcagctgctatttgctgtgggtagatagaggcaacctgtgctttctgctccgagtatagaaacttccgttttctattggggagagcagttgattttgtgaaa

SEQ ID NO: 100556 - DNA, 758 bp, Homo sapiens
tttttttttaaagaaattgacaagttgattccaaaatgtatatagacatgcaaatgacaagtttaagaagaacaaagctggaagatttacactcttaatttccaggctcactgtaaaatcacagtaatcaggacagttggtactggtataaaaatagacatataagtcaatagaacagaatagaaagtttcagaaacagactgatagatacatatatgattgacttttaacagagttgccaatgtaattcaatggggaatgaatagtctttttcaagggcagtgctggaacaactggatgtccatattcaaaaaatgaaccttgacccttgtctcaactcatatataaaaattacctcaaaatagatcacaaacataaaagttaaaactataaaacttctagaagaaaatgtaagagaatgtcttagttactatgagttaggcaaaaatttttagatgaggtattaaaaagcacaatccataaaataacaaattgataaaagggacttcctcaaaatcaaaatctgctactcatcattaagaaaataaaaaggaagtaacaaaataggaccaaacgttgatttgataaagaaattatgtccacagtaaagaatacttacaactcagcaagataacaaccaacccaacaaaaaaatgaaaaaaatgtgcgaaaactgtgaataaacactttaccaaagaagacacatgaatggcaaatacatatatgaaaagatgcttaacatcattaatcattaggga

SEQ ID NO: 100557 - DNA, 521 bp, Homo sapiens
agacattgcctgatcttatgccttagttgtgttatttgtaaagatagtagttcctagttcattgagattgttgtaaggattataatgagctgagaggcataacagtctgtacacaaaacctgtgacatagcaaatgctcaagagctgtaattaattacttacagagcataagtggattgagttgaatgaagtgggaaaaattggcaaatttggtccctttcattaccccttggttcctattgacttctcggcagcacatgtgctctatacaaaatggggagagtgaacaacactgggaacttgattaaaaggttatagaggtactccactatcatttgagtcatcctgtgttggctttgtaaatattcaagggacatcagaatgtgggaaaaaaagtcatgggatttttttttccagtaatcagttagccatcaggtattcattgcattctactttatactcaaagacatcaatgtaggatcagaacaaatgtaagacttggtgtctgctttaaaaaaaaa

SEQ ID NO: 100558 - DNA, 318 bp, Homo sapiens
cggcctctgccaagcacagtgcctggtatgtggtaggtgccaacaaccatttgctgagttaacacacattgaatgaaggcgagagctgggcaccccaggtaattccaaaccataggtgacccaaagtggaactagagaccctggattcgggctttcagacacaggttatagacccagggaggggacgcctgggtcctgggagaagatgtcaggagcagcatcttcccagagatgaggtggaacatgcagttccaggaaccagccaccaggtggcgaagtggctctgcccagggtggggataccaggggctctaaattg

SEQ ID NO: 100559 - DNA, 657 bp, Homo sapiens
aggaattacagtgattcctgtgtaaattataactggtaattgaaatacttattttaatcatgattaaattatttttctagtttacacatgaatatgagcaaatttttaaatttaaaatgaaggcatactgaaaaagaatcaagtggcgatgcagaacctagtacaactggaacagtaaacagactcaaagaaggtatgttgcagatttgacaatgaatggcaattgcagtttgctgtggcagagcaaaacaagctgctatttaagaaacaaagtaggaaaattgagacttcagcagatgcaaaatgaattgggtaaattatatttcatatgccaaaaagaatcaatgaaatttagtcacctaaaatcagaattaacaagagtttttaaaaacaattttagaaggaactaaggttgtaagtttggccagatgtgaaatagctgagattctttttttttttcccgagacagagtcttgtggtgtcacccaggctggagtgcaatggcgcaatcttggctcactgcaacctccacttcctgggttcaagtgattctcctgcctcagcctcccgagtagctaggattacaggagtgtgccacgacgcctgcctaattttttttttttgagacagagtcttgtgtcacccaggctggagtac

SEQ ID NO: 100560 - DNA, 438 bp, Homo sapiens
tttagtcagaaattttgctgagattttgccatttccacccatatctgataatcacattttatgtctgtttccccatctgtaaaatagaaataataaatttgtacctaatacataaggtagtggtaaagataaaaggaggtaacacaaagcatttagaacagagcctggcacataaaaaattactaaatattagctgttattcttacctccagttaaatatagttgctggaatgtgtgttgccttctctttagtctttccctctctttaggatcttaagttcatcttccttagaaacaactttaaaaaaaaacaaaaaaacagggtttccctatgttttccagtctggcctggaactcctgggctcaagtgatccctgcctcagcccttaagtagctgaggctgcatgtgcacgccaccacaccccacttaaaaaatat

SEQ ID NO: 100561 - DNA, 904 bp, Homo sapiens
cagattggtcctagctattcctaatgtcatcgtttcagtagagtttcacaaaggctacgctacacgagttgtttaatctaaaataccttcccaggccgagtgcggtgctcacacctgtaatcccaacagtttgagaggccgatgcaggagtattgcttgagtccagatattcaagactagcctgggcaacatagcaagaccccatctgtacaaaaaattaaaaaattagctgcacatggtggtgcatgtctgtagtcccagccacttggaaggccaaggcaggaggatcactcaagcccaggagtttgaggctgcagcgaaccatgatcacaccattgcattcctgcgtgatagagcaagaccctgtctcaaaacaaacaaacaaaaacttcactaaggttatactgtaattacacattgaaacacagatacaaataatgaggcgaatgcttgatattaatgagattttaactaagaaatgactacaattctatattttcttgaaaagaaacaaccaagtgcatactcgtgtgctgctcaaagatctagggaccagcagcttattagaaatggaaaattgtaggccctgtcccacagcattctaaataagaatctgcgtttaacaagatacccattaaagtttgagaagcattgctttacacagcctcagaaaggaaggtaacacaatgtagaaggaactgtgttacattttgttaccaacatataaaagtgttacctatcacatgtcacataataaaattgaaggcaggagaaatttctttatcccttaaaattaattaaaaatgcatttaccttaatctttctagttttaatgttgttttcttcttataagccacttagaatgatttttatgccctagtgctatttggccttgtctgctaat

SEQ ID NO: 100562 - DNA, 480 bp, Homo sapiens
accatccctgttctcatgaacctaattgttattcaaggttataactaacacaagacttaatctgagcccaagtcaagtataaagtgtgaaatatccaaataactgtcattaaaatatatttggaggcaaataatgcagagaaaacatttatcaggcacatttttccaccatgaaaggaaatgctatatactttgatcacaatatttttttgtctgtcaccctaggtctgtatttgaaaaggagatatagaaaactaaaagtccagaatataccatatcttaccttctatttgggatctagaatttctagactaaagaggaggctacaaaaagttaatcaaatatgatatttactaagcacctatcaagcaacctaccaccttggaggtggactctgggacacagaggagaatgaatcagctttacccctgaaagtacagaaacctagacagttaaaaaccaaataattataatgcaaggt

SEQ ID NO: 100563 - DNA, 302 bp, Homo sapiens
caattatattgtacccatttgtatagtaaaacaatttgtgtggccagtggaggaaatatcttttctcacacagagatataggtcattatatgtttatttccacatttggacagaaaccttttaaattataattgagaagttagtaatttgtatttggcgttttctgtttctgttcgccccactcctttctcacaaatttagcagtctgatatccgaagctgtatttgttatagaaagtttgcagggttaatggtagaaggttcatttcaggtataaaaaattgtgtgagtaaaagtatggag

SEQ ID NO: 100564 - DNA, 514 bp, Homo sapiens
tggggtcctgccaaggcactggtggatgggatgatacctacgggatgcactggcaggggcagacgtttgctccaaggccatctcccttccatctcctctccctgctcaggctcatagccctgacctgaggcccagctagaaaggcagaaggcatcctcccacacagagcacacagctccttccctgcatcagaaccctcggtggcaccatcaagttggacagatatagtcaggcgaggtggggggtcactgcagaggacaagaaggtcctgtcctggaatctgcagccaaacacctttggccacagactgaaggctgcactgtcagcttccctacttttgaggttttgggacttggactgatccatcactggctttcttgcacctcaacttgcagacggtctgtcgtgggacttcaccttgtgatcgtgtgagtcaattctccttaataaactcccttacatatgtacatacatcctattagttctgctcctctagagaacgctgactcacaca

SEQ ID NO: 100565 - DNA, 462 bp, Homo sapiens
  misc_feature (6)..(6): n is a, c, g, or t
tccttncctctctcacgatccttgcctatctcacgatccttccctctctcgcaaacaaactaacggaactatcagaactaattatctcatgcacaatcatttatgactccactgtttgcaaaacctcttttggtctttgtaccatccacataagagcaatcaaacagctcgctaaaaatcctgtgaaactacccccaagacatcacctatgacgcttaaatgtcttcctgcatcacttcatttttgccattaaaaataatcaacattacactttgggaggccgaggcaggcggatcacttgaggccgggagttcaagaccagcctggccaacatagtgaaagcccgtctctgctaaaaatacaacaacaaaaaaattagccaggcatggtggtacacgtctgtaatcccagctacttgtgaggctgaggcacaagaatctcttgagcccaggaggcagaggt

SEQ ID NO: 100566 - DNA, 154 bp, Homo sapiens
tccaagcccagcatgccccacactctagaaagtggggaggggccaacaggaggggggtcggtttctgagggcctgctgaatgccaggcccacccttgcccacgctggggaggcagcatagccatccccatgacacagcacaggtgcccaggtct

SEQ ID NO: 100567 - DNA, 557 bp, Homo sapiens
tgccacttcaggaagccaccagaggagcagcttcctggctagatggccaaagtgttgaaaacttgctagaaaggcttcactctgttggtcacaataacacacaccctaaaagagcaagaaaggtcaagagctccttcttccaaggaccacttctgccactgataggctgaaccagtgccttcatctgagcagcgaaggggcgtaaatgagcagggacacactcctcagaccttctgcctctggctctgcctactcatttgtagaggcactagtgcacagcggttaaagaggaaggctgcttcacatctcagctccatcactcacagcacagcaaatatcttccttgctggttgtgtggaagtgatgggttgaggaaggaagactagatctccatttctggcttatgttttatgatttataatttcagagcttgcttttttttcttctgtcacaatgccattaattgatgataaattttcctctaaataagcacaacatattagccaccagctgtcttgcccaaggttgtaactagatctgtattataaaacatgata

SEQ ID NO: 100568 - DNA, 324 bp, Homo sapiens
atatggctgttatgtgctggcgataccccgggtgtgtttagcatttaggagggcagtgtgggcgcagaaaggtcagtagggttgacacccaaggagaaaggagagagtggctgaagtgggagaggtacataggagtccttcactgggccaggtaggcagcggtgtgatggtgaatgtcatggaatctgctctatgtggtagagaaaacctgatctttagcatttgctgattcctgtagtgtaaatactcccactgtggttgatttcacatcaccacttgaggtcactaaaagtggagctggaactattcacaatagcaaagaca

SEQ ID NO: 100569 - DNA, 448 bp, Homo sapiens
ccagcaaattgtgccactgtgctggcaggaaatgaaaactgctcagagcaagtggagccaagagagctgttgaaatgaaaggtaacatcaagggtgtgatcactaactcacacaggcgcctcaggattccaggatgcaactttctgcttcactggggaaagcatgaggccctctcatctgtcagccgatgtcaattctatataggggctgagatagactggaaggtgggctctgtgaattaagctttgttgtgcttgggtaaatgtaggggtttgggttgtttttattcccccaagaagtgtctcctaggaaaaacagaaataagaaaaagtttttgtttttgtgtttttcctgggcccaaacacttgaagaccaaattaagtaaaaggaagattccaaaagcactataggtcctattaatgtgggattagacagtgtgaagggagga

SEQ ID NO: 100570 - DNA, 470 bp, Homo sapiens
gcacaatctcctcattcctcccagattctaccccctggctcacccctactctcaagctattcttgtgggcatgcaaagcaaccattactgacaacgtgatgaatatgtcatttagcataaggttaggacattttagaactggctgataaaagattacttcaaaaccaaccagccaagtcaccagatcaacaggtctcaaacttccttctctccacttcactctttctcactgccagagatttggtgttttattatttgtctccccaggttacatgaatcccccaatcagaaccaacagaccaagtctggaaaatggaccttcagttttcgatattttcatcatttctcctcagctctccaagacctccaattttctgtatctctaattcaatttcagaaaaaaaaaaataaggagacaatgccttctggaagagtccctttctctcacccaatttagagtccggaaacac

SEQ ID NO: 100571 - DNA, 831 bp, Homo sapiens
aaactgactttattaagcaaatttgttccaaactttaaaaaatttttaacttaaaaaaatataaagtacctatgtatctaaaccccagaatagtttattcacaagtgaaaatgcaacttaactgccactgcctctgggatctctctattgggagttgctagaaaatactgtgatgagcttgagtatctggttttccaacatgccaaattattagaagtaggaagaggtagtttaagggcagacacactaacagcagatgaagaactgacaatgaggaaaaaaaaatcaataaaaagtaggtgcaagaatccaaaagcctaacagctttcacccactaacacaattgtcctacataattaaagactctggatgcactattctgttacctccagggtataataacgtatctaataataattttgaatcagtaagataaaatgacaatgtgctcagaagtcatttcagtgatttctggggaagggagtgaagttgaaaagggagaaggtgtgaaagtttgaaagagggccaggttgagaatcagtctgagaatgaaaacacccaaaactgaatattaacgctttacaaaaacacaccctaaaaaattttaattaaagagagacaaacagacatgagcctatttagaaaatcccaaggactctaaccaaaacctcctaaaatgaattcagcaaggttgcaggttaaaagaacacacataaattaattgtatttgtaaataccagcaatgaactggaagccaaaataaaaagtttgaacaccatttacgataccaaaaaactgaaatgtttaaaggtataaatttatcttgtgcag

SEQ ID NO: 100572 - DNA, 478 bp, Homo sapiens
gggttattggtacaaacccagaaagccatttctcacaaataattgacgtactagtctttacgccacctaatgctagattaagaattgttgcacattttggtgtttctaaaagtcactgaggagctaatacgcaatgtctcttttcttcagtgaaacttaattcacaaaagaatttgacagtgaactcatgatacctatattcaagcataatgaattgaaatttcattttagaatctggattctttcacagttaaatattctaaaaatggttcccacacacagattccaattgaatgctccagcattctcccttgggttttgggggcacctgctgctcattcagcacctagtctgaaaatagtaactaattgccagggcttgggttaaggcttgaaagtgcagggggagggatataaggcaaataaccaaaagtcttgaggtgacttaatgtgatgcctcctaaagtggcacagagtat

SEQ ID NO: 100573 - DNA, 149 bp, Homo sapiens
tgaaggaaagaccctggctttcctccccagctccaagtgggctgttctgattgcttccgggtcctgtcctcatggggagcagcaccacgggagactctgcctctgctgagttttctaacattagtgtcgggaaacaagaatctgccact

SEQ ID NO: 100574 - DNA, 603 bp, Homo sapiens
gacccacatatgcactaaatggcacttctgtgtagtgcttcccacattttcacatcaggacgcaaatagaaaatgataataattgtcaacacactaagaaaaacagataagttgcttgcagccagaacaattttccagggctctggccactgccagctctgccccacctgaggataagaagactagtatttctgcacaccagatggcaatctctgttctattggcctaacacttccctttacccccacctcccccacaggaactgactcagagcaagaggacagcttcaattccccatgatttcatctctagcccaaccaatcaacactctcgactcactgatcttcccctacctaccaaattatccctaaaaactctgatccccaaatgatcagggatactgatttgagtaataataaaactctggtctcccacaaataataataataataataataataatagaagccaagaaatgtagagtccaaagatccaacactgtgtgactctagatattttacttcacctctaatttacaaatagaaatatttgtaaatatttcttttcttcctggccttagagagtaaagtaaggatcaagtgc

SEQ ID NO: 100575 - DNA, 310 bp, Homo sapiens
ttttttacagaggtaaactgttttgaaatgcttgacttttgtgtgaaatgggtatatcatttaatcttctttaaatctgggtagataccactaccagcctgaaggtaagtcacaaaacatcaagaaaaatgttgatatctcttagatatggctaagttattttttcattttttaagacagcagggtctgtataaaatatatttgagtagagctcatttccattaatgaaaacaaagtggcacattataatgtaaattccattattttaaataaaagctgacaaagggatgaggaagcaagtgttactaac

SEQ ID NO: 100576 - DNA, 392 bp, Homo sapiens
  misc_feature (318)..(318): n is a, c, g, or t
  misc_feature (391)..(391): n is a, c, g, or t
ggacaaagaaaagaaactagtgccatgtgatatcacagaagcagaagatggcattttgagaaagtaggcatgcacaacagtgtccatgcagcagagaggtctagcaagatatagattggaaaatgtgggttgattttccaatgaggggcttgttggtgaccatgcaagaggagttgaacaatgagattacatggacacagggaggggaacatcacacaccagggcctgtcaggagttggggggcaaagggagagagagcattaggacaaaaacctaatgcatgtgggctttaaaaccttgatgacaggttgataggtncagcaaaccaccacggcactgttattacctattgttaacctggcacgtttcagcacttgttttccccaggaant

SEQ ID NO: 100577 - DNA, 379 bp, Homo sapiens
ggacaaagaaaagaaactagtgccatgtgatatcacagaagcagaagatggcattttgagaaagtaggcatgcacaacagtgtccatgcagcagagaggtctagcaagatatagattggaaaatgtgggttgattttccaatgaggggcttgttggtgaccatgcaagaggagttgaaacagtgaatggaagtgagaaatttgaaatggaaagtggagacagaaacgactggtccacatgaggggaaggggttgtggaccaggccacaagttggggagaattgactttgagtagagagaggatatctttcttggcagtgtcagtaagggtgtgtgtgaatctggctaggagggaattccgcgaagatcactcttgggtg

SEQ ID NO: 100578 - DNA, 599 bp, Homo sapiens
tcttttggttaaatgacaccaatgggcaaaaaaaaaaaaaaatcaactgaaacaaaagaatagactgaatttgccaaaagagtgcttaaatggagacctaagtcttcaaagctaaggtgatgagaaaagaacaggtcttaaatttcttcagagcttcaagaggcaaagcttgaaagaagaaaaaattttattcttaggtaagatgtaggggtagaatggtggcccctgcaaaaggtaagccttcctcctaatcctagaatcgtggatggtaccttatttggataaaaaggtctttgcagatgtaattaagaaccttgagatgaggagatcatcctggattatctggtggactgtaaagtcaatgacatgtattcatatatgacagaagagaagacatggagaagaggagggagtagttgtgaccgtggaggcagagaatggagtaatgtgatcataaatcaaggaatgctgacagccactaaagctggagaaggccaaggacagatattcaatcctcccgtagaagtacagccctgctaatgcattgattttggacttctggcctcagaactgtaagagaataaatttctattgtttta

SEQ ID NO: 100579 - DNA, 1056 bp, Homo sapiens
gtacgtgggcgggcggatcgtggtggctgcgcttgcgaggaccctgaggtagattgggtggtttcaacaggaacgcatccactgtctgagaggtggcaattgaagccggaagaacatctaccaagagcagagaacccaggaagaaaattctgcctctttaatacgttccaatatggacgttttccatatagatacctatctatatagatagatgctctgggatctgacggtcctggacacctgtatggctgtgtgctgtggtctttgcctagcctgcggttcacttttgctctggccaccacctcccctcatgtacaaaccgcgtctctgctctgccagtcttggcccccgtcaggcagcggttcactccctcaccagggaagtctagatagatagatatagatagatatcgatcgatagatatagatatatatatagatagatagataggtagatatatggatagatatagatatttggatagatatgtagacgtctatctataaatatatcgatatatcggggttctcagccatcccaaagaagcttgcacagggccagttgctttatgtcaggaaaagggacacagactgagtgtatgagggttttttttttctatagatgtatagatatttatatcagatgcaaataagtgaaactctcatacaacttttaattttgtgttttttccaaactctattccattcaactttttctgcctttttatttgattataatgagacatcgtactggaggcaggcttgaaatggatatacagagcactttcaacccagaaatttgtctcacgacttggggtccttacttaagttgtagctgttagtaatttcatccatgaattcactttgtgccatagtgtgatgttttgttatgaagttggaattgggaagggaaactaggaagttttgggagaagttaagaaggttgagtaggcaggcgttgttatagatattaaatttcaccctgcttatcaaagtacctggagcgtatggtatccaagctgtaaatggcccaaaggaatcggggttctcagccatc

SEQ ID NO: 100580 - DNA, 367 bp, Homo sapiens
gtacgtgggcgggcggatcgtggtggctgcgcttgcgaggaccctgaggtagattgggtggtttcaacaggaacgcatccactgtctgagagtttaaacttgattttgtgaggggacgaacagcgtgacaattaaaagaagatctgggaatcgaagagaagacatggagaagaggagggagtagttgtgaccgtggaggcagagaatggagtaatgtgatcataaatcaaggaatgctgacagccactaaagctggagaaggccaaggacagatattcaatcctcccgtagaagtacagccctgctaatgcattgattttggacttctggcctcagaactgtaagagaataaatttctattgtttta

SEQ ID NO: 100581 - DNA, 963 bp, Homo sapiens
gtacgtgggcgggcggatcgtggtggctgcgcttgcgaggaccctgaggtagattgggtggtttcaacaggaacgcatccactgtctgagagtttaaacttgattttgtgaggggacgaacagcgtgacaattaaaagaagatctgggaatcgaaaagcttcctgaggccttcaccagaagcagatgctggtgccgtgcttctacagcctgcagaactaagagaagacatggagaagaggagggagtagttgtgaccgtggaggcagagaatggagtaatgtgatcataaatcaaggaatgctgacagccactaaagctggagaaggccaaggacagatattcaatcctcccgtagaagtacagccctgctaatgcattgattttggacttctggcctcagaactgtaagagaataaatttctattgttttaagccttcagtttgtggtagtttgttacagaaaccctgtaaagttaatacacagagttcaaagagaatccggtaatatctctaaaagactcgtgtattagtcaggattctccagagaagcaaagccaatagaatgatacatgttgttaaagcaaattaaaatggagaccatgcctgaagaatctctgtgcagagaaacccagttaggcctcataagttaaccttacttgatttgcaaacataatctaaaagttaactggagctatttccggtaaatgaatataacacaacttaagctcaatcagtcagaagcagctttataattatgtagctagggactttccaagaggatgaccaaagaaggaaatgatataactataaccaaataaatattttctttgctttcctgttcctcctataaaagcctccccactgctgagctgtgctcagcagagctccgaaacaacttctggtttagagttgcccgatttgtgaatcactgtttgctcaaataaactctttaaaattttatt

SEQ ID NO: 100582 - DNA, 672 bp, Homo sapiens
gtacgtgggcgggcggatcgtggtggctgcgcttgcgaggaccctgaggtagattgggtggtttcaacaggaacgcatccactgtctgagagtttaaacttgattttgtgaggggacgaacagcgtgacaattaaaagaagatctgggaatcgaaaagcttcctgaggccttcaccagaagcagatgctggtgccgtgcttctacagcctgcagaactaagagaagacatggagaagaggagggagtagttgtgaccgtggaggcagagaatggagtaatgtgatcataaatcaaggaatgctgacagccactaaagctggagaaggccaaggacagatattcaatcctcccgtagaagtacagccctgctaatgcattgattttggacttctggcctcagaactatttatatatcagctttttatcagttgaaataaaccaccctgggccgggtgcagtggctcacacctgtaatcccagcactttgggaggccgaggtctggaaagcatggaaatttgtatcttcattcacttttgttttcatggactcttttcatgtttgaacttttcatggtatgagctgttttataatctataatatggaatgtttctcatacgaatgtttttcttattgaagaatgccatagaaataagggtgtgaggtatactta

SEQ ID NO: 100583 - DNA, 579 bp, Homo sapiens
gtacgtgggcgggcggatcgtggtggctgcgcttgcgaggaccctgaggtagattgggtggtttcaacaggaacgcatccactgtctgagagtttaaacttgattttgtgaggggacgaacagcgtgacaattaaaagaagatctgggaatcgaaaagcttcctgaggccttcaccagaagcagatgctggtgccgtgcttctacagcctgcagaactaagagaagacatggagaagaggagggagtagttgtgaccgtggaggcagagaatggagtaatgtgatcataaatcaaggaatgctgacagccactaaagctggagaaggccaaggacagatattcaatcctcccgtagaagtacagccctgctaatgcattgattttggacttctggcctcagaactgtctggaaagcatggaaatttgtatcttcattcacttttgttttcatggactcttttcatgtttgaacttttcatggtatgagctgttttataatctataatatggaatgtttctcatacgaatgtttttcttattgaagaatgccatagaaataagggtgtgaggtatactta

SEQ ID NO: 100584 - DNA, 3326 bp, Homo sapiens
ttttttgcatatgttcacaatggaaagaaatcctaaatcttacttcgaagttagcaagaattacaatatttttcccaccccaattcatggccctctactttatggtcttatttcataggctttctgacatgttttgcttcaaagaggtcctattccccatcccatttcctatcttctggtttgggattacactcaagatgtgatatacagatagattagtttattagaaagaaaatatttttccacatggcgaactttagtggaggctaacaaatcagaatgtgctaaaatagccatgtgtacatatagacaatgggaagcttggaactgctttagcattttatacaaaagacttaaaagtaatttcagctgggcactgtggctcgggcctgtaatcccagcactttgggaggctaaagtgagaggattgcttgaggccaggagttcaagaccagcctgggcaacatagtgagaccctccccccatctgtacaaaaaaattacaaaattaaccaggcattgtggctcgcacctgtggtaccagctacttggaaggctgagacaggaggatggcttgagcctgggaggttgaggctttaatgagctatgatcatgccactgcactccagcctgggtgacagagcaagatcctgtttccaaaaacaacaaaaactggtttcaaatatattgctacattggaattctccataaaggaattaattgttgataacaatgccctcagtatactatttgtcaatacctataacaatgcaacaaacaaaaaagaaaatttaaatagctggaccacattaaaagttttattgggctaaaatcaaaaacatctgacaagtttttgacttgtctttctcatgatttaatgtcccagcagagcaactgggaacctaattctgaccaaaaaggaggaattgtttggctaattggaagtgacagaaaccttgggagaaagcaaccgcataccaaggataattataagaaggtaacatgggccctaaaggatagtgtcaagaaacctgaaacccccaaatgaggtgagacttgcaaaaaatgctaaggaaggacaaaaaacaggccttttaaaattctgttcagaaccagaagatgatcaagaaagggaaatgcccactagcagcttctactgtaaggttagagctgacagagaaagaactccttaactactatttgcttcattctctacaaaggaaactagagaagtgggttgacgtaatagaaagaacatgtgtttgtggggccaggcaaacctgggtttaattctgtttcaacactgcttaacaaaatttatgggaggctattgttttggattgggctcctgcaccaggcccctccggaccaaaccaaaatggagtcactcatactaaaactccaggtcactgaaccaaaactaagttgtttatctgaccttccaagaaatcaggagggagaaaacaaccaaatctccaaacaggccagttttaatcagcgtgataaggaagtcctctcttttttaaccctataaagaaagtaactttttgaaatgatcaatacactttgtattccttagttctgctttctttagcccctttctgcctataaagcccacttcctctgctcaacttactgaagcagtattccattttatagaatgagatgctgcccaattctggaatcactaataaaagccaattagatctttacatttgttgaaattttgtctttgacaacattactagttatattattctgggtatccttttccccatctgtaaaatggacatagcgatatccttcccatcagatttttctcattaatagaagtaatacattcaaaacactgagccaggctcacaccagtgagcaacttgttaatattactcagaagcatattatagatattgacagaaagcaatactgttcctaattaggggaagaaattctaagagagtacctaagagtttgaatttagattataacatttgctctgagtattttacattacagcctttggggggaaaagtacaaatgagatctgagaacagtggtactcatctttgaggaattatggaaaacgtaatagaacactaaacatgggaaaacatcggccttcaggttgaaaagtggaaatctcaatccctgaattttttttttttttttactaagtaacttttttgcccattggtgtcatttaaccaaaagaagaagaaattccaaaaaaaaaaaaaaatcaactgaaacaaaagaatagactgaatttgccaaaagagtgcttaaatggagacctaagtcttcaaagctaaggtgatgagaaaagaacaggtcttaaatttcttcagagcttcaagaggcaaagcttgaaagaagaaaaaattttattcttaggtaagatgtaggggtagaatggtggcccctgcaaaaggtaagccttcctcctaatcctagaatcgtggatggtaccttatttggataaaaaggtctttgcagatgtaattaagaaccttgagatgaggagatcatcctggattatctggtggactgtaaagtcaatgacatgtattcatatatgacagaagagaagacatggagaagaggagggagtagttgtgaccgtggaggcagagaatggagtaatgtgatcataaatcaaggaatgctgacagccactaaagctggagaaggccaaggacagatattcaatcctcccgtagaagtacagccctgctaatgcattgattttggacttctggcctcagaactgtaagagaataaatttctattgttttaagccttcagtttgtggtagtttgttacagaaaccctgtaaagttaatacacagagttcaaagagaatccggtaatatctctaaaagactcgtgtattagtcaggattctccagagaagcaaagccaatagaatgatacatgttgttaaagcaaattaaaatggagaccatgcctgaagaatctctgtgcagagaaacccagttaggcctcataagttaaccttacttgatttgcaaacataatctaaaagttaactggagctatttccggtaaatgaatataacacaacttaagctcaatcagtcagaagcagctttataattatgtagctagggactttccaagaggatgaccaaagaaggaaatgatataactataaccaaataaatattttctttgctttcctgttcctcctataaaagcctccccactgctgagctgtgctcagcagagctccgaaacaacttctggtttagagttgcccgatttgtgaatcactgtttgctcaaataaactctttaaaattttatt

SEQ ID NO: 100585 - DNA, 2795 bp, Homo sapiens
ttttttgcatatgttcacaatggaaagaaatcctaaatcttacttcgaagttagcaagaattacaatatttttcccaccccaattcatggccctctactttatggtcttatttcataggctttctgacatgttttgcttcaaagaggtcctattccccatcccatttcctatcttctggtttgggattacactcaagatgtgatatacagatagattagtttattagaaagaaaatatttttccacatggcgaactttagtggaggctaacaaatcagaatgtgctaaaatagccatgtgtacatatagacaatgggaagcttggaactgctttagcattttatacaaaagacttaaaagtaatttcagctgggcactgtggctcgggcctgtaatcccagcactttgggaggctaaagtgagaggattgcttgaggccaggagttcaagaccagcctgggcaacatagtgagaccctccccccatctgtacaaaaaaattacaaaattaaccaggcattgtggctcgcacctgtggtaccagctacttggaaggctgagacaggaggatggcttgagcctgggaggttgaggctttaatgagctatgatcatgccactgcactccagcctgggtgacagagcaagatcctgtttccaaaaacaacaaaaactggtttcaaatatattgctacattggaattctccataaaggaattaattgttgataacaatgccctcagtatactatttgtcaatacctataacaatgcaacaaacaaaaaagaaaatttaaatagctggaccacattaaaagttttattgggctaaaatcaaaaacatctgacaagtttttgacttgtctttctcatgatttaatgtcccagcagagcaactgggaacctaattctgaccaaaaaggaggaattgtttggctaattggaagtgacagaaaccttgggagaaagcaaccgcataccaaggataattataagaaggtaacatgggccctaaaggatagtgtcaagaaacctgaaacccccaaatgaggtgagacttgcaaaaaatgctaaggaaggacaaaaaacaggccttttaaaattctgttcagaaccagaagatgatcaagaaagggaaatgcccactagcagcttctactgtaaggttagagctgacagagaaagaactccttaactactatttgcttcattctctacaaaggaaactagagaagtgggttgacgtaatagaaagaacatgtgtttgtggggccaggcaaacctgggtttaattctgtttcaacactgcttaacaaaatttatgggaggctattgttttggattgggctcctgcaccaggcccctccggaccaaaccaaaatggagtcactcatactaaaactccaggtcactgaaccaaaactaagttgtttatctgaccttccaagaaatcaggagggagaaaacaaccaaatctccaaacaggccagttttaatcagcgtgataaggaagtcctctcttttttaaccctataaagaaagtaactttttgaaatgatcaatacactttgtattccttagttctgctttctttagcccctttctgcctataaagcccacttcctctgctcaacttactgaagcagtattccattttatagaatgagatgctgcccaattctggaatcactaataaaagccaattagatctttacatttgttgaaattttgtctttgacaacattactagttatattattctgggtatccttttccccatctgtaaaatggacatagcgatatccttcccatcagatttttctcattaatagaagtaatacattcaaaacactgagccaggctcacaccagtgagcaacttgttaatattactcagaagcatattatagatattgacagaaagcaatactgttcctaattaggggaagaaattctaagagagtacctaagagtttgaatttagattataacatttgctctgagtattttacattacagcctttggggggaaaagtacaaatgagatctgagaacagtggtactcatctttgaggaattatggaaaacgtaatagaacactaaacatgggaaaacatcggccttcaggttgaaaagtggaaatctcaatccctgaattttttttttttttttactaagtaacttttttgcccattggtgtcatttaaccaaaagaagaagaaattccaaaaaaaaaaaaaaatcaactgaaacaaaagaatagactgaatttgccaaaagagtgcttaaatggagacctaagtcttcaaagctaaggtgatgagaaaagaacaggtcttaaatttcttcagagcttcaagaggcaaagcttgaaagaagaaaaaattttattcttaggtaagatgtaggggtagaatggtggcccctgcaaaaggtaagccttcctcctaatcctagaatcgtggatggtaccttatttggataaaaaggtctttgcagatgtaattaagaaccttgagatgaggagatcatcctggattatctggtggactgtaaagtcaatgacatgtattcatatatgacagaagagaagacatggagaagaggagggagtagttgtgaccgtggaggcagagaatggagtaatgtgatcataaatcaaggaatgctgacagccactaaagctggagaaggccaaggacagatattcaatcctcccgtagaagtacagccctgctaatgcattgattttggacttctggcctcagaactgtaagagaataaatttctattgtttta

SEQ ID NO: 100586 - DNA, 1920 bp, Homo sapiens
cgggaagcagtggtatcaacgcagagtggccattatggccgggcaggagggagaaaacaaccaaatctccaaacaggccagttttaatcagcgtgataaggaagtcctctcttttttaaccctataaagaaagtaactttttgaaatgatcaatacactttgtattccttagttctgctttctttagcccctttctgcctataaagcccacttcctctgctcaacttactgaagcagtattccattttatagaatgagatgctgcccaattctggaatcactaataaaagccaattagatctttacatttgttgaaattttgtctttgacaacattactagttatattattctgggtatccttttccccatctgtaaaatggacatagcgatatccttcccatcagatttttctcattaatagaagtaatacattcaaaacactgagccaggctcacaccagtgagcaacttgttaatattactcagaagcatattatagatattgacagaaagcaatactgttcctaattaggggaagaaattctaagagagtacctaagagtttgaatttagattataacatttgctctgagtattttacattacagcctttggggggaaaagtacaaatgagatctgagaacagtggtactcatctttgaggaattatggaaaacgtaatagaacactaaacatgggaaaacatcggccttcaggttgaaaagtggaaatctcaatccctgaattttttttttttttttactaagtaacttttttgcccattggtgtcatttaaccaaaagaagaagaaattccaaaaaaaaaaaaaaatcaactgaaacaaaagaatagactgaatttgccaaaagagtgcttaaatggagacctaagtcttcaaagctaaggtgatgagaaaagaacaggtcttaaatttcttcagagcttcaagaggcaaagcttgaaagaagaaaaaattttattcttaggtaagatgtaggggtagaatggtggcccctgcaaaaggtaagccttcctcctaatcctagaatcgtggatggtaccttatttggataaaaaggtctttgcagatgtaattaagaaccttgagatgaggagatcatcctggattatctggtggactgtaaagtcaatgacatgtattcatatatgacagaagagaagacatggagaagaggagggagtagttgtgaccgtggaggcagagaatggagtaatgtgatcataaatcaaggaatgctgacagccactaaagctggagaaggccaaggacagatattcaatcctcccgtagaagtacagccctgctaatgcattgattttggacttctggcctcagaactgtaagagaataaatttctattgttttaagccttcagtttgtggtagtttgttacagaaaccctgtaaagttaatacacagagttcaaagagaatccggtaatatctctaaaagactcgtgtattagtcaggattctccagagaagcaaagccaatagaatgatacatgttgttaaagcaaattaaaatggagaccatgcctgaagaatctctgtgcagagaaacccagttaggcctcataagttaaccttacttgatttgcaaacataatctaaaagttaactggagctatttccggtaaatgaatataacacaacttaagctcaatcagtcagaagcagctttataattatgtagctagggactttccaagaggatgaccaaagaaggaaatgatataactataaccaaataaatattttctttgctttcctgttcctcctataaaagcctccccactgctgagctgtgctcagcagagctccgaaacaacttctggtttagagttgcccgatttgtgaatcactgtttgctcaaataaactctttaaaattttatt

SEQ ID NO: 100587 - DNA, 1741 bp, Homo sapiens
ttttttgcatatgttcacaatggaaagaaatcctaaatcttacttcgaagttagcaagaattacaatatttttcccaccccaattcatggccctctactttatggtcttatttcataggctttctgacatgttttgcttcaaagaggtcctattccccatcccatttcctatcttctggtttgggattacactcaagatgtgatatacagatagattagtttattagaaagaaaatatttttccacatggcgaactttagtggaggctaacaaatcagaatgtgctaaaatagccatgtgtacatatagacaatgggaagcttggaactgctttagcattttatacaaaagacttaaaagtaatttcagctgggcactgtggctcgggcctgtaatcccagcactttgggaggctaaagtgagaggattgcttgaggccaggagttcaagaccagcctgggcaacatagtgagaccctccccccatctgtacaaaaaaattacaaaattaaccaggcattgtggctcgcacctgtggtaccagctacttggaaggctgagacaggaggatggcttgagcctgggaggttgaggctttaatgagctatgatcatgccactgcactccagcctgggtgacagagcaagatcctgtttccaaaaacaacaaaaactggtttcaaatatattgctacattggaattctccataaaggaattaattgttgataacaatgccctcagtatactatttgtcaatacctataacaatgcaacaaacaaaaaagaaaatttaaatagctggaccacattaaaagttttattgggctaaaatcaaaaacatctgacaagtttttgacttgtctttctcatgatttaatgtcccagcagagcaactgggaacctaattctgaccaaaaaggaggaattgtttggctaattggaagtgacagaaaccttgggagaaagcaaccgcataccaaggataattataagaagaagagaagacatggagaagaggagggagtagttgtgaccgtggaggcagagaatggagtaatgtgatcataaatcaaggaatgctgacagccactaaagctggagaaggccaaggacagatattcaatcctcccgtagaagtacagccctgctaatgcattgattttggacttctggcctcagaactgtaagagaataaatttctattgttttaagccttcagtttgtggtagtttgttacagaaaccctgtaaagttaatacacagagttcaaagagaatccggtaatatctctaaaagactcgtgtattagtcaggattctccagagaagcaaagccaatagaatgatacatgttgttaaagcaaattaaaatggagaccatgcctgaagaatctctgtgcagagaaacccagttaggcctcataagttaaccttacttgatttgcaaacataatctaaaagttaactggagctatttccggtaaatgaatataacacaacttaagctcaatcagtcagaagcagctttataattatgtagctagggactttccaagaggatgaccaaagaaggaaatgatataactataaccaaataaatattttctttgctttcctgttcctcctataaaagcctccccactgctgagctgtgctcagcagagctccgaaacaacttctggtttagagttgcccgatttgtgaatcactgtttgctcaaataaactctttaaaattttatt

SEQ ID NO: 100588 - DNA, 597 bp, Homo sapiens
gtacgtgggcgggcggatcgtggtggctgcgcttgcgaggaccctgaggtagattgggtggtttcaacaggaacgcatccactgtctgagagtttaaacttgattttgtgaggggacgaacagcgtgacaattaaaagaagatctgggaatcgtaagtactgacagaatacctggagggaaggtgggactggagaatagtttgtgaaacagatcctgctgaggatgaatccagaacttcctgaagggttccgcttctgctgtgtagggacaaggttgtaaatagacaagccacaggcacctgcaaatggtaagtgtggtagagaggggctggaattgcctgttggtgtatctgtgggaagcagctgctatccttgaggaagaaaagatggagaaggtaagtggctatcaacctgtcagagacaacacattctgtgaagttgtactctttcatttctgacactgtggttcttaatatctgttctaaacctggcagtcattgaggttcgcaaagtatctccttctatgtgacagtaaaactggaattactatcagaatggaatccattcctgctagagtaaaaccatgaaaagaaatcg

SEQ ID NO: 100589 - DNA, 547 bp, Homo sapiens
gtacgtgggcgggcggatcgtggtggctgcgcttgcgaggaccctgaggtagattgggtggtttcaacaggaacgcatccactgtctgagagtttaaacttgattttgtgaggggacgaacagcgtgacaattaaaagaagatctgggaatcgaatacccatctcgagttctggatatgtgctctgagaaggtgcccatgtcaccgaccacactggaggccaatgcagatactgggggaaggttccatggtagctaagtgtggacaagctaatcactgaagttccctgatgcagagttgataatctctctagagttggatgaaagactgtgctgccttgaagctctgagagatgccatgccaattcaaggcagggtctttattgttgaaactcttgcgtaatgacatctttattcaggtgaaaatacaggatgaatttcaactatatgatattgtttatgttcctcagacatgttatttgtctttacaaagattggtttcaattgtgtgactgatattaaataaacatggaattttaccattcataa

SEQ ID NO: 100590 - DNA, 533 bp, Homo sapiens
gtacgtgggcgggcggatcgtggtggctgcgcttgcgaggaccctgaggtagattgggtggtttcaacaggaacgcatccactgtctgagaggtggcaattgaagccggaagaacatctaccaagagcagagaacccaggaagaaaattctgcctctttaatacgttccaatatggacgttttccatatagatacctatctatatagatagatgctctgggatctgacggtcctggacacctgtatggctgtgtgctgtggtctttgcctagcctgcggttcacttttgctctggccaccacctcccctcattttaaacttgattttgtgaggggacgaacagcgtgacaattaaaagaagatctgggaatcgaaaagcttcctgaggccttcaccagaagcagatgctggtgccgtgcttctacagcctgcagaactgaaggactttacagcttctctttcgcatatccaaattgccagcatcaccgctcttgcactccagcctgggcggctgagtgagactccatccccga

SEQ ID NO: 100591 - DNA, 116 bp, Homo sapiens
ggctcaaataggtgatgaaggggaattacaagaggcctgttagcctgtgagcctcatgacacctgcatgtcctggaacctgatgctaatgctttggcagtgggtcacagtgaccaa

SEQ ID NO: 100592 - DNA, 728 bp, Homo sapiens
cttagataaaacaaagctgagtggttgcagcatgcacatgttgtcttgtttacttttctttttctgtttttaatttttttccaaggactgctttactgacagatactcttccaaaatggacaggataaaaggagttttatatttgtcaggaagaaatgattcttcttatagcaatgagtttgtatacatacaatgttcatttcccaaaacatactgaaattaagggaacattagtatttgttgggtttggggtttattttaaaaattctaaaactaaacaactgtaggaaaggagaatatcacttccttctgattcttattctggatgtttcagcagagaatatgaaatgatgacagatttatacctaaacagacaagatgacttcaaaaaagacttttgtgcctctcttgtgtatgcttatatctgaattgacatttttttcctttaaagccaggcagtggttcatgcctgtaatcccagcactttgggagaccaaggcaggagaatagcttggggccaggagtttgagaccagtctgggcttaataagtgagaccctgtctctaaaaaacaattaaataaaataacaattgtcagtgcagtgctgttttcctgtagtcccagctatttgggaggatgacgctgaagcaggaggatcccttgagtccagaagttcaagactgcggtgagctatcattacaccactgcgctccagcttgggcaacaga

SEQ ID NO: 100593 - DNA, 424 bp, Homo sapiens
gaaatgaattattagtgagtgtgtgtagtttgaaggataaatctctaatattctagagtacaactagtttgtcttctattctagaaatgaaactatcttccccttcttataattcaaaatattagttcagtaatacagtacttttcactgaaaatatgacatgagttctataagttttcctgttgtatatttgtacagcaggtccttgaataacatccttttgttcaatgttattttattataacattgataagaaaaaaatagattcctgggccagagccactgtctgtgtgggaatttgcatgttctcctcatgtctgcatgggattctctggggtacttcggtttcctcccgcatcccaaaggtgggcatgttagggttaattgggtatgtctgcatgatcccggtgtgagttagtgtgtg

SEQ ID NO: 100594 - DNA, 262 bp, Homo sapiens
aaaccccacaaagctgtacaggaaagggaatataaatactagtatcgcctctgactcatttctgactaatgtctaagatgtcatcagaatgtaaatactgaatatgtctctagtagaattgtgatatgactctgttggggagatagggtactgagaagggctatgtgtatgtggagagaagaaagtgaaatccttttcttttatggaagcaaatttagaaagaacacctaagccagttaccccctctctttctggacattct

SEQ ID NO: 100595 - DNA, 238 bp, Homo sapiens
gcggccgcctactactactaaattcgcggccgcgtcgatcctcccctcaatgcaaacttgatttttagtaataaattctagatttgggaaatggccttttataatataaatacaacaaagccatttcacttttacctctccatcaatgaaaaccattttttaaaatgcctgctcatttctgatatagaaaatagattgaaatatagagaactggcccctccaagtgaaaaccgataat

SEQ ID NO: 100596 - DNA, 344 bp, Homo sapiens
ttatttgtaaagatggggttttgtcatgttgcccaggttagtcttgaactcctggcctcacacgatcctcctgccttggcttcccaaagcaccaggattacaggtatgaggcaccatgcccagccttcaattttttatatttaaaatttgtccaagtaactgcataaagctctacttcatttgttttaactgctgtgtagaatcccacagcaggaatatacaattagttatccattctccacctcaacatttagggatcaatttgttgatgttaaaaccaatgctgcaatttccacttctggtcaagatgattcaacagagaccagagatttaccctctcacct

SEQ ID NO: 100597 - DNA, 250 bp, Homo sapiens
ggaaatctctagattgtgacctgcgagggatgtcagagcgtgtgtagctgtgctgtcgtcctgacatggtcggtgacggaagtgctccgttaaggccggctgctgtgattggcgttatccattcttcaagaccagtgtagggcacttgtccaggatctcacagcgagtctggggctggtgcgtgtgtgctggggtacggtggggggcttcgagcacaggcccctctcccctctctcagcaggccccacgg

SEQ ID NO: 100598 - DNA, 242 bp, Homo sapiens
cactctcgctgctctgagacttcaccctccaataaagtgctaacactagctttgcctcagattcggttttcttagtaacttgaatacagacagtaacctcacccaaaccatgccttcaaccaccattgatacactcccaactcactccccaaacttttcctatcttcaatctggacatccctgctgagctccagacccagcaggttccaactgccaaagggacatctctgcttgtacattct

SEQ ID NO: 100599 - DNA, 332 bp, Homo sapiens
cattgctgaaaatctgagtaacagtgtgatactcttttgagtctggcaggacattctctttccagggcatgcaacagtgggtgaataatttcttttcattcatttccattaagggctgaacttccttaatgttctggagattattaaatttgatttgtatagttgtgaaaagtactcatattgctgattccattgcttatatgtgatcatataaatcttttctcttttggtagtgtggtttaaacttaatccttaaagggcatgtatttgaatttttcagctggttagaaacctgaatataccaatcaaataaaactgctccttacatgcta

SEQ ID NO: 100600 - DNA, 501 bp, Homo sapiens
agttctctgcaaagagaggggtttcaccagcagtctcccacctcacaatggagcaccaggactttcacacacaaactgaaaaggctaggctcctccccagcataaggcatgaattcctggtggttccaccagttttcctactatgcatgtgggtgtgcccaagcaaaccataggtagtatcagaaaaggcaacatttgattggttaaaaggcattattcacccaagcaaaccataggtagtatcagaaaaggcaacatttgattggttaaaaggcattattcagaaagaatcaatcgggaaagggtgagccaataggggaagttctccctctgggtcacgggtttcatctgggaccaggagtctggcctttcagcctttagactgttttaggcttgaaggtgggtttcacagggacccttccctatctgcctaggcatctgtctgcctcctgcctctatcactttctcttgagttttatattttagcaacactgagtcatc

SEQ ID NO: 100601 - DNA, 673 bp, Homo sapiens
atccttctgttggtgatttttagttggatctctttgtggtcaaaacactgtatgatttcaattattttaaatttattgagcactgttttgtagcccaggataaggtctatcttgatagttctatgggtgctcataaagaatgtgtactctgatgttgttgagtgggatgttttatagatgtgtattagaacctggctggttgatggtggtgctgagttcctctagatcctcatttattttctgtttaatggttccatcaactgttgagagaagggtgttgaagtctccaactgtaactgtggatttatcaagttctcctttcagttctgccagtttttggttcacatattttgcagctctactgataggaatataaagatttagcactgttacataatgtcttcttgaattgaccctcttgccattatgtagtgtctctcttaatctctggtaactttctttgctctgaaggctactgatagtaatattgacaatccagctttcttttaaataatgtttgcatggcacatgtctttcctcctccttttacattttacttacctgtaatatttgaattcagtttcttgaagacaccagataatttcattatatgtttttaatccactgacggtgcctgtcttttaattggagtgttgatttacatttaatgtaa

SEQ ID NO: 100602 - DNA, 191 bp, Homo sapiens
tgctgggattacaggtgtgagccaccgtgccctgccctggatttgatattttgaaaataccctgaaaaagtaaaactttttattttatttttttgggatggaatttcgcttttgttgtccaggctggagtgctatggcgcaatctcggctcaccacaacctctgcctcccaggttcaagtaactctcctgc

SEQ ID NO: 100603 - DNA, 247 bp, Homo sapiens
agacggattgatgctgttggctggatggagacagcagtgctgtggttacagaggagaatgcccttgtttgcagtaaacgcactgatgccccatacttaccctcaaatggttcaagaaaaagttacctgtgctgtactcataacttttccaatgactgagatattttcaaatttttttagacaataaaatctatcccccccaaaaaaagaaaagacgcccttgtcttctttgcaaccagcattccctc

SEQ ID NO: 100604 - DNA, 303 bp, Homo sapiens
agcggtaagaagactggctggcgacacgattccttttttcccgcccacgtcagctcctagttcctggtaatttatcccatattaaaacttctttaagtaagaatggacaagcatcagcacctgctatgcaaatgcggccaaatccagcccgggccgcggggcgtgcgcgcccgccggaccgcgagcggccattcagcgctcccaaggcgccggctcgacccttcatatggaaacccggcgggtcccgacagattgcggcggggaggggcgggggccagaatgccctcccaacctcggaaggcg

SEQ ID NO: 100605 - DNA, 193 bp, Homo sapiens
atttctcttggatcactgctttaactgcatcctgtaagtgctgatatattgtgttttcattttcttcatctcacagcaatttctaatttcccttacgatttcttctttgacccactggttatttagggtgtgttctaaaatgtctacatatttgtcattttcttcaaatttccttctgttactggcttctaac

SEQ ID NO: 100606 - DNA, 347 bp, Homo sapiens
cgtaggtcctgctgttggagggcgcccactaggactctgagaggtgagacagttggcatcacatgaatggtgagtcagggctggagcaggacttgagccctgagtgtgccgcctgcctgcaggcgcctctggggagctggccacgggcatcctcacgtctgcgcccctggcacagagcacaggcttggccagcagccgtccagaagcggcggggaattgctgagctggaacctgagcgacctccagggcagccccttgctccagtgttgcggttggatccacagcctaggggatagcagccagcggctgcaggaggcccccgcttacccactaagggtgatcttgct

SEQ ID NO: 100607 - DNA, 484 bp, Homo sapiens
tgttctcaaaccaggtagcagggaaggttcccaaactttgttaatataccacttaaagtgtacacactttatgagtgtgaaatttattgtatgtgaattatatgtaaattgaaaaattcaaaaagaggtgttaaaatgaccctttaaaaactcaagttttgtttttaaaagtttgatttggataggaagaagaaagtcctatatacatatttgtgtttacttgaaaaaaaaactacctatctttacaaccccgtccttttcctccatctcttccacaggtgtttggctctgatttctccccttcagtagtatttggtagaatatcctgaaagaaacttgtttcccttgacaagaattttcactaacattcactcacagcattcaatgactgtgcagaagtcccagcacaaataaatgtctcactcattcctttgtgataaaaacccattctgaagcaaagaaaaactgcaccttttcctaaatg

SEQ ID NO: 100608 - DNA, 163 bp, Homo sapiens
ttatgtacatctttatttaacaacatgaacattttcttatgccttccttctttttacatgctgtaacaatactgcataatttgctatctaatggatatgctataaattgtttcacttttctgtactgttgaatgtttaaactccttgggtttttactttggaa

SEQ ID NO: 100609 - DNA, 310 bp, Homo sapiens
cttgtagtcccaccactttgggaggcccaggcaggcagatcacttgagcccaggagtttgagaatagcctggacaacatggcaaaaccctgtctggaaaaattacaaaagttacctgggcagggtagcacgtgcctgtaataccagctacttgggaggctgaagtgggaagattgcttgagcccaggaggtcgaggcttcagtgagtggtgatcatgctactacactccagcccaggtgacagaatgagacccttgtctcaaaaataaagtagttatagagctggaaaatattctaatatagctctcatt

SEQ ID NO: 100610 - DNA, 4290 bp, Homo sapiens
tatatacttgattctaattagtcatcttttacgcaatctctgttgtctcttttctaaatgtgtttagccactcttgaataccattctccactattaacattaatttactcaaaccgttcatagcattctgtaaacatgtattttacatatttgttcccaaatttgcccattgttcattatgggtaactaataataaatttaatgctgtttcaggatgcttttcttataacagtgccactctcaggaattactaagtgacattttaaattgatattttaaactctttccaactacatagttatggtttatttcattctcatcctgttgggatgagaacttgtttgtgcctttcataacttgtttaaagcagagttttaaaattagtttataggatctgaggtggctattagttacagtggcaagattatttagaaagcaagattttgatgagaattaaaaacaatagaaaatgtagagtgcttaaacaaaaatgttatattttgaaagagtagatacttaatttataaataacagtctgaaggttgatgctattttgggataattgttttgctaatggataattctaacaatgcagaatacctagtcaagactgtcatcaaaaacattcacaaatgtttcattctatttttagtgactctgtttaaagagtttctgaaaggaaagaaattttttatttttattatctttagcagtactgagtgtcatagcagaatattttacagactttctatgagattatttttatggtacaaagtatttacatttccctcatgtttatcattatgccaattttacatggcagtcatgccactgactctgctatttagctaagtaatttcttttttcggagactgtctcactctgtctcccaggctggactgcagtggtgcgattctcctgcctcagcctcccgagtagcggggattacaggcacgcgctgccacgccccgccagttttcatatttttagtagagacagggttttgccgtgttggccaggctggtcttgaactcctgacctcaggtgatccacccaccttggcatcccaaagtgctgggattacgagcgtgagtcacagcacccggctaagtaatttctatttattgtgccaaaacatgtcaaaatcatgacctctttgaatggtatatttgagaggatgttcatttcattggttaaccatggactactctgtccacgtagtaaaaacatgcaccagtttttacctattatcatggtagtatcatctgccaaaatttcaaggcattcattttattctttgaacaactcttcaccatggtgtggacatgaattttcatatgtgttacttgactagaagtataaatggtttactatagatatccaaaaaccttgagatttgctcataggaaatgaatattgtgatgaatcctgggctctagagtcagacttgcttgggtttaaattcttgctctaacacttactgtttttgtaaccttgagcaattttaatctctctgtgtctcaatttcctcatcttttaattaggggatggataatactacctacctcacaggatttttatgaggattaaataaatgtaaggtttttagaacattgatagggagcaataaatagaagattgtattattattctgttaccttggagtgtaagtactgcatttaagtgaatgaaaaatttgctttgaccagatactgaaggaaataagtaatagctagtatttatccaatgccaactgtatgctaggtactgtgcttagataatctgtgtataatagtgttaatcctcaaaatttgggtgttatacccctattatagataaggaaactgaggctcagagacaaagtaactttgtcactgtcacaaagctagtaagtaacagaggtaggatttatattcaaaaccctgtgtgttcattggaaccgtatcaggcttggggctattcatgtagcattatttccatttttatgtatatgatatatgacgtctgatgcattggccagtaatagtcaaattaacccagccaaattgtcacagtgattcttaaactgtggttctcacacttgcccaggatgttgttaaatgcagatctgaagaccccaatctcagaaattcaaatttaagcatggggcccaagagtatgcattcttaccagataccttgggcagtgactgtcaaaagtttggtcccaacaaacagcattaacgtcacctgggaacttgttggaaatgcagcctctctcggggcctcatctcagatcagatctactaaatcagatactctaggggcaggggcaggggcaggggctagccagttgtgtttaagcaaactctgcaggtgtctttcttatcctagtttgagaaccaatacccaacaacctacgtgattttggtgcaagtagtgtttgaaacacactgaagattactgccctattactaagacatttttcaaaaagcatgttttaaatcagtgtagtccaggatcacactatattaaatataaagataacttaaaggatcattggatcattcattttggccaaatttttagcttctccaaagtgactaacatcagggcctacaataaaatctgtaattctccaagtttagtaattttatattgaggcaggaagggctcattaagtactaataagtacataatttattaaaaacatacataagtgtcatcaaaaaggtccacaattgttagtaaaaaaaattaaattgaagtagtaaatgctgttttataacatacatttttctgctaattcattctgttttgtgtgacctaataaagcaaaagaaaaataaaaaagcaattctccaagtacttcatagagcacataaaaccagatttcatgatgatgatgtattcactatcttttagattaagatctttgttatttggtaaatgatttcagtatggttttaaaacataaggcttttgatgtcttatgttctctaataatggtatgcttgtattttctagtgggaagttcatagataaagcagatttttgtcccagtttgctttcaaatataaatttcagagggctttttcttactgtaatgaggtatgaaaataaatcattgatcagctcttaatattttttgaatacagaattggatttgagcagtaaatttgctaactggttattttcacaattttcttgaatattaatttttcacttctttgagactgtcaaactatagttactaccaggttgatgcactgtacttgaaagaatcccttgattaaattacatctagcattttatttgccatttcaattttcagttcattagactataattctttgacagtttctgcctggtgtttattgcccttctttgtttgctttattactaacttccattttctagttactcttaaatgctgccttcacaaggttaatttggctgttaatagtgattagaatttttatcacttaattgataattttaagcctactaactagggttccctatgaaattgaaagtaaaagtctaagaataatgcctgctggctctcgagatacttgccctacttaaaaatctataatttaaaattaattctatgtctacaattattaaaggaagtaaagttatttgggttcttccactcacccttttctcaaaaacaacaacaaaaaacaaaactcattttatttttctactttatagtaggcctgacagaaacatagtgaagcaatctgggaggcaacctgtggtagattttatgctaaatgttaatgtaacctctgttgattttttaaaaatgtgtttatatataagatttgaaataaaaactttaatacaggctagaataaggaattttacaaattctctttagagcaaccaacattaaagttttagagttgaattttgctctatttcaactcccttacctctctagttttcagtttatattaagttttaataactttgcggggccctgcaaattaataatctacatgaagtatattattagagggaaactaatcttactgctaagcagtgtgttgtactacatagtgaatgttcgtgttttggaatttaaaaattatttaaggtaatggtgttacgaatggtttaaaaatgtctggtgacttgcttatttttaagtgatcaccattaagtcagaaaaatgtatttttaaatgtttcttgaagtgccttttgaacatttttaaacagcggatttaaataatgcataaaataaattgccatgttcaaagttgtttcatctgattatttttaaccaatataaaagttgt

SEQ ID NO: 100611 - DNA, 1110 bp, Homo sapiens
aaattacatctagcattttatttaatcaagggattctttcaagtacagtgcatcaacctggtagtaactatagttgaaagaatcccttgattaaattacatctagcattttatttgccatttcaattttcagttcattagactataattctttgacagtttctgcctggtgtttattgcccttctttgtttgctttattactaacttccattttctagttactcttaaatgctgccttcacaaggttaatttggctgttaatagtgattagaatttttatcacttaattgataattttaagcctactaactagggttccctatgaaattgaaagtaaaagtctaagaataatgcctgctggctctcgagatacttgccctacttaaaaatctataatttaaaattaattctatgtctacaattattaaaggaagtaaagttatttgggttcttccactcacccttttctcaaaaacaacaacaaaaaacaaaactcattttatttttctactttatagtaggcctgacagaaacatagtgaagcaatctgggaggcaacctgtggtagattttatgctaaatgttaatgtaacctctgttgattttttaaaaatgtgtttatatataagatttgaaataaaaactttaatacaggctagaataaggaattttacaaattctctttagagcaaccaacattaaagttttagagttgaattttgctctatttcaactcccttacctctctagttttcagtttatattaagttttaataactttgcggggccctgcaaattaataatctacatgaagtatattattagagggaaactaatcttactgctaagcagtgtgttgtactacatagtgaatgttcgtgttttggaatttaaaaattatttaaggtaatggtgttacgaatggtttaaaaatgtctggtgacttgcttatttttaagtgatcaccattaagtcagaaaaatgtatttttaaatgtttcttgaagtgccttttgaacatttttaaacagcggatttaaataatgcataaaataaattgccatgttcaaagttgtttcatctgattatttttaaccaatataaaagttgt

SEQ ID NO: 100612 - DNA, 1350 bp, Homo sapiens
taaagccaaccagcctttgggtcctgggcaggtgggagctgaaaaggatcgaggcatggggcatgtcctttccatctgtccacatccccagagcccagctcttgctctcttgtgacgtgcactgtgaatcctggcaagaaagcttgagtctcaagggtggcaggtcactgtcactgccgacatccctcccccagcagaatggaggcaggggacaagggaggcagtggctagtggggtgaacagctggtgccaaatagccccagactgggcccaggcaggtctgcaagggcccagagtgaaccgtcctttcacacatctgggtgccctgaaagccctttcccctcccccactcctctaagacaaagtagattcttacaaggccctttcctttggaacaagacagccttcacttttctgagttcttgaagcatttcaaagccctgcctctgtgtagccgccctgagagagaatagagctgccactgggcacctgcgcacaggtgggaggaaagggcctgggccagtcctggtcctgggctgcactcttgaactgggcgaatgtcttatttaattaccgtgagttgacatagcctcatgttctgtgggggtcatcagggagggttaggaaaaccacaaacggagcccctgaaagcctcacgtatttcacagagcacgcctgccatcttctccccgaggctgccccaggccggagcccagatacgggggctgtgactctgggcagggacccggggtctcctggaccttgacagagcagctaactccgagagcagtgggcaggtggccgcccctgaggcttcacgccgggagaagccaccttcccgccccctcataccgcctcgtgccagcagcctcgcacaagccctagctttacgctcatcacctaaacttgtactttatttttctgatagaaatggtttcctctggatcgttttatgcggttcttacagcacatcacctctttgcccccgacggctgtgacgcagccggagggaggcactagtcaccgacagcggccttgaagacagagcaaagcgcccacccaggtcccccgactgcctgtctccatgaggtactggtcccttccttttgttaatgtgatgtgccactatattttacacgtatctcttggtatgcatcttttatagacgctcttttctaagtggcgtgtgcatagcgtcctgccctgccccctcgggggcctgtggtggctccccctctgcttctcggggtccagtgcattttgtttctgtatatgattctctgtggttttttttgaatccaaatctgtcctctgtagtattttttaaataaatcagtgtttacattagaa

SEQ ID NO: 100613 - DNA, 1492 bp, Homo sapiens
actcagtggtttcttggtgacactggatagaacagctcaagccttgccacttcgggcttctcactgcagctgggcttggacttcggagttttgccattgccagtgggacgtctgagactttctccttcaagtacttggcagatcactctcttagcagggtctgcgcttcgcagccgggatgaagctggtttccgtcgccctgatgtacctgggttcgctcgccttcctaggcgctgacaccgctcggttggatgtcgcgtcggagtttcgaaagaagtggaataagtgggctctgagtcgtgggaagagggaactgcggatgtccagcagctaccccaccgggctcgctgacgtgaaggccgggcctgcccagacccttattcggccccaggacatgaagggtgcctctcgaagccccgaagacagcagtccggatgccgcccgcatccgagtcaagcgctaccgccagagcatgaacaacttccagggcctccggagctttggctgccgcttcgggacgtgcacggtgcagaagctggcacaccagatctaccagttcacagataaggacaaggacaacgtcgcccccaggagcaagatcagcccccagggctacggccgccggcgccggcgctccctgcccgaggccggcccgggtcggactctggtgtcttctaagccacaagcacacggggctccagcccccccgagtggaagtgctccccactttctttaggatttaggcgcccatggtacaaggaatagtcgcgcaagcatcccgctggtgcctcccgggacgaaggacttcccgagcggtgtggggaccgggctctgacagccctgcggagaccctgagtccgggaggcaccgtccggcggcgagctctggctttgcaagggcccctccttctgggggcttcgcttccttagccttgctcaggtgcaagtgccccagggggcggggtgcagaagaatccgagtgtttgccaggcttaaggagaggagaaactgagaaatgaatgctgagacccccggagcaggggtctgagccacagccgtgctcgcccacaaactgatttctcacggcgtgtcaccccaccagggcgcaagcctcactattacttgaactttccaaaacctaaagaggaaaagtgcaatgcgtgttgtacatacagaggtaactatcaatatttaagtttgttgctgtcaagattttttttgtaacttcaaatatagagatatttttgtacgttatatattgtattaagggcattttaaaagcaattatattgtcctccccctattttaagacgtgaatgtctcagcgaggtgtaaagttgttcgccgcgtggaatgtgagtgtgtttgtgtgcatgaaagagaaagactgattacctcctgtgtggaagaaggaaacaccgagtctctgtataatctatttacataaaatgggtgatatgcgaacagcaaaccaataaactgtctcaatgctg

SEQ ID NO: 100614 - DNA, 793 bp, Homo sapiens
actcagtggtttcttggtgacactggatagaacagctcaagccttgccacttcgggcttctcactgcagctgggcttggacttcggagttttgccattgccagtgggacgtctgagactttctccttcaagtacttggcagatcactctcttagcagggtctgcgcttcgcagccgggatgaagctggtttccgtcgccctgatgtacctgggttcgctcgccttcctaggcgctgacaccgctcggttggatgtcgcgtcggagtttcgaaagaagtgagtccgggcagcgccttcccccttgctggtacctggcaggcaaggggaactgaccgttggtcccgaaggtctagaagtgaatgggagcagggacaggcctgggcgtcacctgaacgcacgcgaatcgggtctgcttgtgttttccaggtggaataagtgggctctgagtcgtgggaagagggaactgcggatgtccagcagctaccccaccgggctcgctgacgtgaaggccgggcctgcccagacccttattcggccccaggacatgaagggtgcctctcgaagccccgaagacaggtaactacgccctgtgctgtccagggacgggagggaaggaaggtgtgcgggaggagttctctgtctccactcccctggcccgggggatcgtcggggctggaccgcagctcagatggcgcgagcagtttccagctccctctggctctagaatggctcccgttcccggtgttggggccaaagctctgcttgatggggtctcaagttgcctttcttcccc

SEQ ID NO: 100615 - DNA, 1942 bp, Homo sapiens
actcagtggtttcttggtgacactggatagaacagctcaagccttgccacttcgggcttctcactgcagctgggcttggacttcggagttttgccattgccagtgggacgtctgagactttctccttcaagtacttggcagatcactctcttagcaggtaggtgccgcagaccctgcgggttaagaggtggggtggggggcagtgcttgccaaggccctaaactgggagcgctgggtgaggggaacaacccactttggagggttctctgagagatagatacaccccatatcctgggcccagctcgtgcacacagctggaggtccagagacccagtcccctctgctccgtcagccaagttccaagaagttgagcagagaccctctgggagcctggcggggtgcagcggcctcccctgcggggcctgtcacccggccggcgcgtgcaaacgcctctggcgcctctctgcgcggagggagataagcgtctgagccagggaaagcgcgggctaaacccgcctcgccggggcccctgcccgccctccgtgccccgcccgggcggtgcagctggcccgggtgctcacgctcgactctctttcttcttttccagggtctgcgcttcgcagccgggatgaagctggtttccgtcgccctgatgtacctgggttcgctcgccttcctaggcgctgacaccgctcggttggatgtcgcgtcggagtttcgaaagaagtggaataagtgggctctgagtcgtgggaagagggaactgcggatgtccagcagctaccccaccgggctcgctgacgtgaaggccgggcctgcccagacccttattcggccccaggacatgaagggtgcctctcgaagccccgaagacagcagtccggatgccgcccgcatccgagtcaagcgctaccgccagagcatgaacaacttccagggcctccggagctttggctgccgcttcgggacgtgcacggtgcagaagctggcacaccagatctaccagttcacagataaggacaaggacaacgtcgcccccaggagcaagatcagcccccagggctacggccgccggcgccggcgctccctgcccgaggccggcccgggtcggactctggtgtcttctaagccacaagcacacggggctccagcccccccgagtggaagtgctccccactttctttaggatttaggcgcccatggtacaaggaatagtcgcgcaagcatcccgctggtgcctcccgggacgaaggacttcccgagcggtgtggggaccgggctctgacagccctgcggagaccctgagtccgggaggcaccgtccggcggcgagctctggctttgcaagggcccctccttctgggggcttcgcttccttagccttgctcaggtgcaagtgccccagggggcggggtgcagaagaatccgagtgtttgccaggcttaaggagaggagaaactgagaaatgaatgctgagacccccggagcaggggtctgagccacagccgtgctcgcccacaaactgatttctcacggcgtgtcaccccaccagggcgcaagcctcactattacttgaactttccaaaacctaaagaggaaaagtgcaatgcgtgttgtacatacagaggtaactatcaatatttaagtttgttgctgtcaagattttttttgtaacttcaaatatagagatatttttgtacgttatatattgtattaagggcattttaaaagcaattatattgtcctccccctattttaagacgtgaatgtctcagcgaggtgtaaagttgttcgccgcgtggaatgtgagtgtgtttgtgtgcatgaaagagaaagactgattacctcctgtgtggaagaaggaaacaccgagtctctgtataatctatttacataaaatgggtgatatgcgaacagcaaaccaataaactgtctcaatgctg

SEQ ID NO: 100616 - DNA, 1452 bp, Homo sapiens
actcagtggtttcttggtgacactggatagaacagctcaagccttgccacttcgggcttctcactgcagctgggcttggacttcggagttttgccattgccagtgggacgtctgagactttctccttcaagtacttggcagatcactctcttagcagggtctgcgcttcgcagccgggatgaagctggtttccgtcgccctgatgtacctgggttcgctcgccttcctaggcgctgacaccgctcggttggatgtcgcgtcggagtttcgaaagaagtggaataagtgggctctgagtcgtgggaagagggaactgcggatgtccagcagctaccccttattcggccccaggacatgaagggtgcctctcgaagccccgaagacagcagtccggatgccgcccgcatccgagtcaagcgctaccgccagagcatgaacaacttccagggcctccggagctttggctgccgcttcgggacgtgcacggtgcagaagctggcacaccagatctaccagttcacagataaggacaaggacaacgtcgcccccaggagcaagatcagcccccagggctacggccgccggcgccggcgctccctgcccgaggccggcccgggtcggactctggtgtcttctaagccacaagcacacggggctccagcccccccgagtggaagtgctccccactttctttaggatttaggcgcccatggtacaaggaatagtcgcgcaagcatcccgctggtgcctcccgggacgaaggacttcccgagcggtgtggggaccgggctctgacagccctgcggagaccctgagtccgggaggcaccgtccggcggcgagctctggctttgcaagggcccctccttctgggggcttcgcttccttagccttgctcaggtgcaagtgccccagggggcggggtgcagaagaatccgagtgtttgccaggcttaaggagaggagaaactgagaaatgaatgctgagacccccggagcaggggtctgagccacagccgtgctcgcccacaaactgatttctcacggcgtgtcaccccaccagggcgcaagcctcactattacttgaactttccaaaacctaaagaggaaaagtgcaatgcgtgttgtacatacagaggtaactatcaatatttaagtttgttgctgtcaagattttttttgtaacttcaaatatagagatatttttgtacgttatatattgtattaagggcattttaaaagcaattatattgtcctccccctattttaagacgtgaatgtctcagcgaggtgtaaagttgttcgccgcgtggaatgtgagtgtgtttgtgtgcatgaaagagaaagactgattacctcctgtgtggaagaaggaaacaccgagtctctgtataatctatttacataaaatgggtgatatgcgaacagcaaaccaataaactgtctcaatgctg

SEQ ID NO: 100617 - DNA, 2092 bp, Homo sapiens
actcagtggtttcttggtgacactggatagaacagctcaagccttgccacttcgggcttctcactgcagctgggcttggacttcggagttttgccattgccagtgggacgtctgagactttctccttcaagtacttggcagatcactctcttagcaggtaggtgccgcagaccctgcgggttaagaggtggggtggggggcagtgcttgccaaggccctaaactgggagcgctgggtgaggggaacaacccactttggagggttctctgagagatagatacaccccatatcctgggcccagctcgtgcacacagctggaggtccagagacccagtcccctctgctccgtcagccaagttccaagaagttgagcagagaccctctgggagcctggcggggtgcagcggcctcccctgcggggcctgtcacccggccggcgcgtgcaaacgcctctggcgcctctctgcgcggagggagataagcgtctgagccagggaaagcgcgggctaaacccgcctcgccggggcccctgcccgccctccgtgccccgcccgggcggtgcagctggcccgggtgctcacgctcgactctctttcttcttttccagggtctgcgcttcgcagccgggatgaagctggtttccgtcgccctgatgtacctgggttcgctcgccttcctaggcgctgacaccgctcggttggatgtcgcgtcggagtttcgaaagaagtgagtccgggcagcgccttcccccttgctggtacctggcaggcaaggggaactgaccgttggtcccgaaggtctagaagtgaatgggagcagggacaggcctgggcgtcacctgaacgcacgcgaatcgggtctgcttgtgttttccaggtggaataagtgggctctgagtcgtgggaagagggaactgcggatgtccagcagctaccccaccgggctcgctgacgtgaaggccgggcctgcccagacccttattcggccccaggacatgaagggtgcctctcgaagccccgaagacagcagtccggatgccgcccgcatccgagtcaagcgctaccgccagagcatgaacaacttccagggcctccggagctttggctgccgcttcgggacgtgcacggtgcagaagctggcacaccagatctaccagttcacagataaggacaaggacaacgtcgcccccaggagcaagatcagcccccagggctacggccgccggcgccggcgctccctgcccgaggccggcccgggtcggactctggtgtcttctaagccacaagcacacggggctccagcccccccgagtggaagtgctccccactttctttaggatttaggcgcccatggtacaaggaatagtcgcgcaagcatcccgctggtgcctcccgggacgaaggacttcccgagcggtgtggggaccgggctctgacagccctgcggagaccctgagtccgggaggcaccgtccggcggcgagctctggctttgcaagggcccctccttctgggggcttcgcttccttagccttgctcaggtgcaagtgccccagggggcggggtgcagaagaatccgagtgtttgccaggcttaaggagaggagaaactgagaaatgaatgctgagacccccggagcaggggtctgagccacagccgtgctcgcccacaaactgatttctcacggcgtgtcaccccaccagggcgcaagcctcactattacttgaactttccaaaacctaaagaggaaaagtgcaatgcgtgttgtacatacagaggtaactatcaatatttaagtttgttgctgtcaagattttttttgtaacttcaaatatagagatatttttgtacgttatatattgtattaagggcattttaaaagcaattatattgtcctccccctattttaagacgtgaatgtctcagcgaggtgtaaagttgttcgccgcgtggaatgtgagtgtgtttgtgtgcatgaaagagaaagactgattacctcctgtgtggaagaaggaaacaccgagtctctgtataatctatttacataaaatgggtgatatgcgaacagcaaaccaataaactgtctcaatgctg

SEQ ID NO: 100618 - DNA, 1371 bp, Homo sapiens
actcagtggtttcttggtgacactggatagaacagctcaagccttgccacttcgggcttctcactgcagctgggcttggacttcggagttttgccattgccagtgggacgtctgagactttctccttcaagtacttggcagatcactctcttagcagggtctgcgcttcgcagccgggatgaagctggtttccgtcgccctgatgtacctgggttcgctcgccttcctaggcgctgacaccgctcggttggatgtcgcgtcggagtttcgaaagaagtggaataagtgggctctgagtcgtgggaagagggaactgcggatgtccagcagctaccccaccgggctcgctgacgtgaaggccgggcctgcccagacccttattcggccccaggacatgaagggtgcctctcgaagccccgaagacagcagtccggatgccgcccgcatccgagtcaagcgctaccgccagagcatgaacaacttccagggcctccggagctttggctgccgcttcgggacgtgcacggtgcagaagctggcacaccagatctaccagttcacagataaggacaaggacaacgtcgcccccaggagcaagatcagcccccagggctacggccgccggcgccggcgctccctgcccgaggccggcccgggtcggactctggtgtcttctaagccacaagcacacggggctccagcccccccgagtggaagtgctccccactttctttaggatttaggcaccgtccggcggcgagctctggctttgcaagggcccctccttctgggggcttcgcttccttagccttgctcaggtgcaagtgccccagggggcggggtgcagaagaatccgagtgtttgccaggcttaaggagaggagaaactgagaaatgaatgctgagacccccggagcaggggtctgagccacagccgtgctcgcccacaaactgatttctcacggcgtgtcaccccaccagggcgcaagcctcactattacttgaactttccaaaacctaaagaggaaaagtgcaatgcgtgttgtacatacagaggtaactatcaatatttaagtttgttgctgtcaagattttttttgtaacttcaaatatagagatatttttgtacgttatatattgtattaagggcattttaaaagcaattatattgtcctccccctattttaagacgtgaatgtctcagcgaggtgtaaagttgttcgccgcgtggaatgtgagtgtgtttgtgtgcatgaaagagaaagactgattacctcctgtgtggaagaaggaaacaccgagtctctgtataatctatttacataaaatgggtgatatgcgaacagcaaaccaataaactgtctcaatgctg

SEQ ID NO: 100619 - DNA, 1481 bp, Homo sapiens
actcagtggtttcttggtgacactggatagaacagctcaagccttgccacttcgggcttctcactgcagctgggcttggacttcggagttttgccattgccagtgggacgtctgagactttctccttcaagtacttggcagatcactctcttagcagggtctgcgcttcgcagccgggatgaagctggtttccgtcgccctgatgtacctgggttcgctcgccttcctaggcgctgacaccgctcggttggatgtcgcgtcggagtttcgaaagaagtggaataagtgggctctgagtcgtgggaagagggaactgcggatgtccagcagctaccccaccgggctcgctgacgtgaaggccgggcctgcccagacccttattcggccccaggacatgaagggtgcctctcgaagccccgaagacagcagtccggatgccgcccgcatccgagtcaagcgctaccgccagagcatgaacaacttccagggcctccggagctttggctgccgcttcgggacgtgcacggtgcagaagctggcacaccagatctaccagttcacagataaggacaaggacaacgtcgcccccaggagcaagatcagcccccagggctacggccgccggcgccggcgctccctgcccgaggccggcccgggtcggactctggtgtcttctaagccacaagcacacggggctccagcccccccgagtggaagtgctccccactttctttaggatttaggcgcccatggtacaaggaatagtcgcgcaagcatcccgctggtgcctcccgggacgaaggacttcccgagcggtgtggggaccgggctctgacagccctgcggagaccctgagtccgggaggcaccgtccggcggcgagctctggctttgcaagggcccctccttctgggggcttcgcttccttagccttgctcaggtgcaagtgccccagggggcggggtgcagaagaatccgagtgtttgccaggcttaaggagaggagaaactgagaaatgaatgctgagacccccggagcaggggtctgagccacagccgtgctcgcccacaaactgatttctcacggcgtgtcaccccaccagggcgcaagcctcactattacttgaactttccaaaacctaaagaggaaaagtgcaatgcgtgttgtacatacagaggtaactatcaatatttaagtttgttgctgtcaagattttttttgtaacttcaaatatagagatatttttgtacgttatatattgtattaagggcattttaaaagcaattatatgcccccctccctcctcccacgttgttgtctaggcggggtcagcaagcggtccttggcttcaacgcagcagactccgtgagccagtgagagccccgctctttaccgcccggccccagcactcgctagctttcctgacgcctggaactgtgcacctggcgccgtagcggaaaatcaactccaagcagccagtta

SEQ ID NO: 100620 - DNA, 1558 bp, Homo sapiens
gtaggggcatgttcaaggagaaatttatgacaaggtttgagaactaagtgaaaactaatgccatccatgaaaagaaagaagaggtatgagattaggggagaaaagagggagacaaaaataattcagttggcacatgtttagtttcagatgccattaagacttctatcttctatggggcaatgtgcttaaaacatccccctccccccacacgctctctctgtggggtctgcgcttcgcagccgggatgaagctggtttccgtcgccctgatgtacctgggttcgctcgccttcctaggcgctgacaccgctcggttggatgtcgcgtcggagtttcgaaagaagtggaataagtgggctctgagtcgtgggaagagggaactgcggatgtccagcagctaccccaccgggctcgctgacgtgaaggccgggcctgcccagacccttattcggccccaggacatgaagggtgcctctcgaagccccgaagacagcagtccggatgccgcccgcatccgagtcaagcgctaccgccagagcatgaacaacttccagggcctccggagctttggctgccgcttcgggacgtgcacggtgcagaagctggcacaccagatctaccagttcacagataaggacaaggacaacgtcgcccccaggagcaagatcagcccccagggctacggccgccggcgccggcgctccctgcccgaggccggcccgggtcggactctggtgtcttctaagccacaagcacacggggctccagcccccccgagtggaagtgctccccactttctttaggatttaggcgcccatggtacaaggaatagtcgcgcaagcatcccgctggtgcctcccgggacgaaggacttcccgagcggtgtggggaccgggctctgacagccctgcggagaccctgagtccgggaggcaccgtccggcggcgagctctggctttgcaagggcccctccttctgggggcttcgcttccttagccttgctcaggtgcaagtgccccagggggcggggtgcagaagaatccgagtgtttgccaggcttaaggagaggagaaactgagaaatgaatgctgagacccccggagcaggggtctgagccacagccgtgctcgcccacaaactgatttctcacggcgtgtcaccccaccagggcgcaagcctcactattacttgaactttccaaaacctaaagaggaaaagtgcaatgcgtgttgtacatacagaggtaactatcaatatttaagtttgttgctgtcaagattttttttgtaacttcaaatatagagatatttttgtacgttatatattgtattaagggcattttaaaagcaattatattgtcctccccctattttaagacgtgaatgtctcagcgaggtgtaaagttgttcgccgcgtggaatgtgagtgtgtttgtgtgcatgaaagagaaagactgattacctcctgtgtggaagaaggaaacaccgagtctctgtataatctatttacataaaatgggtgatatgcgaacagcaaaccaataaactgtctcaatgctg

SEQ ID NO: 100621 - DNA, 1642 bp, Homo sapiens
actcagtggtttcttggtgacactggatagaacagctcaagccttgccacttcgggcttctcactgcagctgggcttggacttcggagttttgccattgccagtgggacgtctgagactttctccttcaagtacttggcagatcactctcttagcagggtctgcgcttcgcagccgggatgaagctggtttccgtcgccctgatgtacctgggttcgctcgccttcctaggcgctgacaccgctcggttggatgtcgcgtcggagtttcgaaagaagtgagtccgggcagcgccttcccccttgctggtacctggcaggcaaggggaactgaccgttggtcccgaaggtctagaagtgaatgggagcagggacaggcctgggcgtcacctgaacgcacgcgaatcgggtctgcttgtgttttccaggtggaataagtgggctctgagtcgtgggaagagggaactgcggatgtccagcagctaccccaccgggctcgctgacgtgaaggccgggcctgcccagacccttattcggccccaggacatgaagggtgcctctcgaagccccgaagacagcagtccggatgccgcccgcatccgagtcaagcgctaccgccagagcatgaacaacttccagggcctccggagctttggctgccgcttcgggacgtgcacggtgcagaagctggcacaccagatctaccagttcacagataaggacaaggacaacgtcgcccccaggagcaagatcagcccccagggctacggccgccggcgccggcgctccctgcccgaggccggcccgggtcggactctggtgtcttctaagccacaagcacacggggctccagcccccccgagtggaagtgctccccactttctttaggatttaggcgcccatggtacaaggaatagtcgcgcaagcatcccgctggtgcctcccgggacgaaggacttcccgagcggtgtggggaccgggctctgacagccctgcggagaccctgagtccgggaggcaccgtccggcggcgagctctggctttgcaagggcccctccttctgggggcttcgcttccttagccttgctcaggtgcaagtgccccagggggcggggtgcagaagaatccgagtgtttgccaggcttaaggagaggagaaactgagaaatgaatgctgagacccccggagcaggggtctgagccacagccgtgctcgcccacaaactgatttctcacggcgtgtcaccccaccagggcgcaagcctcactattacttgaactttccaaaacctaaagaggaaaagtgcaatgcgtgttgtacatacagaggtaactatcaatatttaagtttgttgctgtcaagattttttttgtaacttcaaatatagagatatttttgtacgttatatattgtattaagggcattttaaaagcaattatattgtcctccccctattttaagacgtgaatgtctcagcgaggtgtaaagttgttcgccgcgtggaatgtgagtgtgtttgtgtgcatgaaagagaaagactgattacctcctgtgtggaagaaggaaacaccgagtctctgtataatctatttacataaaatgggtgatatgcgaacagcaaaccaataaactgtctcaatgctg

SEQ ID NO: 100622 - DNA, 1529 bp, Homo sapiens
actcagtggtttcttggtgacactggatagaacagctcaagccttgccacttcgggcttctcactgcagctgggcttggacttcggagttttgccattgccagtgggacgtctgagactttctccttcaagtacttggcagatcactctcttagcagggtctgcgcttcgcagccgggatgaagctggtttccgtcgccctgatgtacctgggttcgctcgccttcctaggcgctgacaccgctcggttggatgtcgcgtcggagtttcgaaagaagtggaataagtgggctctgagtcgtgggaagagggaactgcggatgtccagcagctaccccaccgggctcgctgacgtgaaggccgggcctgcccagacccttattcggccccaggacatgaagggtgcctctcgaagccccgaagacagcagtccggatgccgcccgcatccgagtcaagcgctaccgccagagcatgaacaacttccagggcctccggagctttggctgccgcttcgggacgtgcacggtgcagaagctggcacaccagatctaccagttcacagataaggacaaggacaacgtcgcccccaggagcaagatcagcccccagggctacggccgccggcgccggcgctccctgcccgaggccggcccgggtcggactctggtgtcttctaagccacaagcacacggggctccagcccccccgagtggaagtgctccccactttctttaggatttaggcgcccatggtacaaggaatagtcgcgcaagcatcccgctggtgcctcccgggacgaaggacttcccgagcggtgtggggaccgggctctgacagccctgcggagaccctgagtccgggaggcaccgtccggcggcgagctctggctttgcaagggcccctccttctgggggcttcgcttccttagccttgctcaggtgcaagtgccccagggggcggggtgcagaagaatccgagtgtttgccaggcttaaggagaggagaaactgagaaatgaatgctgagacccccggagcaggggtctgagccacagccgtgctcgcccacaaactgatttctcacggcgtgtcaccccaccagggcgcaagcctcactattacttgaactttccaaaacctaaagaggaaaagtgcaatgcgtgttgtacatacagaggtaactatcaatatttaagtttgttgctgtcaagattttttttgtaacttcaaatatagagatatttttgtacgttatatattgtattaagggcattttaaaagcaattatattgtcctccccctattttaagacgtgaatgtctcagcgaggtgtaaagttgttcgccgcgtggaatgtgagtgtgtttgtgtgcatgaaagagaaagactgattacctcctgtgtggaagaaggaaacaccgagtctctgtataatctatttacataaaatgggtgatatgcgaacagcaaaccaataaactgtctcaatgctgtacccaacacacccacccctgaagaaaaaggaaacca

SEQ ID NO: 100623 - DNA, 1331 bp, Homo sapiens
actcagtggtttcttggtgacactggatagaacagctcaagccttgccacttcgggcttctcactgcagctgggcttggacttcggagttttgccattgccagtgggacgtctgagactttctccttcaagtacttggcagatcactctcttagcagggtctgcgcttcgcagccgggatgaagctggtttccgtcgccctgatgtacctgggttcgctcgccttcctaggcgctgacaccgctcggttggatgtcgcgtcggagtttcgaaagaagtggaataagtgggctctgagtcgtgggaagagggaactgcggatgtccagcagctaccccaccgggctcgctgacgtgaaggccgggcctgcccagacccttattcggccccaggacatgaagggtgcctctcgaagccccgaagacagcagtccggatgccgcccgcatccgagtcaagcgctaccgccagagcatgaacaacttccagggcctccggagctttggctgccgcttctaagccacaagcacacggggctccagcccccccgagtggaagtgctccccactttctttaggatttaggcgcccatggtacaaggaatagtcgcgcaagcatcccgctggtgcctcccgggacgaaggacttcccgagcggtgtggggaccgggctctgacagccctgcggagaccctgagtccgggaggcaccgtccggcggcgagctctggctttgcaagggcccctccttctgggggcttcgcttccttagccttgctcaggtgcaagtgccccagggggcggggtgcagaagaatccgagtgtttgccaggcttaaggagaggagaaactgagaaatgaatgctgagacccccggagcaggggtctgagccacagccgtgctcgcccacaaactgatttctcacggcgtgtcaccccaccagggcgcaagcctcactattacttgaactttccaaaacctaaagaggaaaagtgcaatgcgtgttgtacatacagaggtaactatcaatatttaagtttgttgctgtcaagattttttttgtaacttcaaatatagagatatttttgtacgttatatattgtattaagggcattttaaaagcaattatattgtcctccccctattttaagacgtgaatgtctcagcgaggtgtaaagttgttcgccgcgtggaatgtgagtgtgtttgtgtgcatgaaagagaaagactgattacctcctgtgtggaagaaggaaacaccgagtctctgtataatctatttacataaaatgggtgatatgcgaacagcaaaccaataaactgtctcaatgctg

SEQ ID NO: 100624 - DNA, 4231 bp, Homo sapiens
cagctctggcccaaactgtgccccaggcagcagctcctcctcctcttctgatgaggcaggtgaccccaatgaggcacccagccccgacaccctgctcggtgccctggcccgcagacagttgaacctgggccagctccttgaggacacagagtcttacctacaggccttcctggccggggctgcaggcccactcaatggggaccacccaggtcctgggcagtcatcctccccagaccaggcgcccccacagctgtctaagtccaaaggcctccccaagtcagcttggggtgggggtaccccagaggcccacaggccaggcttcggtgctacctcagagggccaggggcccctccccttccttagcatgttcatgggtgctggggatgccccactgggctctcggcctggccacccccattcctcatctcaggtgaaaagcaagctccaaattggccccccttctcctggggaagctcagggaccccttctgccctctccagctaggggtctcaagtttctaaagctgcctccaacctcggagaagagccccagcccaggaggcccgcagctcagtccccagctcccccggaactcgcgaatcccctgtcggaacagtggctcagacggcagcccctccccactgttggcccgaaggggtctgggtggaggagagctgtccccagagggggcgcaaggcctgcccaccagcccttcaccctgctacacaaccccagactccacacagctcagacccccgcagtcagccttgtccaccacgctgtccccaggcccagtggtgtctccctgctatgagaacattctggacctttctcggagcacctttagggggccttccccagagccacctccatccccactgcaggtgcccacctacccacagctaactctggaggtaccacaggcccctgaggtcctcagaagccctggagtcccccccagtccttgcctcccagaatcttacccctatgggagcccccaagagaagagtttggacaaggcaggctcggagtctccccatcccggccgcaggaccccaggcaactcatccaagaagcccagccaggggtcaggacggcgacctggggatcctggcagcacacctctgcgggacagactggcggccctggggaagctgaagacaggccccgagggggccctgggctcagagaagaatggggtgccagccaggcctggcaccgaaaagacccggggacctgggaagtcaggggagagtgctggagacatggtgccctccatccacaggccactggagcagctagaagccaagggggggatacggggggcagtggccttgggcacaaacagcctgaagcagcaggaacctggacttatgggggatcccggggcccgagtctactcctctcactccatgggggcccgggtggacctggagcctgtctcaccaaggagctgcctcaccaaagtggagctggccaagagccggctggcaggggccctgtgcccccaggtaccccgtacccctgccaaagtgccaacctcagccccaagcctgggcaagcccaataagagccctcacagcagccccaccaagctcccttccaagtcaccaaccaaggtggtgcctcgacctggggctccgctagtcaccaaggagtcccccaagcctgacaaagggaagggccctccctgggcagactgtggtagtaccacggcccagtccacacccctagtacctggccccactgacccaagtcagggccctgaggggctggccccacactcagccatcgaggagaaggtgatgaagggcattgaggagaacgtgctgcggctccagggccaggagcgagcccctggcgccgaggtcaagcaccgcaacaccagcagcatcgccagctggttcggccttaagaagagcaagctgccagcgctgaaccgccgcacagaggccaccaagaacaaggagggggctggcgggggctccccgctccggagggaagtcaagatggaagcccggaagctggaggccgagagcctcaacatctccaagctgatggccaaggcggaagacctgcgtcgggcactggaagaggagaaggcctacctaagcagccgggcccggccacggcctggtggcccagccccagggcccaacacggggctggggcaggtgcagggccagctggctggcatgtaccaaggtgcagacaccttcatgcagcagctgctaaacagggtggatggcaaggagctgccatccaagagctggcgggagcccaagcctgagtacggggatttccagccggtgtcttctgaccccaagagcccctggccagcctgtgggccccggaatggcctggtgggccctcttcagggctgcggaaaacctcctggaaagccgagcagcgagccagggaggcgggaagagatgccctcggaggacagcctggccgagccagtgcccacctcacacttcacagcctgtggctccttgactcgaaccttggacagtggcattgggaccttcccacccccagaccatggtagcagtgggacccccagcaagaatcttcctaagaccaagccaccgcggctggatcccccacctggggtacccccagctcggcccccaccccttaccaaagtcccccgccgcgcccacacactggagcgggaggtgccaggcatagaggagctgctggtgagtgggcggcaccccagcatgccagccttccctgcactgctacccgctgctccgggccaccggggccatgagacctgtcctgatgatccctgtgaagacccaggccccacccctcctgtccagctggccaagaactggaccttccccaatactagggcagccggcagctcctcggaccctctcatgtgcccaccccgacaactggaggggctgcccaggacccccatggtgagaattgcagcagaggaaagggaaaggactcgggagcaggagggagtgatgtggggagaccagtttctccagtaaggtacggcctgtgtgtcgcacagtctcagtgctgcaccctctgggaggaggacccctgggatgccctgtgagcggccctccacactgccctccttgcacttctctcgtggggaaaggtttctgtccctccccagaaccttgtaggactgttctcagttgtacctccagcctgtttcctctgaagtataccccacacttgggccccctctggagcagcccccatcaggtgcacagacgcccctcagagctcagtgcctctgaggctgggccgaaaggtggagaggagcttcctcccgagctgcccctcctttcccaggccctgcccgtggaccggaagcgaagccaggagcccagccgcccgtcccctacgccccagggcccacctttcgggggtagccgcacccccagcacttcggacatggccgaggaaggcagagtggccagcgggggccccccagggctggagacctcggagtctctcagtgactcactctacgactcgctgtcctcttgtgggagtcagggctgaggggctgcgccacgccacggccccgctggagctggggaccacagactggaccggctctcttcatgcccagcccccggagacggggacccctccctgaagggaccaaggaggcaggtggataagaaggtgaaaagggggtccctggcacaccccaccacccactgcttcggcggatgagatgaccgtgctcagctcagggagagaccccgcccttggtcccttctctcacccagagtaaggctcttcctggaagggactgggggttaaaggccactgtgtcgcagccctccagtccctacttcaggctgagccatcttgtggtgctgggcttcctgcccaccagccgtgccatctctgcccaacccggctgctcctctgccccgaagccctcgcgaggccctcctggaggcccccgtgctggtggagtttgggggccagggggacaagttgccttctctctctgccctggtcctccctgctgtctggatggtgctgccctcctctgccccatgcctttggggtctgttcgtccgtcttttttgttgttgtttttatatattgaagcgcctggcccagcccccagcccccagccccgcactgcggttaatttatgtgttgtttaaaatgcggctgctctgcttcctgcctctgcttctgccgtatccctaataaaatgtggaggccccctc

SEQ ID NO: 100625 - DNA, 3644 bp, Homo sapiens
cagctctggcccaaactgtgccccaggcagcagctcctcctcctcttctgatgaggcaggtgaccccaatgaggcacccagccccgacaccctgctcggtgccctggcccgcagacagttgaacctgggccagctccttgaggacacagagtcttacctacaggccttcctggccggggctgcaggcccactcaatggggaccacccaggtcctgggcagtcatcctccccagaccaggcgcccccacagctgtctaagtccaaaggcctccccaagtcagcttggggtgggggtaccccagaggcccacaggccaggcttcggtgctacctcagagggccaggggcccctccccttccttagcatgttcatgggtgctggggatgccccactgggctctcggcctggccacccccattcctcatctcaggtgaaaagcaagctccaaattggccccccttctcctggggaagctcagggaccccttctgccctctccagctaggggtctcaagtttctaaagctgcctccaacctcggagaagagccccagcccaggaggcccgcagctcagtccccagctcccccggaactcgcgaatcccctgtcggaacagtggctcagacggcagcccctccccactgttggcccgaaggggtctgggtggaggagagctgtccccagagggggcgcaaggcctgcccaccagcccttcaccctgctacacaaccccagactccacacagctcagacccccgcagtcagccttgtccaccacgctgtccccaggcccagtggtgtctccctgctatgagaacattctggacctttctcggagcacctttagggggccttccccagagccacctccatccccactgcaggtgcccacctacccacagctaactctggaggtaccacaggcccctgaggtcctcagaagccctggagtcccccccagtccttgcctcccagaatcttacccctatgggagcccccaagagaagagtttggacaaggcaggctcggagtctccccatcccggccgcaggaccccaggcaactcatccaagaagcccagccaggggtcaggacggcgacctggggatcctggcagcacacctctgcgggacagactggcggccctggggaagctgaagacaggccccgagggggccctgggctcagagaagaatggggtgccagccaggcctggcaccgaaaagacccggggacctgggaagtcaggggagagtgctggagacatggtgccctccatccacaggccactggagcagctagaagccaagggggggatacggggggcagtggccttgggcacaaacagcctgaagcagcaggaacctggacttatgggggatcccggggcccgagtctactcctctcactccatgggggcccgggtggacctggagcctgtctcaccaaggagctgcctcaccaaatgccaacctcagccccaagcctgggcaagcccaataagagccctcacagcagccccaccaagctcccttccaagtcaccaaccaaggtggtgcctcgacctggggctccgctagtcaccaaggagtcccccaagcctgacaaagggaagggccctccctgggcagactgtggtagtaccacggcccagtccacacccctagtacctggccccactgacccaagtcagggccctgaggggctggccccacactcagccatcgaggagaaggtgatgaagggcattgaggagaacgtgctgcggctccagggccaggagcgagcccctggcgccgaggtcaagcaccgcaacaccagcagcatcgccagctggttcggccttaagaagagcaagctgccagcgctgaaccgccgcacagaggccaccaagaacaaggagggggctggcgggggctccccgctccggagggaagtcaagatggaagcccggaagctggaggccgagagcctcaacatctccaagctgatggccaaggcggaagacctgcgtcgggcactggaagaggagaaggcctacctaagcagccgggcccggccacggcctggtggcccagccccagggcccaacacggggctggggcaggtgcagggccagctggctggcatgtaccaaggtgcagacaccttcatgcagcagctgctaaacagggtggatggcaaggagctgccatccaagagctggcgggagcccaagcctgagtacggggatttccagccggtgtcttctgaccccaagagcccctggccagcctgtgggccccggaatggcctggtgggccctcttcagggctgcggaaaacctcctggaaagccgagcagcgagccagggaggcgggaagagatgccctcggaggacagcctggccgagccagtgcccacctcacacttcacagcctgtggctccttgactcgaaccttggacagtggcattgggaccttcccacccccagaccatggtagcagtgggacccccagcaagaatcttcctaagaccaagccaccgcggctggatcccccacctggggtacccccagctcggcccccaccccttaccaaagtcccccgccgcgcccacacactggagcgggaggtgccaggcatagaggagctgctggtgagtgggcggcaccccagcatgccagccttccctgcactgctacccgctgctccgggccaccggggccatgagacctgtcctgatgatccctgtgaagacccaggccccacccctcctgtccagctggccaagaactggaccttccccaatactagggcagccggcagctcctcggaccctctcatgtgcccaccccgacaactggaggggctgcccaggacccccatggccctgcccgtggaccggaagcgaagccaggagcccagccgcccgtcccctacgccccagggcccacctttcgggggtagccgcacccccagcacttcggacatggccgaggaaggcagagtggccagcgggggccccccagggctggagacctcggagtctctcagtgactcactctacgactcgctgtcctcttgtgggagtcagggctgaggggctgcgccacgccacggccccgctggagctggggaccacagactggaccggctctcttcatgcccagcccccggagacggggacccctcccttctctcacccagagtaaggctcttcctggaagggactgggggttaaaggccactgtgtcgcagccctccagtccctacttcaggctgagccatcttgtggtgctgggcttcctgcccaccagccgtgccatctctgcccaacccggctgctcctctgccccgaagccctcgcgaggccctcctggaggcccccgtgctggtggagtttgggggccagggggacaagttgccttctctctctgccctggtcctccctgctgtctggatggtgctgccctcctctgccccatgcctttggggtctgttcgtccgtcttttttgttgttgtttttatatattgaagcgcctggcccagcccccagcccccagccccgcactgcggttaatttatgtgttgtttaaaatgcggctgctctgcttcctgcctctgcttctgccgtatccctaataaaatgtggaggccccctc

SEQ ID NO: 100626 - DNA, 3837 bp, Homo sapiens
cagctctggcccaaactgtgccccaggcagcagctcctcctcctcttctgatgaggcaggtgaccccaatgaggcacccagccccgacaccctgctcggtgccctggcccgcagacagttgaacctgggccagctccttgaggacacagagtcttacctacaggccttcctggccggggctgcaggcccactcaatggggaccacccaggtcctgggcagtcatcctccccagaccaggcgcccccacagctgtctaagtccaaaggcctccccaagtcagcttggggtgggggtaccccagaggcccacaggccaggcttcggtgctacctcagagggccaggggcccctccccttccttagcatgttcatgggtgctggggatgccccactgggctctcggcctggccacccccattcctcatctcaggtgaaaagcaagctccaaattggccccccttctcctggggaagctcagggaccccttctgccctctccagctaggggtctcaagtttctaaagctgcctccaacctcggagaagagccccagcccaggaggcccgcagctcagtccccagctcccccggaactcgcgaatcccctgtcggaacagtggctcagacggcagcccctccccactgttggcccgaaggggtctgggtggaggagagctgtccccagagggggcgcaaggcctgcccaccagcccttcaccctgctacacaaccccagactccacacagctcagacccccgcagtcagccttgtccaccacgctgtccccaggcccagtggtgtctccctgctatgagaacattctggacctttctcggagcacctttagggggccttccccagagccacctccatccccactgcaggtgcccacctacccacagctaactctggaggtaccacaggcccctgaggtcctcagaagccctggagtcccccccagtccttgcctcccagaatcttacccctatgggagcccccaagagaagagtttggacaaggcaggctcggagtctccccatcccggccgcaggaccccaggcaactcatccaagaagcccagccaggggtcaggacggcgacctggggatcctggcagcacacctctgcgggacagactggcggccctggggaagctgaagacaggccccgagggggccctgggctcagagaagaatggggtgccagccaggcctggcaccgaaaagacccggggacctgggaagtcaggggagagtgctggagacatggtgccctccatccacaggccactggagcagctagaagccaagggggggatacggggggcagtggccttgggcacaaacagcctgaagcagcaggaacctggacttatgggggatcccggggcccgagtctactcctctcactccatgggggcccgggtggacctggagcctgtctcaccaaggagctgcctcaccaaagtggagctggccaagagccggctggcaggggccctgtgcccccaggtaccccgtacccctgccaaagtgccaacctcagccccaagcctgggcaagcccaataagagccctcacagcagccccaccaagctcccttccaagtcaccaaccaaggtggtgcctcgacctggggctccgctagtcaccaaggagtcccccaagcctgacaaagggaagggccctccctgggcagactgtggtagtaccacggcccagtccacacccctagtacctggccccactgacccaagtcagggccctgaggggctggccccacactcagccatcgaggagaaggtgatgaagggcattgaggagaacgtgctgcggctccagggccaggagcgagcccctggcgccgaggtcaagcaccgcaacaccagcagcatcgccagctggttcggccttaagaagagcaagctgccagcgctgaaccgccgcacagaggccaccaagaacaaggagggggctggcgggggctccccgctccggagggaagtcaagatggaagcccggaagctggaggccgagagcctcaacatctccaagctgatggccaaggcggaagacctgcgtcgggcactggaagaggagaaggcctacctaagcagccgggcccggccacggcctggtggcccagccccagggcccaacacggggctggggcaggtgcagggccagctggctggcatgtaccaaggtgcagacaccttcatgcagcagctgctaaacagggtggatggcaaggagctgccatccaagagctggcgggagcccaagcctgagtacggggatttccagccggtgtcttctgaccccaagagcccctggccagcctgtgggccccggaatggcctggtgggccctcttcagggctgcggaaaacctcctggaaagccgagcagcgagccagggaggcgggaagagatgccctcggaggacagcctggccgagccagtgcccacctcacacttcacagcctgtggctccttgactcgaaccttggacagtggcattgggaccttcccacccccagaccatggtagcagtgggacccccagcaagaatcttcctaagaccaagccaccgcggctggatcccccacctggggtacccccagctcggcccccaccccttaccaaagtcccccgccgcgcccacacactggagcgggaggtgccaggcatagaggagctgctggtgagtgggcggcaccccagcatgccagccttccctgcactgctacccgctgctccgggccaccggggccatgagacctgtcctgatgatccctgtgaagacccaggccccacccctcctgtccagctggccaagaactggaccttccccaatactagggcagccggcagctcctcggaccctctcatgtgcccaccccgacaactggaggggctgcccaggacccccatggccctgcccgtggaccggaagcgaagccaggagcccagccgcccgtcccctacgccccagggcccacctttcgggggtagccgcacccccagcacttcggacatggccgaggaaggcagagtggccagcgggggccccccagggctggagacctcggagtctctcagtgactcactctacgactcgctgtcctcttgtgggagtcagggctgaggggctgcgccacgccacggccccgctggagctggggaccacagactggaccggctctcttcatgcccagcccccggagacggggacccctccctgaagggaccaaggaggcaggtggataagaaggtgaaaagggggtccctggcacaccccaccacccactgcttcggcggatgagatgaccgtgctcagctcagggagagaccccgcccttggtcccttctctcacccagagtaaggctcttcctggaagggactgggggttaaaggccactgtgtcgcagccctccagtccctacttcaggctgagccatcttgtggtgctgggcttcctgcccaccagccgtgccatctctgcccaacccggctgctcctctgccccgaagccctcgcgaggccctcctggaggcccccgtgctggtggagtttgggggccagggggacaagttgccttctctctctgccctggtcctccctgctgtctggatggtgctgccctcctctgccccatgcctttggggtctgttcgtccgtcttttttgttgttgtttttatatattgaagcgcctggcccagcccccagcccccagccccgcactgcggttaatttatgtgttgtttaaaatgcggctgctctgcttcctgcctctgcttctgccgtatccctaataaaatgtggaggccccctc

SEQ ID NO: 100627 - DNA, 4289 bp, Homo sapiens
cagctctggcccaaactgtgccccaggcagcagctcctcctcctcttctgatgaggcaggtgaccccaatgaggcacccagccccgacaccctgctcggtgccctggcccgcagacagttgaacctgggccagctccttgaggacacagagtcttacctacaggccttcctggccggggctgcaggcccactcaatggggaccacccaggtcctgggcagtcatcctccccagaccaggcgcccccacagctgtctaagtccaaaggcctccccaagtcagcttggggtgggggtaccccagaggcccacaggccaggcttcggtgctacctcagagggccaggggcccctccccttccttagcatgttcatgggtgctggggatgccccactgggctctcggcctggccacccccattcctcatctcaggtgaaaagcaagctccaaattggccccccttctcctggggaagctcagggaccccttctgccctctccagctaggggtctcaagtttctaaagctgcctccaacctcggagaagagccccagcccaggaggcccgcagctcagtccccagctcccccggaactcgcgaatcccctgtcggaacagtggctcagacggcagcccctccccactgttggcccgaaggggtctgggtggaggagagctgtccccagagggggcgcaaggcctgcccaccagcccttcaccctgctacacaaccccagactccacacagctcagacccccgcagtcagccttgtccaccacgctgtccccaggcccagtggtgtctccctgctatgagaacattctggacctttctcggagcacctttagggggccttccccagagccacctccatccccactgcaggtgcccacctacccacagctaactctggaggtaccacaggcccctgaggtcctcagaagccctggagtcccccccagtccttgcctcccagaatcttacccctatgggagcccccaagagaagagtttggacaaggcaggctcggagtctccccatcccggccgcaggaccccaggcaactcatccaagaagcccagccaggggtcaggacggcgacctggggatcctggcagcacacctctgcgggacagactggcggccctggggaagctgaagacaggccccgagggggccctgggctcagagaagaatggggtgccagccaggcctggcaccgaaaagacccggggacctgggaagtcaggggagagtgctggagacatggtgccctccatccacaggccactggagcagctagaagccaagggggggatacggggggcagtggccttgggcacaaacagcctgaagcagcaggaacctggacttatgggggatcccggggcccgagtctactcctctcactccatgggggcccgggtggacctggagcctgtctcaccaaggagctgcctcaccaaagtggagctggccaagagccggctggcaggggccctgtgcccccaggtaccccgtacccctgccaaagtgccaacctcagccccaagcctgggcaagcccaataagagccctcacagcagccccaccaagctcccttccaagtcaccaaccaaggtggtgcctcgacctggggctccgctagtcaccaaggagtcccccaagcctgacaaagggaagggccctccctgggcagactgtggtagtaccacggcccagtccacacccctagtacctggccccactgacccaagtcagggccctgaggggctggccccacactcagccatcgaggagaaggtgatgaagggcattgaggagaacgtgctgcggctccagggccaggagcgagcccctggcgccgaggtcaagcaccgcaacaccagcagcatcgccagctggttcggccttaagaagagcaagctgccagcgctgaaccgccgcacagaggccaccaagaacaaggagggggctggcgggggctccccgctccggagggaagtcaagatggaagcccggaagctggaggccgagagcctcaacatctccaagctgatggccaaggcggaagacctgcgtcgggcactggaagaggagaaggcctacctaagcagccgggcccggccacggcctggtggcccagccccagggcccaacacggggctggggcaggtgcagggccagctggctggcatgtaccaaggtgcagacaccttcatgcagcagctgctaaacagggtggatggcaaggagctgccatccaagagctggcgggagcccaagcctgagtacggggatttccagccggtgtcttctgaccccaagagcccctggccagcctgtgggccccggaatggcctggtgggccctcttcagggctgcggaaaacctcctggaaagccgagcagcgagccagggaggcgggaagagatgccctcggaggacagcctggccgagccagtgcccacctcacacttcacagcctgtggctccttgactcgaaccttggacagtggcattgggaccttcccacccccagaccatggtagcagtgggacccccagcaagaatcttcctaagaccaagccaccgcggctggatcccccacctggggtacccccagctcggcccccaccccttaccaaagtcccccgccgcgcccacacactggagcgggaggtgccaggcatagaggagctgctggtgagtgggcggcaccccagcatgccagccttccctgcactgctacccgctgctccgggccaccggggccatgagacctgtcctgatgatccctgtgaagacccaggccccacccctcctgtccagctggccaagaactggaccttccccaatactagggcagccggcagctcctcggaccctctcatgtgcccaccccgacaactggaggggctgcccaggacccccatggtgagaattgcagcagaggaaagggaaaggactcgggagcaggagggagtgatgtggggagaccagtttctccagtaaggtacggcctgtgtgtcgcacagtctcagtgctgcaccctctgggaggaggacccctgggatgccctgtgagcggccctccacactgccctccttgcacttctctcgtggggaaaggtttctgtccctccccagaaccttgtaggactgttctcagttgtacctccagcctgtttcctctgaagtataccccacacttgggccccctctggagcagcccccatcaggtgcacagacgcccctcagagctcagtgcctctgaggctgggccgaaaggtggagaggagcttcctcccgagctgcccctcctttcccaggccctgcccgtggaccggaagcgaagccaggagcccagccgcccgtcccctacgccccagggcccacctttcgggggtagccgcacccccagcacttcggacatggccgaggaaggcagagtggccagcgggggccccccagggctggagacctcggagtctctcagtgactcactctacgactcgctgtcctcttgtgggagtcagggctgaggggctgcgccacgccacggccccgctggagctggggaccacagactggaccggctctcttcatgcccagcccccggagacggggacccctccctgaagggaccaaggaggcaggtggataagaaggtgaaaagggggtccctggcacaccccaccacccactgcttcggcggatgagatgaccgtgctcagctcagggagagaccccgcccttggtcccttctctcacccagagtaaggctcttcctggaagggactgggggttaaaggccactgtgtcgcagccctccagtccctacttcaggctgagccatcttgtggtgctgggcttcctgcccaccagccgtgccatctctgcccaacccggctgctcctctgccccgaagccctcgcgaggccctcctggaggcccccgtgctggtggagtttgggggccagggggacaagttgccttctctctctgccctggtcctccctgctgtctggatggtgctgccctcctctgccccatgcctttggggtctgttcgtccgtcttttttgttgttgtttttatatattgaagcgcctggcccagcccccagcccccagccccgcactgcggtattatgggtgttaaatgcggtgtctgttctgctctgtttgcgatctataaatgtgaggccctcttgaaaaaaaaaatgggttattggggggaaagggaaaggcctgcaagttccgccctttgaaggaatgcggccaagggaag

SEQ ID NO: 100628 - DNA, 305 bp, Homo sapiens
acaaggagggggctggcgggggctccccgctccggagggaagtcaagatggaagcccggaagctggaggccgagagcctcaacatctccaagctgatggccaaggcggaagacctgcgtcgggcactggaagaggagaaggcctacctaagcagccgggcccggccacggcctggtggcccagccccagggcccaacacggggctggggcaggtgcagggccagctggctggcatgtaccaaggtgcagacaccttcatgcagcagctgctaaacaggtgaggtcctgggatcagtcaacagggg

SEQ ID NO: 100629 - DNA, 3614 bp, Homo sapiens
cagctctggcccaaactgtgccccaggcagcagctcctcctcctcttctgatgaggcaggtgaccccaatgaggcacccagccccgacaccctgctcggtgccctggcccgcagacagttgaacctgggccagctccttgaggacacagagtcttacctacaggccttcctggccggggctgcaggcccactcaatggggaccacccaggtcctgggcagtcatcctccccagaccaggcgcccccacagctgtctaagtccaaaggcctccccaagtcagcttggggtgggggtaccccagaggcccacaggccaggcttcggtgctacctcagagggccaggggcccctccccttccttagcatgttcatgggtgctggggatgccccactgggctctcggcctggccacccccattcctcatctcaggtgaaaagcaagctccaaattggccccccttctcctggggaagctcagggaccccttctgccctctccagctaggggtctcaagtttctaaagctgcctccaacctcggagaagagccccagcccaggaggcccgcagctcagtccccagctcccccggaactcgcgaatcccctgtcggaacagtggctcagacggcagcccctccccactgttggcccgaaggggtctgggtggaggagagctgtccccagagggggcgcaaggcctgcccaccagcccttcaccctgctacacaaccccagactccacacagctcagacccccgcagtcagccttgtccaccacgctgtccccaggcccagtggtgtctccctgctatgagaacattctggacctttctcggagcacctttagggggccttccccagagccacctccatccccactgcaggtgcccacctacccacagctaactctggaggtaccacaggcccctgaggtcctcagaagccctggagtcccccccagtccttgcctcccagaatcttacccctatgggagcccccaagagaagagtttggacaaggcaggctcggagtctccccatcccggccgcaggaccccaggcaactcatccaagaagcccagccaggggtcaggacggcgacctggggatcctggcagcacacctctgcgggacagactggcggccctggggaagctgaagacaggccccgagggggccctgggctcagagaagaatggggtgccagccaggcctggcaccgaaaagacccggggacctgggaagtcaggggagagtgctggagacatggtgccctccatccacaggccactggagcagctagaagccaagggggggatacggggggcagtggccttgggcacaaacagcctgaagcagcaggaacctggacttatgggggatcccggggcccgagtctactcctctcactccatgggggcccgggtggacctggagcctgtctcaccaaggagctgcctcaccaaagtggagctggccaagagccggctggcaggggccctgtgcccccaggtaccccgtacccctgccaaagtgccaacctcagccccaagcctgggcaagcccaataagagccctcacagcagccccaccaagctcccttccaagtcaccaaccaaggtggtgcctcgacctggggctccgctagtcaccaaggagtcccccaagcctgacaaagggaagggccctccctgggcagactgtggtagtaccacggcccagtccacacccctagtacctggccccactgacccaagtcagggccctgaggggctggccccacactcagccatcgaggagaaggtgatgaagggcattgaggagaacgtgctgcggctccagggccaggagcgagcccctggcgccgaggtcaagcaccgcaacaccagcagcatcgccagctggttcggccttaagaagagcaagctgccagcgctgaaccgccgcacagaggccaccaagaacaaggagggggctggcgggggctccccgctccggagggaagtcaagatggaagcccggaagctggaggccgagagcctcaacatctccaagctgatggccaaggcggaagacctgcgtcgggcactggaagaggagaaggcctacctaagcagccgggcccggccacggcctggtggcccagccccagggcccaacacggggctggggcaggtgcagggccagctggctggcatgtaccaaggtgcagacaccttcatgcagcagctgctaaacagggtggatggcaaggagctgccatccaagagctggcgggagcccaagcctgagtacggggatttccagccggtgtcttctgaccccaagagcccctggccagcctgtgggccccggaatggcctggtgggccctcttcagggctgcggaaaacctcctggaaagccgagcagcgagccagggaggcgggaagagatgccctcggaggacagcctggccgagccagtgcccacctcacacttcacagcctgtggctccttgactcgaaccttggacagtggcattgggaccttcccacccccagaccatggtagcagtgggacccccagcaagaatcttcctaagaccaagccaccgcggctggatcccccacctggggtacccccagctcggcccccaccccttaccaaagtcccccgccgcgcccacacactggagcgggaggtgccaggcatagaggagctgctggtgagtgggcggcaccccagcatgccagccttccctgcactgctacccgctgctccgggccaccggggccatgagacctgtcctgatgatccctgtgaagacccaggccccacccctcctgtccagctggccaagaactggaccttccccaatactagggcagccggcagctcctcggaccctctcatgtgcccaccccgacaactggaggggctgcccaggacccccatggccctgcccgtggaccggaagcgaagccaggagcccagccgcccgtcccctacgccccagggcccacctttcgggggtagccgcacccccagcacttcggacatggccgaggaaggcagagtggccagcgggggccccccagggctggagacctcggagtctctcagtgactcactctacgactcgctgtcctcttgtgggagtcagggctgaggggctgcgccacgccacggccccgctggagctggggaccacagactggaccggctctcttcatgcccagcccccggagacggggacccctccctgaagggaccaaggaggcaggtggataagaaggtgaaaagggggtccctggcacaccccaccacccactgcttcggcggatgagatgaccgtgctcagctcagggagagaccccgcccttggtcccttctctcacccagagtaaggctcttcctggaagggactgggggttaaaggccactgtgtcgcagccctccagtccctacttcaggctgagccatcttgtggtgctgggcttcctgcccgaagccctcgcgaggcctcctggaggccccgtgctggtggatttggggcaggcggccagttgctttttctctgctggtctccttgtctggtgtttgccctcgccatcttggtcttcgcgttgggggga

SEQ ID NO: 100630 - DNA, 560 bp, Homo sapiens
ctgtgatccggattgaagaggaaactagttcctgctctgggctgagctgaccacgttgggtaccctcccctgtgacatccatggtcctgccctcgagaccctcttccgtctctccttcccaggccccactgccctctggttctcctcccgcctctcctctaccctgcagccaacaggctgcttggcctcctcctttgtgagctcctagtaatgagcagacccaggagctcctggctgggatgcccatcatgtggctcccgccttctctgaacttcttatctgaggcgagcatctccctccgcagctcaactgcagggtccagtgtgggtacccaggcttccaccccttgcataggtcctacccctcagctcactgcatgaaagtatcattgttaggtgactgaggaaggcatggctttgcgcgctgctcctgcctgcctctgatgatagcctgtgtggacggccgcatgtgtctgatgtctgcgtgtgtacgctatcagctgatacgttgcaccagctgtccctccccccaggagatacatgaaggcattacgtgaatga

SEQ ID NO: 100631 - DNA, 291 bp, Homo sapiens
tgaaatttttttgtctatctgaaatgatgcatgcctatgtggtattactatgacaaaaaaaggttcatcttctcagcctggcctacttctgactcttaacttttaatgcagccaaaatactgtatgtttctgtaattaatattgcagaaaacacagcagtgaatgcactaagcaaaacaaaacatttagaaaccaaattaaaaaattttttaattaccttgaatatgggaacctgcacaaacacctgctttaagtacaagtaaaataataatggaaatttgtgatgatctt

SEQ ID NO: 100632 - DNA, 378 bp, Homo sapiens
aaccaagaattccaagagtattccttccaaactatcctattctccatctgagaagtctccccgaaatcttactgattgaggagaagtctccagaaccaagactcttcctactaattagggagagtaaaccgagacccctgaagaagctgaaccaattgggagaaggaaaggggtgttggcagcacctagactactcaccaaatcagacaccccataatggggctgcagctgcagacaatccatgatggggctacaaacagacactgtgataaggttacagttacaggcaccccatggtggagctacagagggacaccttgccatggagctctagttatgagatatctccccaggacaatttctctattgcaaagtgta

SEQ ID NO: 100633 - DNA, 388 bp, Homo sapiens
gaaatattgtacatgagaaaaaaatgctgctcatcagacattttgggtaaatactttagctgatatttagatgtcataatggagcacttatggaacttaaagaggatgctaaaatgatttttgaaagctataagtaacaatcatgcagtcttatatacccttgaaaatattttgctttcaaattttgctttcaaagatagggcacaagttgctaaattctcccctaaaacttttttttttgcttttgcaaagggataagacaataaacaccattggtgacctacctttcttcggttttacagatgtttatatttttaaaaattctttttagaattaggatcttgctctcttgccgaggcagaagtgcagttatgtgatcatagctcgc

SEQ ID NO: 100634 - DNA, 285 bp, Homo sapiens
gtgctaggtgctggggatacggtagtgagcggagcagatgtcctgatgggtgagagacacagagcgagtgatgatgatgaagtggcgtgagtgtgatgctaggaggagcagccgggacacagcctggtctagggtcagagaagcctctacatggaagaggtgtttgatctgagacccaaaggacaaagaggagttaacaaaacataagatgagggagggaggggcttcaggccgacagaacagcaggggaaatgctggggttgagagaacgtgtgatccacccag

SEQ ID NO: 100635 - DNA, 209 bp, Homo sapiens
ctttgaagattttgagtaaaaagtgtgtaatagaatcagaattctccttagcagcaatgagtaagatttaatggaaaagtaatagaaacaggaagaccacagtctttaagaatctcctaggtagatatgtctgatatagaatagtgacggttggaactctgtggaggtgatataatgtgaagggaattacagaggtgaaattggtatta

SEQ ID NO: 100636 - DNA, 367 bp, Homo sapiens
ccatctgctccatttgagactccatctgctccaggcagctgtctgagccttggaggagcagctcacaatgaattgtaggcttctgttgtcccttgctgcctatctgtaagtaataaacccatgaaattccatgtaactcaacgagttccatgtaacttgttgtatgtgggtgttctctctcaccagagtcagataagttgctaaccagtgcacactgaacctgcttcacaaagagtactgtgtaatcatgtcattacacggaataaaaaattatgcaaacaggccaggcgctgtggctcacgcctgtaatcccagcactttgggaggccgaagcaggtggatcacgaggtcaggagttcgagaccag

SEQ ID NO: 100637 - DNA, 492 bp, Homo sapiens
ttttttttggcttttgttaaaagtgagctggaaattgaggcacaaaacacaggctgattcaattctgcaattcagatttgggtcaaatttgcatctttgttttggtggctttagtgtgacttgaaagctgtagtgacaactccacttttcatcttaagggtacagtaaatagttaaacagtagatgtctctcacatgtaccttcagaataaattctattaacattcattcaagcatgacagtcagtatatatcagatatactgtattatagttgacttggtgcatacccataatacatggcatattttacttactttttcatgtattaaagaaccaaaattattaaaatctgagaggggacaagctcagaaaaaaaaaaaatcaacagaagaggaaaagcagtgtctttcccataatagcatgaatagcttgtttgaaacgtaggtagtgaattgaaagagagagatatttgtgcctcaaattagaaatcgg

SEQ ID NO: 100638 - DNA, 433 bp, Homo sapiens
tgaggatgtatgctcctcatgaccggggataaactcatttagtcagcagctgtggcagccacagctgcaaaagcgtaacatttacacagtgctttatcacctgcaaagccctttcatccaccttatctgtttttcacaactgcactgtgagtttggtattactgttatctcatgtgtagatttagaagccactttcctaacttagtgacttactgcacaaaaaagccttcaaccgtgaattgttagagatggtttttagaaagaaatttggcacttttcaataggctatagccaatcagtcatgcttggagatattatgtattttggtttcctacatggacatccaagttcatgaatcttttggaattcttttccataacaacccaggatggcaagctttcgggttaagacaaatgggattatttatttaaga

SEQ ID NO: 100639 - DNA, 126 bp, Homo sapiens
gtattaagcatcagttgtcgattcattcatttcacacatttcactagtgacactgaatactgcagagccaaagatgaaaggggaagcaattccaggctgatgagaagatgcacgattgccattcag

SEQ ID NO: 100640 - DNA, 298 bp, Homo sapiens
ataaacttttaaaggacttctgccttcaccaggagctgcatcccacttcacacatctaggcactgagtgttcccttgggccacaatcaaagagcctctcatggcattcccatcttgcccctgtgggactaaaaaccaagattagaaagctctttgaaagttggaactctgccttatttactctttcttcccagcccctatatggtgcctggaatgcttgttgaataaacaaatctatgcacctagaacaaatattagaaatagacctttaaaatctcccagagtcaaaaatatgtaga

SEQ ID NO: 100641 - DNA, 1071 bp, Homo sapiens
ttgatttccgtgtgttcattgctagtataatatatataaattaattttggtatcctgatcatgtatcctatgatcatgctgaattcgcttattgtctaggcattcatggattggaagacttcacatttttgtgatgacagtactacccaaaccaatctacagttttactgcaatcactatcaaaatccaaacagccttttttttttttgcagaaatcaattcataaattcatatgtaattgtaatggaggcaaatagacaaaatctttcttttttaaaggaacatgatggatggctcccacttccccatttcgaaacttactaccaagctatagtaatggaatagaatttagagtccataaagaaactcatacatctaaagtcacttgattttcaagaaggatccaagattgcttaatggagaaagcatagtctcttcagcaaataatgctgggcaaatatatatacatatgcaacataatgaagttagatccgcacttcacactatacttaaaaattaactcaaaatgatcaatgacctaaatataagaggttaagctatacaactcttagaataaaacataaaggttaatcttcaagactttttatttggaatggattcttagataagacaccatatgcacaagctaaaaaaaccccacataaattggactagagcaaaaaaaaaaatgctatgcatacagagacattgtcaagagcatgaattcttctagtatcagaatatataaagaactcttagaccaggtgaggtggctctcacctataatcccagcactttggaaggctgagatgggtggatcacttgagcccaggagtttgaggcctgcctgggcaacatggcgaaaaccatgtctctacaagaaacaaacaaacaaacaaaaaacaacaacaaaaaacaaaggtagccaggcatagtgacccatgcctgtggtcccagctactcaggaggctgaggcagaaggattgtttgagcctgggaggtcaaggctgcagtggggcgtgatgtaccattgcactccagcctgggcaacaaagagagactctgtttctt

SEQ ID NO: 100642 - DNA, 851 bp, Homo sapiens
cacagtcatctatatttgaagtcgtttgttctagatactttctatttttgctctatattcatttcttttaagttctgttttattggatagaaaatatagttattaagctatcctaaaattttcataagaaaccatgttcctccgcttcagcacattgcttcccacatgattacatatttctttggtttgcaatgtgggatagtttagtggtccccaacttttttgccaccaaggaccagtttcagggaatgtaatttttccacagacagatggggaatggttttgggatgaaaccgttccacctctgatcatcaggcattggattctcatagggagtgcaacctagatccctcgcatgcacagttcacactagggttcacactcctatgagaatccaatgccgccgctgatctgacaggaggtggagctcaggcagtcatgctcactggccctctgctcacctcctggtctgaggtctagttcctaacaggccatcaaccggtaccagtccgtggccaggtggtggggacccctgggatacatcatattttgtggactgcttattcctctaaaactggatacattttctaacttctgcagagcctttactgattttgtagacagcataatgttttctcataatgtgggtgttctatcgtgtattgaataatttcccccaatgtttagcatttaagtttatttctaactgttgcctgtgaagactgtattttcatgaatatctttgtcctcagtgtttttccttgtgaccacttgtgtccttgggtaggcagctgagggtggaatcccccagatgaggagcacgtttccccctgtgacccgggctgccgttg

SEQ ID NO: 100643 - DNA, 262 bp, Homo sapiens
taataaaattaaaactggagttgcatagcttgattagccacagttcaagtgctcagtagccatatggctagtggcttcttcgttgaacagcaaagatatagaacatttccatcatgaagaatgttctattggacagagccggtctaggtaggatttgtagagacttataaaagaacaaattgccccaagccaggtctgtgacaaaaccttttttcatgaggtaatttacagtctccttctgggaagaaattagcattcctgt

SEQ ID NO: 100644 - DNA, 354 bp, Homo sapiens
gtctcatgatagtcttgggacagcaggaggttaaatattaaaatcccatttcacgtgtataagtagggggatgtattttctaaaaaattatatattttttatttttttgtaaaatagagatagggtgtccttatgttgtccaggctggtcttgaacttctgggctcaagagattctcctgccttggcctcccaaagtgctgggattacaggcatgagccactgcgcccagcaaaatttttaacaatctggatattataagcaccaaccaacaagagaatactgaaatcctggtttcttattccctagcatactttccactgcaccacgctatttcttaatacagccatgccttt

SEQ ID NO: 100645 - DNA, 341 bp, Homo sapiens
tgtccagtgggaagtggtcactcaggctgggaagtcaggagggagatgtggggagtcagtgccacagaagtgagaacagaaaccatcagacagaggtgagggcaaaggaagtggacaggaggtaaaagagaagtggggtgaggacaacgccttggggaccccaagcataaggaggaagagagcagagggtgccaggcagtgacagaaggacaaacagagagcatagctatcaacccctgaaagcctcaatttcctcctctgtaaaataggatttttttttttttttgagacggagtttcgctcttgttgcccaggctggagtgcaatggcgcgatctcagc

SEQ ID NO: 100646 - DNA, 609 bp, Homo sapiens
ttactattatcacatacaactaacaaaaatggtgctttattttttgtcattcttcccttgtacagtagtatctcacattcagtacttctttagatcctcataagaaatctgggaattaagtattattcccattttctagataatgaggatcagacttagacaggggcagttaggccgcatagctagaaagtgagtcacatttacttagttttgccatgtgacaggtctttcccctatgtcatctcccttaatcctcacaataatcctggagggtgtgatgactgttctccctttacagatgaggaaggaggctccgtgtgtcatgtgccaaagatcacacagtcggaagcagggtagctggggtttgaagccaggttttccggctccagattcaatcctccttgtgcttcatctactacttctcagtcgaggcaattgtttcccccaaggaatatttggcaatgtcaggagacagtcttggttttcacaactggaagggggctgctggcatgtagtgggtagaggccagagactctgctaaacagcctacaatacaaggacagcccactcctgccagtaaagaattatccaacttgatacgcaatagtg

SEQ ID NO: 100647 - DNA, 265 bp, Homo sapiens
ctactccttcccattcaagtatgttactttattcctaaaccactgcaaaaacctccattggccttccattttctacttcaaattaagtatgccttaaaataaattctaattgggaatatacatggagacctaaaatacagaatgtgcatatcagtttaagttcccatcccccttctttcggtatcatctggataatgttgtcctctggctcaaactctcaatggcttaccactgccaagaggataacaggttacagcttagcctt

SEQ ID NO: 100648 - DNA, 268 bp, Homo sapiens
tctgttcttgcctttattatttccttccttcaacttattttgggttaattttactcttctttttctggcttcataaaatggaagtttagttcattggtgtagactgttgaagacaaatcatgatctctcatgtttctgcacatcttgcaagaagcagcactgactgccttggttctacactatctttttgaaaataaacgtagggaaaaccaccttgaaagataaagatagcgaatcccaccagagcaaaaggcaggtgtgtccactg

SEQ ID NO: 100649 - DNA, 623 bp, Homo sapiens
gcacaggctggtctcgaactcctgagctcaagtgatccacctgcctcgcctcccaaagtgttgggattactggtgtgagccaccatgccctcgtatcctaatttttatgatctaatgggtagtagtgggttgagctgaaaaattgttatgctttaaaaaattcaagaactgtaagtcattggagatcaaaatacactacttttattaagcatttgaactaatagttcatgaatacaatttgatgggcacctcgtaaactcaagagttattcttctttcttttaacttacttcatgaagatacttggctctatgatgataaaactccgcacaagaagggtcattttatttagctgaccatggcccttttcttcttatatttgtacagtccctgttttttcttccttggttttctgatctgggtagaaaatctgctgcctgctataccctcacctttacccttactctcttggcctgtcagaagaattctagggaagatagtcttatggtcccaagagattgtggttgtgtagattgagagtggtaagatcaggaaccaatgcaaatgtctgggctttaccatatacctctgtaacaaaacaggtattctttttgccaagagcag

SEQ ID NO: 100650 - DNA, 441 bp, Homo sapiens
atatcgagctcggtaccttcccaccagcaagcccaattagaggataataaaaatgtcacaaggcagttctattcttgtggaccccggtggatcattcctgaatttcttgccaccaggcaggaccccgcagtctcctaatggatgtggaatgctaaactaagttgcttagaaggctggatcattcaactggccctgctgttagctctgaagctgcctcccagtattctccctaagatgtgctcacccaccctggagagggccagctacacacagatgccaccaagcaaagtgcaaatcatgagataggatgtgcccaccagaaacttcctttgggtaattccagaaacccacaatctccaagaggagatctttccattggaaaagaagaccctgggggtggtctttcttgtctgcacaaggggacagccacaaagagtagca

SEQ ID NO: 100651 - DNA, 721 bp, Homo sapiens
ggtcggccgctgcagaagggcagtcaccccatgtgcaaggagcacgaagatgagaaaatcaacatctactgtctcacgtgtgaggtgcccacctgctccatgtgcaaggtgtttgggatccacaaggcctgcgaggtggccccattgcagagtgtcttccagggacaaaagactgaactgaataactgtatctccatgctggtggcggggaatgaccgtgtgcagaccatcatcactcagctggaggattcccgtcgagtgaccaaggagaacagtcaccaggtaaaggaagagctgagccagaagtttgacacgttgtatgccatcctggatgagaagaaaagtgagttgctgcagcggatcacgcaggagcaggagaaaaagcttagcttcatcgaggccctcatccagcagtaccaggagcagctggacaagtccacaaagctggtggaaactgccatccagtccctggacgagcctgggggagccaccttcctcttgactgccaagcaactcatcaaaagcattgtggaagcttccaagggctgccagctggggaagacagagcagggctttgagaacatggacttctttactttggatttagagcacatagcagacgccctgagagccattgactttgggacagatgaggaagaggaagaaggcattggcagaagaggatcaggaggaggaagagtgcaaagaaaggaaggaagaa

SEQ ID NO: 100652 - DNA, 1009 bp, Homo sapiens
gtatagttcctgcagaaggtatgcagggaaacagaaaatgtatgaaaaaacctccctaaataaaagacatctgagactctaattcaaatgaaaaaaacaaaaaaaaaaaatgtcctggacgcatgtatcccaaactattatggccaattactttgggagcacgtaccacatttgggctgcggggacctaggcaggcagaactaccattcgggtactcctcagacaattttcacatattcacttgggtaatttacaaacctacaacaattccttcaactactctcactatctaacaacgtgctaattcggctttcctaattaaagaaaaaggagatcttcccagttttaaacaatgggtggtgttgtacgaacgcaaagctgggtttcagactccccacacacctctggtagacacatctcaagacaccacaagccaacggaaaatttctccactaagccaaccacttgtgaacatttcaacacacttgcaggcattcaaacggggctccactagggaccccaccagtagacaagctgacaaacatatttcctacggacacagctagatcaggacgacattcagacacttcttcacgacatcctggtgcaaccaccccttatacccgccaaataaagttcttcccgtggcacacaccaaaaagttctgctataaggcaacacgatatttaacccctacatttccacccaaagcttgtcctatacccgctggggatacaaaaccccttggaaccatctacacagggatggagatcaagaccacaaagattttcactccccacccgcgttcatagaggagagatccatcgttagtgcagaatgcaaaagactcctggaaccgtgacccgcattaatgtggcccgccggagacaccccaatcttggtgacattggctcaacaaggggcgaatacacagtaattccctcttcagggacttgtgggccaatagcgcaccaactgagtcaaggcaaatctgcctgcgcccccccca

SEQ ID NO: 100653 - DNA, 434 bp, Homo sapiens
  misc_feature (2)..(2): n is a, c, g, or t
tncagagtctcgctctgttgcccaggccggagtgcagtggcgtgatctcggctcacttcaagctccactataatgtgagctctatgaaagcaggaacagtataagtcttagttactgctatagttcttggcacaaagtactcaaataatgactgaatgtagaaggtactctcctaaaacacatacttctttgagtcaagtaagaacctctgtctatgtgtaaaagggctctctaaatttgggaacactgccacgtatttctagatctagtatatgagccattgtcagatgtacatcctattccagttttgagccattactggctgcctttgggtgagtttgcttttcattctaatttcagaagccagccacctgccattatctaaaatcctgtccacatcaagtttacacagtaagcaattcataaagctgtga

SEQ ID NO: 100654 - DNA, 414 bp, Homo sapiens
gattcccaaatcaccagagcctactgtaaactggcctatggcagatgctcaatcaatgaatgttgtactaccctaaagtaccacactagaggcaatcacagggtgctatgtgcacccacaggagggacacctaaactcagcttggagagcaggtgagtccaagacaacatgcatcaaagaggctgagatggagcatccaggctgatgagaggagaagtggagcctaggcagatgggccggtgagaagtccagcatgtccaggtgagcaaaccagggctgcttcaagaagggaaggcagataggcatggctggggacaaaggaagtcagcctgtgaaggggcaaggtaatcacatctggatttgttagagaattggaattttactttgaagatagtggggagctactgcaggatt

SEQ ID NO: 100655 - DNA, 798 bp, Homo sapiens
agacgttccaagaaatactctctattctttacattttagaaatgaaagggttaatgcaacctctacttcgtaggcactcacaaatgatctgagggtcatttttgcctgattctaaccctcttctgcctgcctcaacttggctgttcctcctacttgacttaaaaatctcattccattaacgtcaatcctccaggttagaccactaaagccgggtcgcggtctctagaagctcactgctgctatgcacatatgttacctggcaggagaagaagagcccctgattaggaggtaggggaaggacagccatcttctgtagtcctctttcattagcacattagcatgaatgagcttatcagattagctaattgtcacctggacactttggacagtgcagagatactggtgaggcatatttccacaaaaagcagagggaaaagcacagcaaatgacaagtcctggaagggctatggagcatcctggaagggcagggttcaatgaggaaggacaaacaagatgctccagaggactggagaggtaggagagaaagctctggatgagaaggcgctaaagatgaattttaccattttcaagctttgctttgcccaggcatttgcctgtttcctgctggagggatagcagatacacaaagcagctcaggcacaagggataacttgactcctgtttcttgaaagcgtaacaggagcaaagacaagtgctgttaagatggaaaactagataacctgcaattcctcctcctataaacacctagaaaaactagataaacatacaaatattttt

SEQ ID NO: 100656 - DNA, 410 bp, Homo sapiens
ctgaggagcggttttctggggtctgtaggaagacagttctaattaggatggaggaattatactagggagtagagggaatggaagtgagaagaattagtaaagagaagaaatgtgaacttatcaaataggccagagtaggcctctgaagattcttgagtaagtgagtgaactagattttaggaaggtaatgagacaatcatatgcaaggaagatttcaaatactagagacaagaagtcaagcaggacttcgagcagttgttgaggtctatgggaatggataaaatgacacaagtgagagatgttaagaaaggatcaaaagactttcatagtgtattgaatctgggaaacaaatgagcagaggctgggaataatcacatctaagagacagtggggtacagacccgcatgcag

SEQ ID NO: 100657 - DNA, 96 bp, Homo sapiens
ctgtaggaagaggaagacagagctcttaccagggggaggcagagatggcacagcaagagacatgcccccagaatgccaccaatgccccaggacagg

SEQ ID NO: 100658 - DNA, 203 bp, Homo sapiens
ctcaagagacagaaagagatattcctactgcaaggattttgctcaatctcttcctctctgctctttcactacagcttaatcaggattgtcaaataggttgtttcccatatattccacacatcaattctaacctattagtaatcactatctagagaatgaaggaaaagtttctgaggccaaaatgtgtgaggagaagaaggggt

SEQ ID NO: 100659 - DNA, 221 bp, Homo sapiens
gcgtcgaccaattatagcatcaaaactggcaatgctgatgaagctgtttgagagcatgccctctttccaattctgtgtctatgtccatgaccaaggaagccctgtattatttgcacccagacctgcccaagtcatcattcatgtcagagatgtgaatgattcccctcccagattctcagaacagatatatgaggtagcaatagtcgggcctatccatccag

SEQ ID NO: 100660 - DNA, 765 bp, Homo sapiens
caaaagcagcatgcaacccttatgaacccatcttggaaggcattcggggagcccaagacaagaccattgggagcctcagggtcacttgtgggggtctctgtgctggacggctgtacctctcatgaaatggacaactgaccataagaaggaggtaagttacgcatggacgggaaaataagaagctcctacttagggctgtgatatgtgcggtaaccatttaacgttaatagcatccatgtgagacaggtgctagtactgccccatttcatattggcggacattgaggcacacagactgtatgacttgcccaaggctgcccacctggttaggggagctccaggattccaatccagtccgaactcaacacgaggggtggcacctacaggctggggtcaatctggaagactgcctgttgtatggcctggcaactaaaaaatgttttttacatttttaaatggttgacaaaattaaaataagagaatatttcatgacatcatcaaattacacgaaatgcaaatttcagcatctacaaatacagtttgattgggacacagccaccctcatccgtttgcaggctatccctggctgcttacagggtccacatagtccataaagcctgagatatttactatctggccttttacagaaaaagtccccaaacactaatctgaaatgtttgcatcagaaccccttgtggggcttgttagaatgcagctccctggtcccacacccagtctctgattcagtaagtctggagcagggcct

SEQ ID NO: 100661 - DNA, 838 bp, Homo sapiens
cctttgttctcttccagactttaaacaagtgagtcctttccttccaatctaagtatggagtacaatggaacagtagagctgcactgaagacaagacttcttgggctaccatttttctggaagtttctacaaagtctgttatttatcattcggacagactgtgacaaatgccattttaattcaatgatatgattaaataaaggtttactgattgtttcatttcctgtatagttctataatttgatataatcccatgtggggttttttttgcttttgttgcttatgcttttggtgtcatgcccagaggaatgtcattgaggtttccctctgtttttccccagtaattctttgggttcaggtcttatgtttacatctttattacattttgaggggttttttttgtatatggtatcagataaaggtccaatttcattcctttgtatgtgaatattcatttttccaaacaccttttattgaatagattattctttttccattgtacgtttcttgacatccatgtgaaagggctctctattgtattctatttgtctttatgtctatttttatgtgattaccatgccattttgattactgtaactttgaaatatattttgaaatcagggagtgaggcttcccattttgatctttttactcaagattgctttggctatttaagatcatttgtggtccaatatgaattttaggattgttttttctaattgtgtaaagaatgccattgggatttaggtagggattgcattgactctgtagatctctttgggtagtataaacattttaacaatttaattcttccaattcaaaagggatgtcattctatt

SEQ ID NO: 100662 - DNA, 592 bp, Homo sapiens
aaatttgaaaatagcattaccttcccctcagaaatcacttccacagattgctgtaaccaggaaaatatattttattagtagcataacaatttgtctgggtcttttaacttattgtgaagaacagttctttttccatccaccactgaccagtttttttcagatgagggcctgttaccatgctctcaaagataattatttttctaggtaagtcccattgggaataattcttatgaccttgtagataagcaaagagacttaattgacaagcagacacttaacaatttatgatcactgctcaaaatgctttttgagcataatctttggcaggttcattcattagatgatggcattgctgacaaaaggatattgtggtggtttaggttagagccatttaggttcattcttttcttccacctcagctatacagatgttttctgtgcttcttgggcaatccagtaagagcccatggatgggttggtacagttcagcccacatttggaaaaaaattttaggcagttttaaaatatcttttaaaaaattgcagctcatagtaagagatacattttacattataacctaatatatatgcaaa

SEQ ID NO: 100663 - DNA, 443 bp, Homo sapiens
ccttctagaatctcagcttcttaaatcaagaaattgtgtcttgttcatgtctgaattccccaagtgaacacagtgagtgggtgcttgacaaatctttgttggtaatgagcaaaaaaggggattctgtgcccaataccatgaaatcaatgcacagaagattcaatcaatcaagaaaggtgcacagacgctggccacacacactgacatttgttttcagatgttccagtccccctgacttccaccaacccattcattcattccacaagcatttttgctggggtggaagcagggccatacagggtgtgtaagtaacagatagggtgggtttgtataatgagtataaaaaacttctagcagaagatgacaaagtatatcaagaaagggctctcttcgaaatcacaccactgcactccagcctgggtaacagagggagattccatcta

SEQ ID NO: 100664 - DNA, 247 bp, Homo sapiens
  misc_feature (13)..(13): n is a, c, g, or t
ctagaggatcctnccctggtatcccacccctcagaggctcctccagccaacctgcacaaacgattccctcctcactgcccggcacacggcaccacctgatacatggctgttgtcatccccacaacaggggtcccaggcctgctctgtcacctgctcacagactctggcaaagctctgagggcagcaagggaaggccagtgagaaaggggcggcagtgggacccaggtgtgtcagagtagcccagggg

SEQ ID NO: 100665 - DNA, 408 bp, Homo sapiens
cgctgtctcaaaaaataaataaataaataaataaaaatataaagttacaggcacctcaaggttgcctgttttttgcctactgttgcttcagttatgtactctcagtgatctgttaccttcctttccagaaactctgtgtaaatatatcttaattcaatgaacaaagccataatggagacattggaggcattagtagccagccagtgatctgttgttttgttcattcaagaggaggttatcatgaaaatactctgtgagaaacagagttccaggattacactggcttaaacaatatggaagtttgtttctcttatgtagtagtcccaagatacatagttcagggctgctgaaccatctgctgtgcaaagtagctctatgccacaaaatcttcaagacccagcaatttct

SEQ ID NO: 100666 - DNA, 225 bp, Homo sapiens
aaactcaagcattagcaccaacaagctctgagcatcatcagtctctggaaagccttctgaattagacaagggctgcctcccagcacagctacaaaacactttaaacctgaccagctaaatggataaacctagcctgcatagcttttaaactggggtctcatacagcacaggaggcctacttgcttcaagaactgaaaatccagaggatgaattgctttatctggg

SEQ ID NO: 100667 - DNA, 382 bp, Homo sapiens
ataatgtgtaccttcaaggaagcacaaacttgttcttggtgttaatgtatgacatgcaattctgcacccaaattatgtaatgctcctcattgaggcagaagtcttcaaatgggactgctcacctagtcctgccttctacagttgtgaccctaatagtcaggtagtgtccatcccatgtgcctatatgtaacaatatagagagtgtttctttaactctaggactttgtgaagatgagaaaatgtttgagaaggattgaacctcacactcagtagcagaatatttggttgaacttacaccattcatgtttttcaaggtcaaaaaaaaaatagtcaacagcagcaatttcacatgttcaacctatccctgcaagctcccatttga

SEQ ID NO: 100668 - DNA, 854 bp, Homo sapiens
acgcgccttgtgcacccccaacgagcacttccgcttcccgcagctccagcggccggccgggaacttcgctggagcagcagagttccggagcgcggcgaaggctcccacgccgcgggagggaggaaaggcgtccgcgggacggtggaggcaggcggcggggcaggcctggggagttacacccgctccgcacagcgccctgggctccgggcgcctctccgcaccgggcaggagttttggcgggagggattctggcccggccctcccactttctctgcccctcggaggcaggtggcagcacaggaccgcgtccaggccgaaggacagcggggctggctaccgtgggcagagaaacgtgtcggggacccgggttagcagccctgcaaaacaggcacccgctgatggccggtacgtcctgaatgttgcggtccgatggccggtacgtcctgaatgttggtttactttcccggaagttagggtcagagtcctaactaagaacactgtcccattcctctgttcactgtttgcctgggccattcatgtccacatacaacttcactcagaaagctgtttttgttgttgttgttgttgttgttgttgtttgagacggagtctcgctctgttgcccaggctggaggctgggcgctataacggttcactgcaagctccgcctcccgggttcacgcccttctcctgcctcagcctcccagctactcaggaggcctgaggcagaagaatcgcttgaaccaggcaggtggagggttgcgccagtgcgctccagcgtgggtgacacagcgagactcagtctcagagaaacgcggacaaccaaatttcggggcaaggggcgggggggccag

SEQ ID NO: 100669 - DNA, 600 bp, Homo sapiens
gaagaggaactctgaagtggacattaaggaatgtgagttttatcattaacagtctgattattagagtggttatttggcaaattgtgtaatgtgttcttgttttaaggaattctctatcatctagattcacagataggatttgtaagtaattgctattaaatagctaacttaatatcctgtgcaagggcatctaatgcccagcagtagagaagtttctaattggacaggccagtgagatacattgggtagtatctggagccactggtgttactttagataatacctacttaggtactacatttccaccataacacctcgtctctagcattaagctgtcctgagacacttcagtggtaaatttcatttagcttttatctcagttggaaaaatagcctttctccaagttagtagagtatacttaggctgatcttaggtgttaacaaaagatttcctaaagtttactcttaggagtatttgcattttaaaggaaatttagaatgtatgtggttgatatatttagatagtgttagtctttctgtgtaggctttaattacttctgactttgtatgacagtgccaaaagagcatgacctactattgg

SEQ ID NO: 100670 - DNA, 249 bp, Homo sapiens
acagagctggaagataatgcaggttcccaggaggtaggatgacaaggacaaaggagggcaggcctgaactattcaggggacgagctctgggctgttctgaatcgcagatgccatcctgaattgcatttgtgtcaaataggctgcagtggttcatgcatacctttgcttctgtttggcacacaccgtctgaacctcaggcatttcttaagactttaccaaaaccattcagttttcttattgtaaaatcga

SEQ ID NO: 100671 - DNA, 519 bp, Homo sapiens
cctctggaccctaagtgattctcctgcctaagcctcctgagtagctaggactacaggtgtgcaccaccacacccggctaatttttgtatttatagtagagatggggttttaccatgttggccaggctggtctcgaactcctgaccttgtgatccacccgcctcggcctcccaaagtgctgggattacagacatgagcctccgtgcccgccaacaatctattaatgagagtgcagtcctcctctcctgcagagatttgtccactggggcccagagaccagagaggctacgcttccaactggatacaacagaaaaggttcttgggaatacatggtgtcttgagctgggtcatgaaggccacatagtagtcaaggagttccaagtggagagtcctgatgggcaaaagtttggaggcagacagagggttctgtgagcagccagcaggacagttagggcagtggatgtggggttgcaatagaagaaaaggcttaagggtggttgatgtggaccgtgggctgcag

SEQ ID NO: 100672 - DNA, 349 bp, Homo sapiens
ctctgtgttaattgttgagtggaagaaaactggctacttgaatgttccaggtagttgcttctggttcatctaagttttactgttactacaaagtgttttttctcacattgtaattgtgacctatgttggcagcacaaactgtagtctaatatgccagtgctgctgggctacagaaatgccatgtctagcacggtctcctggagacataaggtagccaggacctgtggaatgagagctaatgttaggtctgtctgaatgagattctgtgcctgcctttctgttgtggaaaaggggctgccacgaaaattctctaagctcccttctagtctcctgggtctctaccaagttt

SEQ ID NO: 100673 - DNA, 518 bp, Homo sapiens
cctcctgggttcaagcgatttccctacctcagccccccaggtagctgggattacaggtgcacaccaccacgcccagctaattttttttgtatttttataaatataaaaaagatttcaccatgttggccaggctggtctcaaactcctgatctcaggtgatccacctgccttggcctcccaaagtgctgggattacaagcatgagccaccacacttggcctgatttaatatcttaagtcacctttgcctgacacttagcaagaaaaactaccaagaaatatctaatattttccttttgtttgggaataagaatctactcacaatggacacttgctggcttgttttaaaaccaagcttgcttctcactggcctgtttaagtggaaatgaagtctcagtgtggggtccgatgcttcctatggctgcatggaggaaaggagtctgggcctgaatctcccgtgttcctcatgcatgggtagaactaaagcctcttcttctgtaatgtggcagttcccattctc

SEQ ID NO: 100674 - DNA, 894 bp, Homo sapiens
gaatgcgttcctttcccagggtattaatattaatattccttgctaggaaaataatttagcaatatctctcctacttgcacgtccgtttataggctctctgcaagaagaaaaatatggctctttttgtccgacccctcaggcagtcagaccttatggttgtcttcccttgttccctaaaatcgctgtttttctgttgtttttcaaggtgcgccgatttcatattgttcaaacacagttttacaatcaatttgtacagttaacacaattatctcagtggtcctgaggtgatgtacatcctcagcttacgaagataacaggattaagagattaaagacaggcataagaaattataaaagtattatttgggaactgataaatgtccatattaaaatgaaatcttcacaatttatgttcctctgccacagctccagctggtccctccattcggggtccctgacttcccacaacagttttaggatggtagaattgcaatgcagggcaggtactggagagttagttaaatgttattggttgcagttcaggttatctaagcagtggtggaagaggctaacatggtaggttggggccagattgtggagacagctttgagtgtcacatctaaggaagttagattttatatacatagtggggaatgagtcagggttttgaagtattctataaagtagattggagggatccaagtctggaggtgattaggccacttaaaaagctcttccagaaggtgagataagtgatatgagggtctcgtttgtaaagaagacagcagcaatggcacaaagtcgacttgttttttgatcatttgcatcttcattataaaggaagtccagagaatgtatggctatgtcacattttgggcaatctctctgggctaac

SEQ ID NO: 100675 - DNA, 313 bp, Homo sapiens
ccatcaacttgtcatttacattaggtatttctccttatgctatccctcccccatgcccccaacccccgacaggccccgtgtgtgatcttcccctccctgtgtccacgtgttctcattgttcaactcccacttatgagtgagaacatgcagtgtttggttttctcttcttgtgttactttgctgaaaatatgacaccaaaagcataagcaactaaagaaaaaatagacaagttagatttcagtgagattaaaaagttttgtgttgcaaacagtaccattgagaaaatgaaaagacagaccacagaatgggagaa

SEQ ID NO: 100676 - DNA, 529 bp, Homo sapiens
tttttttttttggtctttgctatttttatatcactgcggtagcataaccctgcaccaagtacaagacagtattgcagtttgtgttgaatgtaaaactgttattaaatgaaagctaataaagcaaattcttggaaagaaggaaattgtctacattcaagacttaaaatattaaaatcaaatttgtcttctaaaaattaaaatatgaaaggactaaatgaaactgtatatttccccctcttcaaaagtcatgacttcatgtagtcaaggaccaaaatctgattagtcactcgtattaattatttttcactgttgcataaattctgtaaaagtgttcctttctcatatatcatctttgtctcttaaaactgtccttactgtgtttttggatttttgtccttttcatcagaagtcacagaaagcttttatggctgaatagttcaacctcacctaggtaaagtgccattgtatctttctaatccatatgtttcctgagcagttatgactcttgtaattttataattatatttaa

SEQ ID NO: 100677 - DNA, 165 bp, Homo sapiens
gaacgtttctggaagaaatgtcagttagtggtggatagatcgtgtcaaaggtgtgggttgctgcttatggaatggtggttctctggcccaggatgagagaattcaagtgccccagacatgcagattcctgcatatgtgcctcaagtcttttgggtcataagtcag

SEQ ID NO: 100678 - DNA, 197 bp, Homo sapiens
ctgccaataaatattctacaacatgattcttcatcaggctttgacagcagacacggtggatttctgggtggcacaacattttcaaaataccactctgcatcacggaatcagccgtgctggccgggcgcggtggctcacgcctgtaatcccacaactttgggaggctgaggcgggcggatcatgaggtcaggagatcg

SEQ ID NO: 100679 - DNA, 736 bp, Homo sapiens
tcctcagacagtctcttggtgaactttgcattagggtgtgtgggtgcagggcaaaagcccagctgtcaaggagagagtcactcattcaggatattctcctcccagttggaacggccttctttcccctcttctctgacctggggagctggtgttactcaggctctgctctggcctctctgacaagccacggcttttataggagcgctcttctccaggcagattgagttctttctctggaaaatagtacttggatttaattttgagtgcaaacatgactggtccctgcagctgagggattgcaaaggaggaaaagggtctcaacatctgctcaagtaaatacctgcattagacagaacagactaccctgccgaggaacaaattcaacctggccacctctgtggcttcatatcaagggcttatttctcactcatttaaattctgatgcagttttccgggaagcggtggcccatgcagacgcagagatctagttggctccatctcgtggctctgccatgacaacccagggcctcactgttgcagctgtgggagggtgagggggactcaggctcactcttctgtgcctcagcatgactggcacatggatgctggaatcacctctcctcacgccctgctgcacagaagcagtcacatggtcctcccttgtagcatggctaggaggagttttctccccatgtgcccatgaggaagaggaatttccatgcggcttagcacagaa

SEQ ID NO: 100680 - DNA, 425 bp, Homo sapiens
tggagaatagtggggctgacatctctgcgattcttctagctgtttctccatgctatttgtcttaaagttcacaaaaatggctacagtattttatatcatatccacattcaaaacagatgaaggtgatggtggcaggaggagtggggtgggagatttcagtgtaagtaatttccatccctctatcaacaaaagcaaaagtgtttgctgagtccatgtcagacatctgtttacttctctgtgctgaaaatgatgacatataatcatataaggaaaggtgggaaaatgaggaccttacctcaggcaggacaaacagctggcccttcagcgagggctttcttagggaggaagaggggctaaatgtcatctaggtcactaatattggctgctacaatatgcctcatactgtcttatcagcttcaatccac

SEQ ID NO: 100681 - DNA, 121 bp, Homo sapiens
atcaggttcaagttccccattctctgcaggtctttctcccttagagctatctccctactcctaccttaccttcctattatgatttggcagtgaatcctgtatcacctggctgacagatctt

SEQ ID NO: 100682 - DNA, 261 bp, Homo sapiens
atttctcatctctgatgtttatagtgcacttaaaatgttccaggcatctaatgcttcctgtgtattgcatttaattcttacccccatgaggtaggtgccatcattaaaacctgatttaaggatgagaggcttgaagcttagctgaagttacacagctagtcagtgatgagccaggatttgtactcagatttgaatgacttcagaggccacatttttttttttttttttttttttgagacagggtcttactctgtcgcccag

SEQ ID NO: 100683 - DNA, 80 bp, Homo sapiens
gagccccttgaagacatctgagagttcacgccacaggctgtgtttgagcacagggctctgcctgggtgggccagatggag

SEQ ID NO: 100684 - DNA, 223 bp, Homo sapiens
aattccagtcgttaagtaggtaagtctaaacaacatattagtggtcatttgtgaggtgtttgataggtggggctgtatttctctcaaacatttaaaatatcccacagcaaccttgtgagtttgttccctgtggtgtcccagggtgacctgatgggaaatttgagaaccatggcataggtcgctaaagatttttcatctggtgaattaaatatttgattttgta

SEQ ID NO: 100685 - DNA, 338 bp, Homo sapiens
cccagccagggaagcttctcaggccgggattcactgagctatagttggagggcagagatatggaacctctgcccagggccagtgttctcgatcgaagcaccgggagctgtctccccacgccccactgtggcacttggcggctgtccagagacaggcagctctcaccaaggcggcgcagacgtgggcctggtgccccatggctgcactgagccatcatgctgtatgcccgggaagtgggcttggcgacagcagtgaagggctgcagttcctggccgccaccagcaccctgaccctggggctctgccacagagccacgcctggggtggagggtgagctgg

SEQ ID NO: 100686 - DNA, 165 bp, Homo sapiens
ttctacttccagtcttgcaatacccttgccattttccaaacaaaggcttattggcgtcatcctttagggtatgcctgctctgaagtaccagttttggagacgtgttttttgcttgctttgtcaaaatctataacctgatcatagtgattgtctcttagcccttcc

SEQ ID NO: 100687 - DNA, 347 bp, Homo sapiens
ctagactaagctgggctgtaataacaaacatgactgaaatttctgtgacttcatacataatttttttttttctttcccacacaaatgtcacactggatgcattggctttctaggacatcttccttttaagcagtgactcgggaatcgaggccacttccatcctgtaacgacgccatctggagcatgtggcttccaggggagcagtggctgaggccctgcagtggcttctcactgctacagtccagagttgcacacagcacttctgctcatagtccatcagccaggagctagtcatgtggccacctcgctgcaaggatccaggaaggcagagtgcgggtgagcactag

SEQ ID NO: 100688 - DNA, 706 bp, Homo sapiens
tgtcgcacggagttgacatatagctgacaaggcctcgaggtagcgtgggtcggtgtagtgtcctgttatgcttcggggatatctactggccttgtagattagttagaaagaatttcctcctcttctgtttttttgaaatagtttcagaagaattggtgttagtttttacttataagttaggtagaattcagcagtacagccatctctggtcctgggcttttctttgttgggagactttttattactgattcaatctcattactcattataaatctgttcgggtgttttatttctttctggttcaatctgggtaatttgtacatgtccaagaatttatccattttctttaggtttttcaatttgttagcctatagttgttcataatagtctctaatgatcctttatgttcctgtaacatcagttgtaatgtctctttttttgtttctgattttattttttagagtcttttctcttttttccttggttagtgtggctaatggttcattgattttatcttttcaaaaaaaacaaattttgtttcattgatcctatttttttagtctctattttattaagttctctgatttttattatttatcttttcctactaattttggtgttttttcttgcttttatatttccttgaggggtattactaggttgttgatttgaaatcttttttttaatgtagatatttattagtata

SEQ ID NO: 100689 - DNA, 991 bp, Homo sapiens
caggattttgttatctatttgggatccccagagattccatatgaatggatgaagttttgctctgtccccaagctggaatgcagtggtgcaatcttggttcactgcaacctctgcctcccaggttcaagcgattctcctgtctcagcctcctgagtagctgggattacaggtgcatgccaccatgcccagctaatttttatatttttagtagagactgggtttcaccatgttggccaggctggtctcgaactcccgacctcaggtgatccgactgcctcagcctcccaaagtgctgggattacaagcatgagccactgcgcccagacttaatgatcattctttaacagccctttcttgatttgtgtgtttgtatgtgtgtgtgtgtgtgcgtgggtgtgaatgtaatgcatgtagtggaggtgtttcttatatattatttttccttttccttttttcttatgtctattactactccattttataacatttatattctatattagcaaaattgttatctcaaatttaatgtttgtaaggttcttgtcactaaccaatctatctttatagtttctctgtcagcagtttttttttataacagagttatttacttttttattcatgcttcttttcattcatcatcttttggtgtgtttctctctgtagtggatatcatgtttgctcatcgtttgaaatgtcttgttatatataacatttgtaagaaacatgttgaaattttatgctcacattttcaagctgcatttcaagctctttctcttggtctgtaataatcaatttataaggttatttcattcacaaactaaacttaaaaaattctgatatggcatgcttgttcatttgtatgtctggattctggtcatacttactctttatttttatttgtacacataaattatacttcatgaatatatattttcattcattaagaataaataaaacattaataaatcagcattctcttactttcaaagga

SEQ ID NO: 100690 - DNA, 302 bp, Homo sapiens
taatttttgtattttgggtagagacgaggtttcaccatgttggccagactggtctcgaacacctgacctcaggtgatccacctgccttggcctcccaaaatgctgagattacagccaccacacacagcccaaaaaatctttgttcggtgggcaaccttcgtctgtgtgtgttctgcactcatgggtgttccctcccacccccatggtcaagttagaatgtgcacagaatagtgtccacccagggtcttaagggctatgtggtgaagtgaacctgaacttctccagcctggttccactttcca

SEQ ID NO: 100691 - DNA, 310 bp, Homo sapiens
gagagaaaatctgatgatgcaagagtgagagggaaggattactggaataatgtccctgagagggcaagaagggaatcccgtctataagtggagggattggccatagctgtagggactgttccttcttagaagtaagagggaagccagcatattgggacacagatgaaattagttcagtagatttgataggagattgcggaagctttttcttgattggttttcattcaccagtgaaatggaaagcaaggcattagctaagattgaagagggaaatgggatccgaagtgaggagaaaggggtgagacactca

SEQ ID NO: 100692 - DNA, 464 bp, Homo sapiens
ccccaaaattactccacccacaatcttccccaactcagtaaatagcaaccaatcttccacacattgtagaagttcattgtctgtcttctccacaagaatgtaatatccatgagcgcaggactcactgctgaatcaccagggcagtgatacagcaacaggagaggtcttgaactcctggcctcaagtgatctgcccacttcagcctcccaaagtgctgggattataggcatgagccaccacacgcagccctccagctcttttaaataagcatcctccatgaagaatttctgcaaatcatcaagctgttaaatgctatatgctgaatgtacacaagcccctaccagtctgagagtcctgtgtaaataattttctctttcaaatcctgatgaaaaagggactcaaagagaatccaaaccacagcctgcaggcttcctcatgcttctgcttcactactgagccagcca

SEQ ID NO: 100693 - DNA, 2734 bp, Homo sapiens
ggcccagccggggagggaggaaggaggagggacgggaggagggacgggaggagggagggcgggcaggcgccagcccagagcagccccgggcaccagcacggactctctcttccagcccaggtgccccccactctcgctccattcggcgggagcacccagtcctgtacgccaaggaactggtcctgggggcaccatggtttcggcggcagcccccagcctcctcatccttctgttgctgctcctggggtctgtgcctgctaccgacgcccgctctgtgcccctgaaggccacgttcctggaggatgtggcgggtagtggggaggccgagggctcgtcggcctcctccccgagcctcccgccaccctggaccccggccctcagccccacatcgatggggccccagcccacaaccctggggggcccatcaccccccaccaacttcctggatgggatagtggacttcttccgccagtacgtgatgctgattgctgtggtgggctccctggcctttctgctgatgttcatcgtctgtgccgcggtcatcacccggcagaagcagaaggcctcggcctattacccatcgtccttccccaagaagaagtacgtggaccagagtgaccgggccgggggcccccgggccttcagtgaggtccccgacagagcccccgacagcaggcccgaggaagccctggattcctcccggcagctccaggccgacatcttggccgccaccagaacctcaagtcccccaccagggctgcactgggcggtggggacggagccaggatggtgggggcagggcgcagaggaagaggagaagggcagccaggagggggaccaggaagtccagggacatggggtcccagtggagacaccagaggcgcaggaggagccgtgctcaggggtccttgagggggctgtggtggccggtgagggccaaggggagctggaagggtctctcttgttagcccaggaagcccagggaccagtgggtccccccgaaagcccctgtgcttgcagcagtgtccaccccagtgtctaacagtcctcccgggctgccagccctgactgtcgggcccccaagtggtcacctccccgtgtatgaaaaggccttcagccctgactgcttcctgacactccctccttggcctccctgtggtgccaatcccagcatgtgctgattctacagcaggcagaaatgctggtccccggtgccccggaggaatcttaccaagtgccatcatccttcacctcagcagccccaaagggctacatcctacagcacagctcccctgacaaagtgagggagggcacgtgtccctgtgacagccaggataaaacatccctcaaggctgggtgtggaggctcacacctgtaatctcagcattttgggaggccaagtgcggacatcacttgagaccaggagttccaaaccagccctggcaacattgtgagacccatctctataaaaacaaaaaacagtccactaaatcagccacattaattgggaatcatatgtcacaggtcatttgtggggcaaacatcactgcttttccatcaagggagcaaagaataagtgggagttttggaagagtttggatgagagacgccaaggtgcccagcgttcgtaaggcaacatgcagcctggcgtgaagcagtattttgaaactgcaaatggttcccttcttgtgtcctttcaatgctgaatattttagtgtcattctgcctgtgctcagagctccagcagcagaagtgtgtgtggttaattaggacacttctgtgagaggacccctgcacacattacgacaggtccctaaatgagcatttcccaaactaggttccccgaggcactctacggaaacaagatttttttttttgagacggagtctcggtctgtcacccaggctggagtgcagtggtgcaatcttggtgcaatcttggctcagtgcaatccgcctcccaggttcaagcgattctcccgcctcagtagctgggattacaggtgcccaccactgcgcccagctaaattttgtatttttagtagagatggggcttcaccatgttggccaggctggtctggaactcctgaccttcaggtgatccacctgcctctgcctcccaagtgctgggattacaggcgtgagccaccgtgcccggcccaaactactttttaaaacagctacagggtaaaatcctgcagcacccactctggaaaatactgctcttaattttcctgaaggtggccccctgtttctagttggtccaggattagggatgtggggtatagggcatttaaatcctctcaagcgctctccaagcacccccggcctgggggtgagtttctcatcccgctactgctgctgggatcaggttgaatgaatggaactcttcctgtctggcctccaaagcagcctagaagctgaggggctgtgtttgaggggacctccaccctggggaagtccgaggggctggggaagggtttctgacgcccagcctggagcaggggggccctggccaccccctgttgctcacacattgtctggcagcctgtgtccacaatattcgtcagtcctcgacagggagcctgggctccgtcctgctttagggaggctctggcaggaggtcctctcccccatccctccatctggggctcccccaacctctgcacagctctccaggtgctgagatataatgcaccagcacaataaacctttattccggcaaaaaaaaaaaa

SEQ ID NO: 100694 - DNA, 2943 bp, Homo sapiens
ggcccagccggggagggaggaaggaggagggacgggaggagggacgggaggagggagggcgggcaggcgccagcccagagcagccccgggcaccagcacggactctctcttccagcccaggtgccccccactctcgctccattcggcgggagcacccagtcctgtacgccaaggaactggttcttgctctgtcacccaggctggagtgcagtgccaactccgctcactgcagcctcaacttcccgggctcaggcgattctcccacctcggtctcctcggtacctgggaccacaagtgtgcgccactaggcctggctaatttttggtgtttttagtagagacagaattttgccgtgttgaccaggctggtcttgaactcctgagctcaggtcctgggggcaccatggtttcggcggcagcccccagcctcctcatccttctgttgctgctcctggggtctgtgcctgctaccgacgcccgctctgtgcccctgaaggccacgttcctggaggatgtggcgggtagtggggaggccgagggctcgtcggcctcctccccgagcctcccgccaccctggaccccggccctcagccccacatcgatggggccccagcccacaaccctggggggcccatcaccccccaccaacttcctggatgggatagtggacttcttccgccagtacgtgatgctgattgctgtggtgggctccctggcctttctgctgatgttcatcgtctgtgccgcggtcatcacccggcagaagcagaaggcctcggcctattacccatcgtccttccccaagaagaagtacgtggaccagagtgaccgggccgggggcccccgggccttcagtgaggtccccgacagagcccccgacagcaggcccgaggaagccctggattcctcccggcagctccaggccgacatcttggccgccaccagaacctcaagtcccccaccagggctgcactgggcggtggggacggagccaggatggtgggggcagggcgcagaggaagaggagaagggcagccaggagggggaccaggaagtccagggacatggggtcccagtggagacaccagaggcgcaggaggagccgtgctcaggggtccttgagggggctgtggtggccggtgagggccaaggggagctggaagggtctctcttgttagcccaggaagcccagggaccagtgggtccccccgaaagcccctgtgcttgcagcagtgtccaccccagtgtctaacagtcctcccgggctgccagccctgactgtcgggcccccaagtggtcacctccccgtgtatgaaaaggccttcagccctgactgcttcctgacactccctccttggcctccctgtggtgccaatcccagcatgtgctgattctacagcaggcagaaatgctggtccccggtgccccggaggaatcttaccaagtgccatcatccttcacctcagcagccccaaagggctacatcctacagcacagctcccctgacaaagtgagggagggcacgtgtccctgtgacagccaggataaaacatccctcaaggctgggtgtggaggctcacacctgtaatctcagcattttgggaggccaagtgcggacatcacttgagaccaggagttccaaaccagccctggcaacattgtgagacccatctctataaaaacaaaaaacagtccactaaatcagccacattaattgggaatcatatgtcacaggtcatttgtggggcaaacatcactgcttttccatcaagggagcaaagaataagtgggagttttggaagagtttggatgagagacgccaaggtgcccagcgttcgtaaggcaacatgcagcctggcgtgaagcagtattttgaaactgcaaatggttcccttcttgtgtcctttcaatgctgaatattttagtgtcattctgcctgtgctcagagctccagcagcagaagtgtgtgtggttaattaggacacttctgtgagaggacccctgcacacattacgacaggtccctaaatgagcatttcccaaactaggttccccgaggcactctacggaaacaagatttttttttttgagacggagtctcggtctgtcacccaggctggagtgcagtggtgcaatcttggtgcaatcttggctcagtgcaatccgcctcccaggttcaagcgattctcccgcctcagtagctgggattacaggtgcccaccactgcgcccagctaaattttgtatttttagtagagatggggcttcaccatgttggccaggctggtctggaactcctgaccttcaggtgatccacctgcctctgcctcccaagtgctgggattacaggcgtgagccaccgtgcccggcccaaactactttttaaaacagctacagggtaaaatcctgcagcacccactctggaaaatactgctcttaattttcctgaaggtggccccctgtttctagttggtccaggattagggatgtggggtatagggcatttaaatcctctcaagcgctctccaagcacccccggcctgggggtgagtttctcatcccgctactgctgctgggatcaggttgaatgaatggaactcttcctgtctggcctccaaagcagcctagaagctgaggggctgtgtttgaggggacctccaccctggggaagtccgaggggctggggaagggtttctgacgcccagcctggagcaggggggccctggccaccccctgttgctcacacattgtctggcagcctgtgtccacaatattcgtcagtcctcgacagggagcctgggctccgtcctgctttagggaggctctggcaggaggtcctctcccccatccctccatctggggctcccccaacctctgcacagctctccaggtgctgagatataatgcaccagcacaataaacctttattccggcaaaaaaaaaaaa

SEQ ID NO: 100695 - DNA, 1959 bp, Homo sapiens
ggcccagccggggagggaggaaggaggagggacgggaggagggacgggaggagggagggcgggcaggcgccagcccagagcagccccgggcaccagcacggactctctcttccagcccaggtgccccccactctcgctccattcggcgggagcacccagtcctgtacgccaaggaactggtcctgggggcaccatggtttcggcggcagcccccagcctcctcatccttctgttgctgctcctggggtctgtgcctgctaccgacgcccgctctgtgcccctgaaggccacgttcctggaggatgtggcgggtagtggggaggccgagggctcgtcggcctcctccccgagcctcccgccaccctggaccccggccctcagccccacatcgatggggccccagcccacaaccctggggggcccatcaccccccaccaacttcctggatgggatagtggacttcttccgccagtacgtgatgctgattgctgtggtgggctccctggcctttctgctgatgttcatcgtctgtgccgcggtcatcacccggcagaagcagaaggcctcggcctattacccatcgtccttccccaagaagaagtacgtggaccagagtgaccgggccgggggcccccgggccttcagtgaggtccccgacagagcccccgacagcaggcccgaggaagccctggattcctcccggcagctccaggccgacatcttggccgccaccagaacctcaagtcccccaccagggctgcactgggcggtggggacggagccaggatggtgggggcagggcgcagaggaagaggagaagggcagccaggagggggaccaggaagtccagggacatggggtcccagtggagacaccagaggcgcaggaggagccgtgctcaggggtccttgagggggctgtggtggccggtgagggccaaggggagctggaagggtctctcttgttagcccaggaagcccagggaccagtgggtccccccgaaagcccctgtgcttgcagcagtgtccaccccagtgtctaacagtcctcccgggctgccagccctgactgtcgggcccccaagtggtcacctccccgtgtatgaaaaggccttcagccctgactgcttcctgacactccctccttggcctccctgtggtgccaatcccagcatgtgctgattctacagcaggcagaaatgctggtccccggtgccccggaggaatcttaccaagtgccatcatccttcacctcagcagccccaaagggctacatcctacagcacagctcccctgacaaagtgagggagggcacgtgtccctgtgacagccaggataaaacatccaagtgctgggattacaggcgtgagccaccgtgcccggcccaaactactttttaaaacagctacagggtaaaatcctgcagcacccactctggaaaatactgctcttaattttcctgaaggtggccccctgtttctagttggtccaggattagggatgtggggtatagggcatttaaatcctctcaagcgctctccaagcacccccggcctgggggtgagtttctcatcccgctactgctgctgggatcaggttgaatgaatggaactcttcctgtctggcctccaaagcagcctagaagctgaggggctgtgtttgaggggacctccaccctggggaagtccgaggggctggggaagggtttctgacgcccagcctggagcaggggggccctggccaccccctgttgctcacacattgtctggcagcctgtgtccacaatattcgtcagtcctcgacagggagcctgggctccgtcctgctttagggaggctctggcaggaggtcctctcccccatccctccatctggggctcccccaacctctgcacagctctccaggtgctgagatataatgcaccagcacaataaacctttattccggcaaaaaaaaaaaa

SEQ ID NO: 100696 - DNA, 1690 bp, Homo sapiens
ggcccagccggggagggaggaaggaggagggacgggaggagggacgggaggagggagggcgggcaggcgccagcccagagcagccccgggcaccagcacggactctctcttccagcccaggtgccccccactctcgctccattcggcgggagcacccagtcctgtacgccaaggaactggtcctgggggcaccatggtttcggcggcagcccccagcctcctcatccttctgttgctgctcctggggtctgtgcctgctaccgacgcccgctctgtgcccctgaaggccacgttcctggaggatgtggcgggtagtggggaggccgagggctcgtcggcctcctccccgagcctcccgccaccctggaccccggccctcagccccacatcgatggggccccagcccacaaccctggggggcccatcaccccccaccaacttcctggatgggatagtggacttcttccgccagtacgtgatgctgattgctgtggtgggctccctggcctttctgctgatgttcatcgtctgtgccgcggtcatcacccggcagaagcagaaggcctcggcctattacccatcgtccttccccaagaagaagtacgtggaccagagtgaccgggccgggggcccccgggccttcagtgaggtccccgacagagcccccgacagcaggcccgaggaagccctggattcctcccggcagctccaggccgacatcttggccgccaccagaacctcaagtcccccaccagggctgcactgggcggtggggacggagccaggatggtgggggcagggcgcagaggaagaggagaagggcagccaggagggggaccaggaagtccagggacatggggtcccagtggagacaccagaggcgcaggaggagccgtgctcaggggtccttgagggggctgtggtggccggtgagggccaaggggagctggaagggtctctcttgttagcccaggaagcccagggaccagtgggtccccccgaaagcccctgtgcttgcagcagtgtccaccccagtgtctaacagtcctcccgggctgccagccctgactgtcgggcccccaagtggtcacctccccgtgtatgaaaaggccttcagccctgactgcttcctgacactccctccttggcctccctgtggtgccaatcccagcatgtgctgattctacagcaggcagaaatgctggtccccggtgccccggaggaatcttaccaagtgccatcatccttcacctcagcagccccaaagggctacatcctacagcacagctcccctgacaaagtgagggagggcacgtgtccctgtgacagccaggataaaacatccctcaaggctgggtgtggaggctcacacctgtaatctcagcattttgggaggccaagtgcggacatcacttgagaccaggagttccaaaccagccctggcaacattgtgagacccatctctataaaaacaaaaaacagtccactaaatcagccacattaattgggaatcatatgtcacaggtcatttgtggggcaaacatcactgcttttccatcaagggagcaaagaataagtgggcacgagagagagaaattatgagattgagagagagagagagagagagagagaaagagaagagagagagaaagagaaagagacagagaaaagtattatgtgtgtaaagccc

SEQ ID NO: 100697 - DNA, 1848 bp, Homo sapiens
ggcccagccggggagggaggaaggaggagggacgggaggagggacgggaggagggagggcgggcaggcgccagcccagagcagccccgggcaccagcacggactctctcttccagcccaggtgccccccactctcgctccattcggcgggagcacccagtcctgtacgccaaggaactggtcctgggggcaccatggtttcggcggcagcccccagcctcctcatccttctgttgctgctcctggggtctgtgcctgctaccgacgcccgctctgtgcccctgaaggccacgttcctggaggatgtggcgggtagtggggaggccgagggctcgtcggcctcctccccgagcctcccgccaccctggaccccggccctcagccccacatcgatggggccccagcccacaaccctggggggcccatcaccccccaccaacttcctggatgggatagtggacttcttccgccagtacgtgatgctgattgctgtggtgggctccctggcctttctgctgatgttcatcgtctgtgccgcggtcatcacccggcagaagcagaaggcctcggcctattacccatcgtccttccccaagaagaagtacgtggaccagagtgaccgggccgggggcccccgggccttcagtgaggtccccgacagagcccccgacagcaggcccgaggaagccctggattcctcccggcagctccaggccgacatcttggccgccaccagaacctcaagtcccccaccagggctgcactgggcggtggggacggagccaggatggtgggggcagggcgcagaggaagaggagaagggcagccaggagggggaccaggaagtccagggacatggggtcccagtggagacaccagaggcgcaggaggagccgtgctcaggggtccttgagggggctgtggtggccggtgagggccaaggggagctggaagggtctctcttgttagcccaggaagcccagggaccagtgggtccccccgaaagcccctgtgcttgcagcagtgtccaccccagtgtctaacagtcctcccgggctgccagccctgactgtcgggcccccaagtggtcacctccccgtgtatgaaaaggccttcagccctgactgcttcctgacactccctccttggcctccctgtggtgccaatcccagcatgtgctgattctacagcaggcagaaatgctggtccccggtgccccggaggaatcttaccaaaagtgctgggattacaggcgtgagccaccgtgcccggcccaaactactttttaaaacagctacagggtaaaatcctgcagcacccactctggaaaatactgctcttaattttcctgaaggtggccccctgtttctagttggtccaggattagggatgtggggtatagggcatttaaatcctctcaagcgctctccaagcacccccggcctgggggtgagtttctcatcccgctactgctgctgggatcaggttgaatgaatggaactcttcctgtctggcctccaaagcagcctagaagctgaggggctgtgtttgaggggacctccaccctggggaagtccgaggggctggggaagggtttctgacgcccagcctggagcaggggggccctggccaccccctgttgctcacacattgtctggcagcctgtgtccacaatattcgtcagtcctcgacagggagcctgggctccgtcctgctttagggaggctctggcaggaggtcctctcccccatccctccatctggggctcccccaacctctgcacagctctccaggtgctgagatataatgcaccagcacaataaacctttattccggcaaaaaaaaaaaa

SEQ ID NO: 100698 - DNA, 1486 bp, Homo sapiens
ggcccagccggggagggaggaaggaggagggacgggaggagggacgggaggagggagggcgggcaggcgccagcccagagcagccccgggcaccagcacggactctctcttccagcccaggtgccccccactctcgctccattcggcgggagcacccagtcctgtacgccaaggaactggtcctgggggcaccatggtttcggcggcagcccccagcctcctcatccttctgttgctgctcctggggtctgtgcctgctaccgacgcccgctctgtgcccctgaaggccacgttcctggaggatgtggcgggtagtggggaggccgagggctcgtcggcctcctccccgagcctcccgccaccctggaccccggccctcagccccacatcgatggggccccagcccacaaccctggggggcccatcaccccccaccaacttcctggatgggatagtggacttcttccgccagtacgtgatgctgattgctgtggtgggctccctggcctttctgctgatgttcatcgtctgtgccgcggtcatcacccggcagaagcagaaggcctcggcctattacccatcgtccttccccaagaagaagtacgtggaccagagtgaccgggccgggggcccccgggccttcagtgaggtccccgacagagcccccgacagcaggcccgaggaagccctggattcctcccggcagctccaggccgacatcttggccgccaccagaacctcaagtcccccaccagggctgcactgggcggtggggacggagccaggatggtgggggcagggcgcagaggaagaggagaagggcagccaggagggggaccaggaagtccagggacatggggtcccagtggagacaccagaggcgcaggaggagccgtgctcaggggtccttgagggggctgtggtggccggtgagggccaaggggagctggaagggtctctcttgttagcccaggaagcccagggaccagtgggtccccccgaaagcccctgtgcttgcagcagtgtccaccccagtgtctaacagtcctcccgggctgccagccctgactgtcgggcccccaagtggtcacctccccgtgtatgaaaaggccttcagccctgactgcttcctgacactccctccttggcctccctgtggtgccaatcccagcatgtgctgattctacagcaggcagaaatgctggtccccggtgccccggaggaatcttaccaagtgccatcatccttcacctcagcagccccaaagggctacatcctacagcacagctcccctgacaaagtgagggagggcacgtgtccctgtgacagccaggataaaacatccctcaaggctgggtgtggaggctcacacctgtaatctcagcattttgggaggccaagtgcggacatcacttgagaccaggagttccaaaccagccctggcaacattgtgagacccatctctataaaaacaaaaaacagtcca

SEQ ID NO: 100699 - DNA, 940 bp, Homo sapiens
gtcttctaatagatctgaattacaacatttccaaatctgagtcaggtagtatactatgattgcatttgctttcctgtacaatgtttagttcctcctggagtcaataacggccttgattttatttgcctagcttgctcaatacttatagttaattctctccaggctttctgacagaaccataaaacctctctaaataaggtcaatatcttccattttttcttagatttccttaacatagctgctgctcccatctgttctggctgtctcacatgccaaagcaccgtttttctagtacttctttcactaacatcttagggattcattttgcttttatcttgtgttggcatcttatttcctggctcccctgtcaatattttcttagtttattcttttattttgttggaacacaacctccagtagtttctttggaaaaaatgagagatacaagttttgaaaatttagatgtctgaaaatgcttttattctactctcaatattgattgaaggtttggctgggtataaaattctatatttattctttaaagagccttctcactaaaatatagccagaccctagaaaaattgccttaaatacaatttctatttttgtaatcatactcacaaaacataaggaaaatgaaaataacaaacttaggaaactattctttcatcattgagatctataatttaggtcaagtattcccagcattggctttacactagaatcagctgtggaacttacttaaaaaaaaaaagaaaactgatactccaaaatctgatttaatttgtctgcaatagggatgggtatagtttgttggtttttaaggtttttcgtttgcttgtttgtttgtttgtttttagtgagagacttctcccagtcagatgtagaatactgaattttttatgtgtgttttaaaatatacataacctaaaatttatca

SEQ ID NO: 100700 - DNA, 219 bp, Homo sapiens
ggactttctaatctattctggaagtggacatcaattaaataattacacaagcacgcatattattacaacccattttataagtgataaaagcatgggatagacggggcactctaggctgaaggtcagagaagacttcgttgtagaagtagtaacatttgctcagagatctcaatgatgagtacacattaactgaggaaggagaatggggagcgaggcatg

SEQ ID NO: 100701 - DNA, 301 bp, Homo sapiens
aataggtgtatgaaaatatattcagtaaaaattaaaagaaaatggagaattttaacctactttaatattaacagacctcagaattattgatcagatgtagtctgattcacttgagggagcgttttggtaacattgtcaggagacagttttctgagggtccttcatttagctgcaggttttgtgagcaaagcgagcaaatcactgcctgtcctttgttccggaatatcttttagaggattctggtgtagcagacagctacagatgcagtgtcttcctctggagtcaaggacaggtttgctta

SEQ ID NO: 100702 - DNA, 1076 bp, Homo sapiens
cccgcccgcaaggcttttcgggagtcacggtctgagggcgacccgggcgacccggtcgcccgtgcccggctgccactgaccgctccaacgccgccagggacgacccgccagctgcctccggagccgagcaggccccgaaccttcccattcctagatttccagccgcacaacagccgcggtgcccctggctcgacgcagctggccggaggcgcggagctggtcgttcgtcccgcccgccgttccgcgcccctctcccggctcttgtttcctcgcctcttaacgaggcctttgtgaggaaggttgctgggccttgggactctgacgatcggctggaaaccaggcctggccctgtttcagcatccccgcgtgccaagccctgggccggcgtgcgggtccctgcccctgcgaggaagctgggacttttgcaggcctgggtggagacgtgtacataacagaggaagagtgtggaggattggaggactcagggcagcacggcagaggtgcatgcaggtccccggtcggactggagaatgggcggtgggtttcttgagctccagtccctgagctcgactttgacgtgggtttagcaaccaggaaaaaagcccaccttgtccctgctgcctgagaatacccagaccttagtccatggccagcatctctggtccctcggcaccctcaggcaacgtgaaggtcaccccaaatgccttgggttacattgtttccttacagtgagtttgtttgttttagtggcgcgatctcggctcactgcaagctctaacctcctgggttcacgtgattctcctgcctcagcctcccgaatagcgggtgtggtggcatgtccctgtggtcccagctactcaggaggctgaggcagcaggattacttgagcccaggaggtcatggctgcagtaagctgtgattgcacgtcagcttgattgacagaatgagaccctctctctctcaaaaaaaaaaaatcagatttagaaaaagtaatattagtaatttgtattttacagcctaaggaaaagttagggttttctgtttgtaactgtaatatattgaagatgtgatgttga

SEQ ID NO: 100703 - DNA, 729 bp, Homo sapiens
atatgaaaaaaaatacttacacacacgtttattgtctatgtgcctatttgtatatccgcaccatgctgttttggtgacaatagccttatagtcaatatagacaatagccttatagtttgaagtaaggtaatgtgatgcctccagatttgttctttttgcttagtcttgctttggctatgtgggctctaagagaatacaattttgttattttcaatcacatggctaaacctggcagacagtatattagctgaaattagccaggcacagaaggataaatatctcatgatttcacttagacatagattctaaataacttaatctcattgaagtagagagtaacatggtgacaaccagatgctaagatatttagaaaaaaggggttggaaagttatctgttaaagaatacataattatagtttgttaggaggaatgagtttaagagatttattttgcaggctggtgactttaattcataataacgtatttttgaaaaatgtgaagacaagattctctcactagaaaaatgttaactatgtgaggtaaagcaattaagaattaatcatttgacaatgtatacatacttcaaaacatgtttggccaggcatggtggctcatctctgtaatcccagcactttgggaggccaaggcaggtggatcacaaggtctagagaccaaggccagcctggccaacatggtgaaaccccatctctattaaaatgacaaaaatta

SEQ ID NO: 100704 - DNA, 166 bp, Homo sapiens
aggctcatctgaggaaagcaagggtggcactctctcaaaggtaggtgaacatgctgactgttctgaaatatttatataatggtcatataaagaatgctatgctttctcagtgtagatgttaaaaacaaaactaaatgcagaagtagaaattacatgaatacagaat

SEQ ID NO: 100705 - DNA, 107 bp, Homo sapiens
gaggttggtcctctgcacttctggtctccacttgacacccaggaggaggtaccatcacaccccaggacctgctgtgctggcgttgtgtttctgccggagtcacctct

SEQ ID NO: 100706 - DNA, 517 bp, Homo sapiens
cggacgcgtgggtcgactgtgatgctagcactttgggaggctaaagcaggtggactgcttgaactcctgttcaagaccagtctgggtaacatggtgaaccttgtctctgcagaaaatacaaaaattagccagatgcggttctgcacacctgtggtctcaactgcttgggaggctgggatgaggcaagagaattgcttaagcccaggagtttgagaccaggctagacagcatagtgagaccccatctcttaaaaaaaaaaatgcttggcctcccaaagtgctggaattactctgtctcaaatcaaacaaacaaaccgatagaattagggagctctatgagtgtagagttgccctactagtcctgcatggcttctaatggactctatttatgtgaaagagacaaatttccagtttaagccactgtaatttacatttgttgttgttgttgagatggagtttcgcactccagcctgggagacagagcgagactccgtctcaaaagacaaaaagaaaaaaaa

SEQ ID NO: 100707 - DNA, 526 bp, Homo sapiens
cacaaaaggcccctggacctaagtgagaactagaggcttctgctcccagggaaggagctgatttgacttctgctaccccttgctgggctcagcattgctccccgatgcaggcctgtcagcaagggaaggggaagacactgctgcaccctgcagccctctctctgctgtgtctgttccttcctacacggggctgctcccaggctctggttctcctggcccctgaaaatgttaccttaggccagggattctcttaggctggagagaacaatatggagattctccttcagggaggggaggctgctgggctcgcccagtctgagagttagagtgctgggcttgtcccaggaagggaaatgaaggcttggtgggggagggaagacagcccttagtgctgacttgtccacctgatgggaggtgggatgagggggtctgggtctaggcccttcggggctgggctaggctaggggatctcgctgcccatgactatgggttggggccctgtggtgagatgcttcctgcttcccta

SEQ ID NO: 100708 - DNA, 331 bp, Homo sapiens
cacatccaggtcaagacaaaaagcagcacacccactttccatcccccatgcggacgggctgctgtctagtccatcctttctcccagcatgcaaacttttaccaggtcctgttttaggcagggctcttgattcctggtatcatctctagtctcggaggagatgcagtcacgactcaaacccttgggctttgaggccaggaagcacccctcaacacctctcccaacccccaggcctagacgagcctcagctggagctcaccgtccacactgcctgagatccctggggatttcccttacattccatgagcttagctcttctttgaaaggacgct

SEQ ID NO: 100709 - DNA, 425 bp, Homo sapiens
tagtagagacggggtttcaccgtgttagccaggatggtctcgatctcctgacctcgtgatccgcccgtctcggcctcccaaagtgctggtaggttgattattaataatgctgctataaacatctatgcgcaggtttttctgaggacatgttttcaacttaattgggtaaatacatagccgcgaggttgctgattgcgtagtgaaaccatcgtgctatttatgaaattgcaaacattcgtgcaaagtgtctaaaccttttgcattcccactagcaatgaacaagagttcctgctgctcctcctcctagtcagcatttgatgttagtattctaatgttttgccattctaataggattgtagtggtatctcatggttgttttagtttaaattccctagtgacgtatgacgctgagcatattttcatat

SEQ ID NO: 100710 - DNA, 422 bp, Homo sapiens
ggaatgtgagattgggacggtaggggggcgaggcagagcctagttggatatgtcaagtgaccagatagctgccaatctgcaagcagttattaatgaagtttgtaggcacagaccgctgaatttgggtccctttgtggtacgtgctttccttcgtagttcaacaagtgaaggtttattactgaagattgatccattgttgcctaaagaagtaaaaaatgaagaaagtgaaaaagaagatgcctaaatgtggtgaattgtgaaattactttcagtggtttaagaagcaatggagaaaatgataatacagcataatttttacatttgatgtcttgttattgatcatacttgaaagtgaactttaacattgaaaaatcgtacagtcatttcaagaataagaaaataaaattttctctttgtctgaa

SEQ ID NO: 100711 - DNA, 537 bp, Homo sapiens
cgagttcaagcaattctcctgcctcagcctcccaagtagctgggattacagattccattggccgtgacatccccaaaatgcttgaattatttaaaaatggacatgaaattaaggtagatgaagaaagggagaactttctccagaccaaaatagcaacattggatatgtcaagtgaccagatagctgccaatctgcaagcagttattaatgaagtttgtaggcacagaccgctgaatttgggtccctttgtggtacgtgctttccttcgtagttcaacaagtgaaggtttattactgaagattgatccattgttgcctaaagaagtaaaaaatgaagaaagtgaaaaagaagatgcctaaatgtggtgaattgtgaaattactttcagtggtttaagaagcaatggagaaaatgataatacagcataatttttacatttgatgtcttgttattgatcatacttgaaagtgaactttaacattgaaaaatcgtacagtcatttcaagaataagaaaataaaattttctctttgtctgaa

SEQ ID NO: 100712 - DNA, 439 bp, Homo sapiens
ataatttattatcttcttgctttctcatcattaatgttatgtatattattttctttcagtttggatatgtcaagtgaccagatagctgccaatctgcaagcagttattaatgaagtttgtaggcacagaccgctgaatttgggtccctttgtggtacgtgctttccttcgtagttcaacaagtgaaggtttattactgaagattgatccattgttgcctaaagaagtaaaaaatgaagaaagtgaaaaagaagatgcctaaatgtggtgaattgtgaaattactttcagtggtttaagaagcaatggagaaaatgataatacagcataatttttacatttgatgtcttgttattgatcatacttgaaagtgaactttaacattgaaaaatcgtacagtcatttcaagaataagaaaataaaattttctctttgtctgaa

SEQ ID NO: 100713 - DNA, 439 bp, Homo sapiens
atatttaaattatattgaagtattattaataaacacccacacacaccccgagatcacgagttggatatgtcaagtgaccagatagctgccaatctgcaagcagttattaatgaagtttgtaggcacagaccgctgaatttgggtccctttgtggtacgtgctttccttcgtagttcaacaagtgaaggtttattactgaagattgatccattgttgcctaaagaagtaaaaaatgaagaaagtgaaaaagaagatgcctaaatgtggtgaattgtgaaattactttcagtggtttaagaagcaatggagaaaatgataatacagcataatttttacatttgatgtcttgttattgatcatacttgaaagtgaactttaacattgaaaaatcgtacagtcatttcaagaataagaaaataaaattttctctttgtctgaa

SEQ ID NO: 100714 - DNA, 431 bp, Homo sapiens
tataagagtaattcaaggataataatagagacgcacgcgacaagcaagttgattggatatgtcaagtgaccagatagctgccaatctgcaagcagttattaatgaagtttgtaggcacagaccgctgaatttgggtccctttgtggtacgtgctttccttcgtagttcaacaagtgaaggtttattactgaagattgatccattgttgcctaaagaagtaaaaaatgaagaaagtgaaaaagaagatgcctaaatgtggtgaattgtgaaattactttcagtggtttaagaagcaatggagaaaatgataatacagcataatttttacatttgatgtcttgttattgatcatacttgaaagtgaactttaacattgaaaaatcgtacagtcatttcaagaataagaaaataaaattttctctttgtctgaa

SEQ ID NO: 100715 - DNA, 433 bp, Homo sapiens
  misc_feature (1)..(1): n is a, c, g, or t
ngaagtgatgtagatggagaaagatggtagtcagtgcacgaaggacaagacttattggatatgtcaagtgaccagatagctgccaatctgcaagcagttattaatgaagtttgtaggcacagaccgctgaatttgggtccctttgtggtacgtgctttccttcgtagttcaacaagtgaaggtttattactgaagattgatccattgttgcctaaagaagtaaaaaatgaagaaagtgaaaaagaagatgcctaaatgtggtgaattgtgaaattactttcagtggtttaagaagcaatggagaaaatgataatacagcataatttttacatttgatgtcttgttattgatcatacttgaaagtgaactttaacattgaaaaatcgtacagtcatttcaagaataagaaaataaaattttctctttgtctgaa

SEQ ID NO: 100716 - DNA, 675 bp, Homo sapiens
gcaaacacttagtctttgatttaagtcaccaccactatgactcctgtcactctgattcacccacagttgggtaaataattattgcttttattaatcttaaatgtatttatagttcaaatttatttcaatggttaatattagaagtgtttgagctctttatttagaagcttggtgatatttttgtgactagaaatatgcctgagaaacttaactcttattaattagcctacggtacaattggtttctttataagttgttttgcttaaagttgcagtttccaagaacctagtgacaatattaagtgaggacctactttatttgctcatgaggtggtattgcgatataaaaatcaaagttgattctcgtttttgtttccaggtccctttgtggtacgtgctttccttcgtagttcaacaagtgaaggtttattactgaagattgatccattgttgcctaaagaagtaaaaaatgaagaaagtgaaaaagaagatgcctaaatgtggtgaattgtgaaattactttcagtggtttaagaagcaatggagaaaatgataatacagcataatttttacatttgatgtcttgttattgatcatacttgaaagtgaactttaacattgaaaaatcgtacagtcatttcaagaataagaaaataaaattttctctttgtctgaa

SEQ ID NO: 100717 - DNA, 346 bp, Homo sapiens
tttttcttactttttttttctagttttagattttgttatttatattttggtccctttgtggtacgtgctttccttcgtagttcaacaagtgaaggtttattactgaagattgatccattgttgcctaaagaagtaaaaaatgaagaaagtgaaaaagaagatgcctaaatgtggtgaattgtgaaattactttcagtggtttaagaagcaatggagaaaatgataatacagcataatttttacatttgatgtcttgttattgatcatacttgaaagtgaactttaacattgaaaaatcgtacagtcatttcaagaataagaaaataaaattttctctttgtctgaa

SEQ ID NO: 100718 - DNA, 350 bp, Homo sapiens
  misc_feature (43)..(43): n is a, c, g, or t
tttataatcccccacaccctcacgcatcatataaacaaacacnaccacttttagtccctttgtggtacgtgctttccttcgtagttcaacaagtgaaggtttattactgaagattgatccattgttgcctaaagaagtaaaaaatgaagaaagtgaaaaagaagatgcctaaatgtggtgaattgtgaaattactttcagtggtttaagaagcaatggagaaaatgataatacagcataatttttacatttgatgtcttgttattgatcatacttgaaagtgaactttaacattgaaaaatcgtacagtcatttcaagaataagaaaataaaattttctctttgtctgaa

SEQ ID NO: 100719 - DNA, 344 bp, Homo sapiens
  misc_feature (21)..(23): n is a, c, g, or t
  misc_feature (25)..(26): n is a, c, g, or t
gtttgatgttcaatttttggnnngnntttgaacaaattttcaacttcgtccctttgtggtacgtgctttccttcgtagttcaacaagtgaaggtttattactgaagattgatccattgttgcctaaagaagtaaaaaatgaagaaagtgaaaaagaagatgcctaaatgtggtgaattgtgaaattactttcagtggtttaagaagcaatggagaaaatgataatacagcataatttttacatttgatgtcttgttattgatcatacttgaaagtgaactttaacattgaaaaatcgtacagtcatttcaagaataagaaaataaaattttctctttgtctgaa

SEQ ID NO: 100720 - DNA, 487 bp, Homo sapiens
ggaatgtgagattgggacggtaggggggcgaggcagagcctagttggatatgtcaagtgaccagatagctgccaatctgcaagcagttattaatgaagtttgtaggcacagaccgctgaatttgggtccctttgtggtacgtgctttccttcgtagttcaacaagtgaaggtttattactgaagattgatccattgttgcctaaagaagtaaaaaatgaagaaagtgaaaaagaagatgcctaaatgtggtgaattgtgaaattactttcagtggtttaagaagcaatggagaaaatgataatacagcataatttttacatttgatgtcttgttattgatcatacttgaaagtgaactttaacattgaaaaatcgtacagtcatttcaagaataagaaaataaaattttctctttgtctgaaaaaaaaaaataaaacataaacgtaatagttacgtattatttagtttttgggcctcgttggcctca

SEQ ID NO: 100721 - DNA, 821 bp, Homo sapiens
  misc_feature (32)..(32): n is a, c, g, or t
  misc_feature (34)..(34): n is a, c, g, or t
  misc_feature (46)..(47): n is a, c, g, or t
tttttttcttattttggtccacacaaataaananaaaaaaaaaaanntagtccctttgtggtacgtgctttccttcgtagttcaacaagtgaaggtttattactgaagattgatccattgttgcctaaagaagtaaaaaatgaagaaagtgaaaaagaagatgcctaaatgtggtgaattgtgaaattactttcagtggtttaagaagcaatggagaaaatgataatacagcataatttttacatttgatgtcttgttattgatcatacttgaaagtgaactttaacattgaaaaatcgtacagtcatttcaagaataagaaaataaaattttctctttgtctgaaaaaaaaaaaaaaataaattactaacactataataaatgtaaccagtatgtttagtttgttaaatgtagtgggcatgtacgatttcttgtgaagattaaataattcgctttgtgttgtccatttatttgttgtatttgggtggctatttctttttttaggggcgggaatttataactctttatatatgaaagttgtacgccaggagttttttagtttgatagtttgagtatattctatatgtttgtactttgtgtacttcatttttattgggaatcttaatataacactctttatgcaatatatatctagtttgtatattattggaaaatggacatagtattatttattgtacaactcgtttcatatttttaagtgtgaggattattttgatctttgtgggaggaggtattcgcgcgttcttaatctaatagtgttggcatcctggacactcttcctattgttgagatgtatatat

SEQ ID NO: 100722 - DNA, 1045 bp, Homo sapiens
taactccttccctctttgcggattctagaacggaacctttttttaattcttcccagtagaaacgtaggaacaatttcgtgaacgcaatccggagtgcccaacatggcggcggccgtaaggtgcatgggtagagccttgatacatcatcaaaggcatagcctttccaagatggtttatcagacatcactttgttcttgttctgtaaacatccgagtgcccaacagacattttgctgctgctacaaagtctgcaaagaaaacaaaaaaaggtgctaaagaaaaaacaccagatgagaaaaaagatgaaatagaaaaaataaaagcatatccctatatggaaggcgaacctgaggatgatgtctatttaaaacgcttatacccgagacagatatatgaggtggagaaagctgttcacttacttaagaaatttcaaattcttgactttactagtccaaagcaaagtgtttatcttgatttgacactggatatggcactgggaaagaagaaaaacgtggagccatttaccagtgttcttagtttgccatacccatttgcttccgaaatcaataaagttgctgtatttacagagaatgcatcagaggtcaaaatagcggaagaaaatggagctgcatttgcaggaggcactagtctgatacagaagatttgggatgatgaaattgttgcagacttttacgtagctgttccagaaataatgcctgaacttaatcgattaaggaagaaactgaataaaaaatatccaaagctttctcgaaattccattggccgtgacatccccaaaatgcttgaattatttaaaaatggacatgaaattaaggtagatgaagaaagtgaaaaagaagatgcctaaatgtggtgaattgtgaaattactttcagtggtttaagaagcaatggagaaaatgataatacagcataatttttacatttgatgtcttgttattgatcatacttgaaagtgaactttaacattgaaaaatcgtacagtcatttcaagaataagaaaataaaattttctctttgtctgaa

SEQ ID NO: 100723 - DNA, 368 bp, Homo sapiens
tttctttttctatttatctccctaatctgttattatcaataaccactaggtccctttgtggtacgtgctttccttcgtagttcaacaagtgaaggtttattactgaagattgatccattgttgcctaaagaagtaaaaaatgaagaaagtgaaaaagaagatgcctaaatgtggtgaattgtgaaattactttcagtggtttaagaagcaatggagaaaatgataatacagcataatttttacatttgatgtcttgttattgatcatacttgaaagtgaactttaacattgaaaaatcgtacagtcatttcaagaataagaaaataaaattttctctttgtctgaaaaaaaatgatatataacaaaaa

SEQ ID NO: 100724 - DNA, 380 bp, Homo sapiens
aattatttaatttagtatcttttataatttacggtataaaaaaaaaataaattgagtccctttgtggtacgtgctttccttcgtagttcaacaagtgaaggtttattactgaagattgatccattgttgcctaaagaagtaaaaaatgaagaaagtgaaaaagaagatgcctaaatgtggtgaattgtgaaattactttcagtggtttaagaagcaatggagaaaatgataatacagcataatttttacatttgatgtcttgttattgatcatacttgaaagtgaactttaacattgaaaaatcgtacagtcatttcaagaataagaaaataaaattttctctttgtctgaaaaaaaaaaaattggactcattggtctca

SEQ ID NO: 100725 - DNA, 376 bp, Homo sapiens
  misc_feature (32)..(32): n is a, c, g, or t
tttcaattttcctcattatttattactctaanaatcctccacacaggtccctttgtggtacgtgctttccttcgtagttcaacaagtgaaggtttattactgaagattgatccattgttgcctaaagaagtaaaaaatgaagaaagtgaaaaagaagatgcctaaatgtggtgaattgtgaaattactttcagtggtttaagaagcaatggagaaaatgataatacagcataatttttacatttgatgtcttgttattgatcatacttgaaagtgaactttaacattgaaaaatcgtacagtcatttcaagaataagaaaataaaattttctctttgtctgaaaaaaaaaaaatcggccttgctggcctcaacgcc

SEQ ID NO: 100726 - DNA, 456 bp, Homo sapiens
  misc_feature (11)..(11): n is a, c, g, or t
  misc_feature (13)..(13): n is a, c, g, or t
  misc_feature (33)..(33): n is a, c, g, or t
  misc_feature (40)..(40): n is a, c, g, or t
  misc_feature (65)..(65): n is a, c, g, or t
ttgtactgggncnctttttaacaatagaaagtnaaaaaanaaaaatgtaaataggaatgctgggnggcaacgttaagttggatatgtcaagtgaccagatagctgccaatctgcaagcagttattaatgaagtttgtaggcacagaccgctgaatttgggtccctttgtggtacgtgctttccttcgtagttcaacaagtgaaggtttattactgaagattgatccattgttgcctaaagaagtaaaaaatgaagaaagtgaaaaagaagatgcctaaatgtggtgaattgtgaaattactttcagtggtttaagaagcaatggagaaaatgataatacagcataatttttacatttgatgtcttgttattgatcatacttgaaagtgaactttaacattgaaaaatcgtacagtcatttcaagaataagaaaataaaattttctctttgtctgaa

SEQ ID NO: 100727 - DNA, 430 bp, Homo sapiens
ataacatctatatatttattaacccattcgaataagcttcccacaaattatttggatatgtcaagtgaccagatagctgccaatctgcaagcagttattaatgaagtttgtaggcacagaccgctgaatttgggtccctttgtggtacgtgctttccttcgtagttcaacaagtgaaggtttattactgaagattgatccattgttgcctaaagaagtaaaaaatgaagaaagtgaaaaagaagatgcctaaatgtggtgaattgtgaaattactttcagtggtttaagaagcaatggagaaaatgataatacagcataatttttacatttgatgtcttgttattgatcatacttgaaagtgaactttaacattgaaaaatcgtacagtcatttcaagaataagaaaataaaattttctctttgtctgaa

SEQ ID NO: 100728 - DNA, 426 bp, Homo sapiens
acccacaaatacaacaatctattttctttattaattaaaataatcagttggatatgtcaagtgaccagatagctgccaatctgcaagcagttattaatgaagtttgtaggcacagaccgctgaatttgggtccctttgtggtacgtgctttccttcgtagttcaacaagtgaaggtttattactgaagattgatccattgttgcctaaagaagtaaaaaatgaagaaagtgaaaaagaagatgcctaaatgtggtgaattgtgaaattactttcagtggtttaagaagcaatggagaaaatgataatacagcataatttttacatttgatgtcttgttattgatcatacttgaaagtgaactttaacattgaaaaatcgtacagtcatttcaagaataagaaaataaaattttctctttgtctgaa

SEQ ID NO: 100729 - DNA, 1323 bp, Homo sapiens
taactccttccctctttgcggattctagaacggaacctttttttaattcttcccagtagaaacgtaggaacaatttcgtgaacgcaatccggagtgcccaacatggcggcggccgtaaggtgcatgggtagagccttgatacatcatcaaaggcatagcctttccaagatggtttatcagacatcactttgttcttgttctgtaaacatccgagtgcccaacagacattttgctgctgctacaaagtctgcaaagaaaacaaaaaaaggtgctaaagaaaaaacaccagatgagaaaaaagatgaaatagaaaaaataaaagcatatccctatatggaaggcgaacctgaggatgatgtctatttaaaacgcttatacccgagacagatatatgaggtggagaaagctgttcacttacttaagaaatttcaaattcttgactttactagtccaaagcaaagtgtttatcttgatttgacactggatatggcactgggaaagaagaaaaacgtggagccatttaccagtgttcttagtttgccatacccatttgcttccgaaatcaataaagttgctgtatttacagagaatgcatcagaggtcaaaatagcggaagaaaatggagctgcatttgcaggaggcactagtctgatacagaagatttgggatgatgaaattgttgcagacttttacgtagctgttccagaaataatgcctgaacttaatcgattaaggaagaaactgaataaaaaatatccaaagctttctcgaaattccattggccgtgacatccccaaaatgcttgaattatttaaaaatggacatgaaattaaggtagatgaagaaagggagaactttctccagaccaaaatagcaacattggatatgtcaagtgaccagatagctgccaatctgcaagcagttattaatgaagtttgtaggcacagaccgctgaatttgggtccctttgtggtacgtgctttccttcgtagttcaacaagtgaaggtttattactgaagattgatccattgttgcctaaagaagtaaaaaatgaagaaagtgaaaaagaagatgcctaaatgtggtgaattgtgaaattactttcagtggtttaagaagcaatggagaaaatgataatacagcataatttttacatttgatgtcttgttattgatcatacttgaaagtgaactttaacattgaaaaatcgtacagtcatttcaagaataagaaaataaaattttctctttgtctgaaaaaaaaaaataaaacataaacgtaatagttacgtattatttagtttttgggcctcgttggcctca

SEQ ID NO: 100730 - DNA, 1280 bp, Homo sapiens
taactccttccctctttgcggattctagaacggaacctttttttaattcttcccagtagaaacgtaggaacaatttcgtgaacgcaatccggagtgcccaacatggcggcggccgtaaggtgcatgggtagagccttgatacatcatcaaaggcatagcctttccaagatggtttatcagacatcactttgttcttgttctgtaaacatccgagtgcccaacagacattttgctgctgctacaaagtctgcaaagaaaacaaaaaaaggtgctaaagaaaaaacaccagatgagaaaaaagatgaaatagaaaaaataaaagcatatccctatatggaaggcgaacctgaggatgatgtctatttaaaacgcttatacccgagacagatatatgaggtggagaaagctgttcacttacttaagaaatttcaaattcttgactttactagtccaaagcaaagtgtttatcttgatttgacactggatatggcactgggaaagaagaaaaacgtggagccatttaccagtgttcttagtttgccatacccatttgcttccgaaatcaataaagttgctgtatttacagagaatgcatcagaggtcaaaatagcggaagaaaatggagctgcatttgcaggaggcactagtctgatacagaagatttgggatgatgaaattgttgcagacttttacgtagctgttccagaaataatgcctgaacttaatcgattaaggaagaaactgaataaaaaatatccaaagctttctcgaaattccattggccgtgacatccccaaaatgcttgaattatttaaaaatggacatgaaattaaggtagatgaagaaagggagaactttctccagaccaaaatagcaacattggatatgtcaagtgaccagatagctgccaatctgcaagcagttattaatgaagtttgtaggcacagaccgctgaatttgggtccctttgtggtacgtgctttccttcgtagttcaacaagtgaaggtttattactgaagattgatccattgttgcctaaagaagtaaaaaatgaagaaagtgaaaaagaagatgcctaaatgtggtgaattgtgaaattactttcagtggtttaagaagcaatggagaaaatgataatacagcataatttttacatttgatgtcttgttattgatcatacttgaaagtgaactttaacattgaaaaatcgtacagtcatttcaagaataagaaaataaaattttctctttgtctgaaaaaaaatgatatataacaaaaa

SEQ ID NO: 100731 - DNA, 355 bp, Homo sapiens
ttactccccctctcccctgttcctcccactctttaccttacaaactatataattactagtccctttgtggtacgtgctttccttcgtagttcaacaagtgaaggtttattactgaagattgatccattgttgcctaaagaagtaaaaaatgaagaaagtgaaaaagaagatgcctaaatgtggtgaattgtgaaattactttcagtggtttaagaagcaatggagaaaatgataatacagcataatttttacatttgatgtcttgttattgatcatacttgaaagtgaactttaacattgaaaaatcgtacagtcatttcaagaataagaaaataaaattttctctttgtctgaa

SEQ ID NO: 100732 - DNA, 345 bp, Homo sapiens
tccctcccaaccctctatttttcctttatgagacacagacccttttgggtccctttgtggtacgtgctttccttcgtagttcaacaagtgaaggtttattactgaagattgatccattgttgcctaaagaagtaaaaaatgaagaaagtgaaaaagaagatgcctaaatgtggtgaattgtgaaattactttcagtggtttaagaagcaatggagaaaatgataatacagcataatttttacatttgatgtcttgttattgatcatacttgaaagtgaactttaacattgaaaaatcgtacagtcatttcaagaataagaaaataaaattttctctttgtctgaa

SEQ ID NO: 100733 - DNA, 346 bp, Homo sapiens
ttttttttatacttcctctcgtttctatttacatatagttatcacttcagtccctttgtggtacgtgctttccttcgtagttcaacaagtgaaggtttattactgaagattgatccattgttgcctaaagaagtaaaaaatgaagaaagtgaaaaagaagatgcctaaatgtggtgaattgtgaaattactttcagtggtttaagaagcaatggagaaaatgataatacagcataatttttacatttgatgtcttgttattgatcatacttgaaagtgaactttaacattgaaaaatcgtacagtcatttcaagaataagaaaataaaattttctctttgtctgaa

SEQ ID NO: 100734 - DNA, 339 bp, Homo sapiens
tttttatttctgccttactttttatcgcattaaattattctagtccctttgtggtacgtgctttccttcgtagttcaacaagtgaaggtttattactgaagattgatccattgttgcctaaagaagtaaaaaatgaagaaagtgaaaaagaagatgcctaaatgtggtgaattgtgaaattactttcagtggtttaagaagcaatggagaaaatgataatacagcataatttttacatttgatgtcttgttattgatcatacttgaaagtgaactttaacattgaaaaatcgtacagtcatttcaagaataagaaaataaaattttctctttgtctgaa

SEQ ID NO: 100735 - DNA, 346 bp, Homo sapiens
tttcatccccccccacctcgctcccgtgatcccaccccctcaccagttagtccctttgtggtacgtgctttccttcgtagttcaacaagtgaaggtttattactgaagattgatccattgttgcctaaagaagtaaaaaatgaagaaagtgaaaaagaagatgcctaaatgtggtgaattgtgaaattactttcagtggtttaagaagcaatggagaaaatgataatacagcataatttttacatttgatgtcttgttattgatcatacttgaaagtgaactttaacattgaaaaatcgtacagtcatttcaagaataagaaaataaaattttctctttgtctgaa

SEQ ID NO: 100736 - DNA, 1288 bp, Homo sapiens
taactccttccctctttgcggattctagaacggaacctttttttaattcttcccagtagaaacgtaggaacaatttcgtgaacgcaatccggagtgcccaacatggcggcggccgtaaggtgcatgggtagagccttgatacatcatcaaaggcatagcctttccaagatggtttatcagacatcactttgttcttgttctgtaaacatccgagtgcccaacagacattttgctgctgctacaaagtctgcaaagaaaacaaaaaaaggtgctaaagaaaaaacaccagatgagaaaaaagatgaaatagaaaaaataaaagcatatccctatatggaaggcgaacctgaggatgatgtctatttaaaacgcttatacccgagacagatatatgaggtggagaaagctgttcacttacttaagaaatttcaaattcttgactttactagtccaaagcaaagtgtttatcttgatttgacactggatatggcactgggaaagaagaaaaacgtggagccatttaccagtgttcttagtttgccatacccatttgcttccgaaatcaataaagttgctgtatttacagagaatgcatcagaggtcaaaatagcggaagaaaatggagctgcatttgcaggaggcactagtctgatacagaagatttgggatgatgaaattgttgcagacttttacgtagctgttccagaaataatgcctgaacttaatcgattaaggaagaaactgaataaaaaatatccaaagctttctcgaaattccattggccgtgacatccccaaaatgcttgaattatttaaaaatggacatgaaattaaggtagatgaagaaagggagaactttctccagaccaaaatagcaacattggatatgtcaagtgaccagatagctgccaatctgcaagcagttattaatgaagtttgtaggcacagaccgctgaatttgggtccctttgtggtacgtgctttccttcgtagttcaacaagtgaaggtttattactgaagattgatccattgttgcctaaagaagtaaaaaatgaagaaagtgaaaaagaagatgcctaaatgtggtgaattgtgaaattactttcagtggtttaagaagcaatggagaaaatgataatacagcataatttttacatttgatgtcttgttattgatcatacttgaaagtgaactttaacattgaaaaatcgtacagtcatttcaagaataagaaaataaaattttctctttgtctgaaaaaaaaaaagggaaaatgataaacaggaaa

SEQ ID NO: 100737 - DNA, 1258 bp, Homo sapiens
taactccttccctctttgcggattctagaacggaacctttttttaattcttcccagtagaaacgtaggaacaatttcgtgaacgcaatccggagtgcccaacatggcggcggccgtaaggtgcatgggtagagccttgatacatcatcaaaggcatagcctttccaagatggtttatcagacatcactttgttcttgttctgtaaacatccgagtgcccaacagacattttgctgctgctacaaagtctgcaaagaaaacaaaaaaaggtgctaaagaaaaaacaccagatgagaaaaaagatgaaatagaaaaaataaaagcatatccctatatggaaggcgaacctgaggatgatgtctatttaaaacgcttatacccgagacagatatatgaggtggagaaagctgttcacttacttaagaaatttcaaattcttgactttactagtccaaagcaaagtgtttatcttgatttgacactggatatggcactgggaaagaagaaaaacgtggagccatttaccagtgttcttagtttgccatacccatttgcttccgaaatcaataaagttgctgtatttacagagaatgcatcagaggtcaaaatagcggaagaaaatggagctgcatttgcaggaggcactagtctgatacagaagatttgggatgatgaaattgttgcagacttttacgtagctgttccagaaataatgcctgaacttaatcgattaaggaagaaactgaataaaaaatatccaaagctttctcgaaattccattggccgtgacatccccaaaatgcttgaattatttaaaaatggacatgaaattaaggtagatgaagaaagggagaactttctccagaccaaaatagcaacattggatatgtcaagtgaccagatagctgccaatctgcaagcagttattaatgaagtttgtaggcacagaccgctgaatttgggtccctttgtggtacgtgctttccttcgtagttcaacaagtgaaggtttattactgaagattgatccattgttgcctaaagaagtaaaaaatgaagaaagtgaaaaagaagatgcctaaatgtggtgaattgtgaaattactttcagtggtttaagaagcaatggagaaaatgataatacagcataatttttacatttgatgtcttgttattgatcatacttgaaagtgaactttaacattgaaaaatcgtacagtcatttcaagaataagaaaataaaattttctctttgtctgaa

SEQ ID NO: 100738 - DNA, 360 bp, Homo sapiens
tttttttttgagacagtcttgctttgttgcccaggctggagtgcagtggcatgatctcgcctcactgcagcctctgcctcccagtttcaagcaatcctcctgtctcagcctcgacatcccaaagtgctcaggttacaggtgtgagccacccccacctggccctgaaaccattaattgtaattgttgattcccttaggttggctctgtagatgctgtcacctataaatgtttggctgcttcctttccaatagttctaattctttttgttgccttactacatgagctggaatctcaaatatatactgaaatagatgcagagacacaggaactcttagtttcttgctgactttaatgggaatg

SEQ ID NO: 100739 - DNA, 244 bp, Homo sapiens
aagatcgtaccactgctctctagcctgagggacaagagcgaaactccatctcaagaaaaaaaaaaattgtaaatcccaccatgtccactgagtccacattgttctgggactgttttttagtttcttactccctgaatacactctggcagtaaagtgtttatacagattacgttctttggatactatagaattaaacacacaaacacacaacgaaatatttaaggtgtgtggagccattgccatt

SEQ ID NO: 100740 - DNA, 361 bp, Homo sapiens
gtcactgccagtcaaagggggtcaggagaacaaggcagcagaagaaaagtacctgagaagacaggagcaggtaccccttggaattcaccagggacccttgctcccatccttgaagaggcctctggccagccatttctccatatggttactaatgtaaagtgagggtgctcctctcaaaaaaatgattagtgccctgtaaataaatctctccgtggatgttaatgcacagaggacctggccccgtgggcctggctgaactgccattttcccagccctccttctcttgcctcaggctcatttttccactaggccccttctctctcagctttccggcacttagtaaccattagagtttgcattc

SEQ ID NO: 100741 - DNA, 410 bp, Homo sapiens
tcttgctctgtcacccaggctggagtgcagtggcacaattacagctcactacagcctcaatttcccaggcttaagtgatattcctgactcagcctccctagtagctgggtctacaggctcatgcaatcacaccagctagtttttttaagaggtggggtctcactatgttgcccaggccggtctcctgggctctagcaatcctccttccttggcctcccaaagtgctgggattacaggcatgatctaccatgtcctgcaccttctatttgcagggcttgtgctatggcaccctgcagggtgtgcagccagagagaggggaatcacatgtgtctgtcttccagtaacttcatgactccaataactaacacagcctagaaagactggaattaccctgagagcagaaagggtca

SEQ ID NO: 100742 - DNA, 449 bp, Homo sapiens
ccagtctatctctgtgcgcatttaggttggtttcatatctttgctgttgtgaatagtgctgcagtgaacatacatgtgcatgtgtctttataaaaagcggtcaaaggatatgaacagacacttctcaaaaaaagaaatatgtgcagccaacaatcatgtgaaaaatagctcagcatcactggtcattacagaaatggaaatagaaaccacaatgtggtaccatcccacatcagtcagaatggctactattaaaaaagtcaaaaaacaccttactgagtccttactagattaatgggacgcaaacccacaaaaatttagttaacagctaaatatcctaatcaactagcttcaatctactgacgaggttgtggagaaaaaggaacacttttacactgttgttgggagtgtaaattagttcaactgctttggaagacagtgattccacaaag

SEQ ID NO: 100743 - DNA, 689 bp, Homo sapiens
ttttagtcttttatctatgcattttcaagatggaatgtttccagagaagctgtgtgtgacatagtttgtgaaatgttatactgtagtttgaaaaatattattttgatatagctagacacaggaccagtatttcctagaaatgcacactgggccgggcgcggtggctcacgcctgtaatcccagcactttgggaggccaaggcaggtgaatcacctgaggtcaggagttcgagaccagcctggccaacatagtgaaaccccgtctctgctaaaaatacaaaaattgggggaagggatagcattaggagagacacctaatgttaaatgacaagttactgggtgcagcacaccaacatggcacatgtatacctatgtaacaaacctgcatgttgtgcacatgtaccctaaaacttaaagtataattaaaaaaaaaatacgaaaattagctgggcatggtggtgtgtgcctgtaatcccagctactcgggaggctgaggcaggagaacccgggaggtggaggttgcagtgagccgccattacacctctgcactccagcctgggcaacagagtgagactccatcttaaaaaaaaagaaaaagaaaaagcacacaggagcctgtatgtttattggcaggtcagtattattcacattcaataatcattcaaatccagttatttggaatattgttcc

SEQ ID NO: 100744 - DNA, 857 bp, Homo sapiens
taggcacatttaggtatttttattttgttgaaatttacaacgaagatgtcatggcttccggcagattcccacgtttgccagcagcagatatatcatcctgagaacttggatcatctctgatgttgagcaatttgccaacattcatgaccagttaagtagatttaaatgcgtaattgcctcatgcttaggaatgcgtatttcagtttaaagataacgtcttaacttcccaagagtaatctataaaagcatacatctcatatttcagattttggaaaacattctttttccttttgttttgcctgtgttcaggagaacactagtctgttgcaggactttttttctacttttataagccacagaaatgcatattaaaaacaaaacaaacagaaaaagcaggatttcacctagaggtttaaaataaagttaccatattacagacttggaaaatggtaatgaagagaaatttatattggtttctagccaaaattctatgtttaggaagatggggaagtgccaaaattagtaatagctgattcaatattgtaaaattctaattgaaaataaataccaaattttatacttcagaaaatccttagagtttttctactcaaacctgctctatttatgttggaaaaattaaagagatccgaagaggttacatcacttgcctaagagtcacatggttaattactgatacaattaacattaaagtctagatttcaaggatagtaaggatgatggtgatggcactataaataaattagagggtccactattactgtacactcatcattgttcaagactttatattttcttttcatagatactttgaaaatttgatcttattctcctgtatt

SEQ ID NO: 100745 - DNA, 374 bp, Homo sapiens
cagaaaaatggcagtgaggtatcctgggaaataagtgcatttttctaatttgtacaaattgtcttttgggcaagtagtaaatcagtgcaaatttgtggccttcagataaaaaaatacagatttggcttacatttttttctccttcttttttttcttatagctagagaatcagtaccaacatttttttaaatgtgaatttttgggccacattttaaaattggaatatttaagatttaaaaaatccagatttacagcctctttttctttcttttttggagatagagtcttgctttgttgcccaggctggagcgcagtggcacgatcatagctcactgcagcctcaaattcccggcctcaagcgatcctcccacctc

SEQ ID NO: 100746 - DNA, 603 bp, Homo sapiens
aagaagaagatagttcccagatgactcaggaaaattttcctcgtattctgttgccagaacatggacacatacccattcctgaaccaataactgccgaggggcaggtccttcaggagctattctaggaaaagacattgttatcaccagagatgacacctccctgcatgctgttgcccctaaagatcttccaatgggacaagatgtggaggtgaaagacagtgacattgataattctgaccctgttgtaggcctaggctaatgtgtctgtgtgtctgagtttttaacaaaaaagctttaaaaatgaaaataaaataaaaatagaaaaagcttgtaaattaagatattagtcagttttcacaatcctataaagaacttccctgagactgggtaatgtataaaggaaagaggtttaattgactcacagttctgcatggctgggtaggcgtcaggaaacttataatcatgccagaagagaaagcaggcaccttcttcacaagacagcaggagagagaagaacgaagcaaaggggggaaaacccccttataaagccatcagatctcatgagaactcactatcacaagaacagcatgggggaaaccgccc

SEQ ID NO: 100747 - DNA, 322 bp, Homo sapiens
aaaaaaaaaagtcagttgggaaactgggtcattaaagccacacaaatttgtttactgcaggacttttcggagcctttgacatgctaatacatacagtgactttccaagtgggaccaaggtatgtggtatttcccaaactcatggaatgcctcacctagctggtgttcacagaacaccttttgggcaatgctaatctgcctcccctcccctcactgtacaagtgacggaatgaaggcacagagcgggagagtgagttacccaaggtcacacagctgctgaattgcagagaaagtcctggcacctgaggcctcctagtgttctt

SEQ ID NO: 100748 - DNA, 809 bp, Homo sapiens
aacgcggtgtctgggcgttgaaaaagggcagtaacagcagtgcggaaatcccggcggcgatagagataaccacaaaaaatccgctccagtgccaggtatcgagtactttcgccagcggccaaccagcaagcgacgcccccagataagcaaacaagccgacaaaccccgtcgccgcccctgccgcctctttgtgggaacactctgccgccgccataccgattaacatctgtgggccaaagacaaaaaaaccaatggtgaagaagcaggttgcctgcatcacgtagctggcaaatggcataagccacagggagccgactgaaagcaaaattccggcggcgaaaatcaaattcatcggccctcggttgccgttaaacaatttgtccgagccccaaccggctaccagcgcaccgataaatccgcccagttgaaacatcgtcactgccgtattcgccgtgaccagatcgtatgagtttactaaggaaatataatagaagttttgggtctctgaaaccttgaacgagttgcatttaaatttaacaaaacgacactaattttcttatttattttttcttaaatgaaatttaaactccaatgcttttaagccattttagatacatgagtcactggatagctgctaaatattaacctgggagtgatggttgattcttttgaaaaagaaatagtcagtgtcaatgtttctgtaacagagaccaataaactggagaaaggctgataattatctacaaattgtagtccatgataaaattcttactgtttaatatttttaggtttgacatagaaaatatata

SEQ ID NO: 100749 - DNA, 388 bp, Homo sapiens
cgtgtgtgcgtgtgtgtgtgtgtgtgcacatgcacattagggaagacggggcacctgggatacactctccaggtctctgtttctgtgctcatctccctaccttctctcaaagttgcaattggttcaggtgaccccaaggcctgaggctgctgcggtggggggcagagcagtcaggtgaaaagtgctcagtcccacagagacaccccatcgggttccatttaatgcaggctctgtggctcccaccaccctggggccccatgagccctgtggcgtgtgtggtcatggcctgtgcaggccctcatgtgcgctgtgtctctgcacacccagttaatgtcacaggtggtgcactcacacaggacgtgcacatgagctgcacagctcgcatgca

SEQ ID NO: 100750 - DNA, 458 bp, Homo sapiens
aagatgagaatttgtttttatttctgtaacagcttcattgggacaaaatccacatgtcatacaattcacacatttaaagtgtacaattcaatgtttttagtatattcacaaagttgtgcaaccatcactacaattaatgttaaaacattttcatcacctcgaaaagaaaacccataccttttccctatccagccttaagcaaccactaattcactttctgtctctatagatttctctattctggacatttcatgtaaataggatgatatgatatacaacattttggcttctgccacttaacaatgtttttaagtttcaccaagttgtatcagtacttcatttctttttatggctgaataatattccattatataaatataccacaaagtgtttattcatttgttcgctgatgggcatttgagtcgtttctaccttttgactattatgaataatgttgc

SEQ ID NO: 100751 - DNA, 258 bp, Homo sapiens
gaagaattatttagtaaattgttctagtatagttaataatgtagcaaacagtagatcaaattggatcatcaacattataccatagcaaaagaaatttgaaatagatgaaaacatcacattttaaggaaaactatcttatgtctatatttgaaacaactttcaagttgcaaatataatagaaaaccataaggaaacaatatatttgaatacataaaatgaaactttctgtcataaagtaaaaaaatgaggaagaaatgt

SEQ ID NO: 100752 - DNA, 166 bp, Homo sapiens
ggaaggtggggcctaatatgaggtaattaaatcatgagggttctgccatcaggaatggattaatatgattatcaaaggaatgggttaattatctcaaaaatgagtttgttataaaaaggagtttggtcccctcctgctctcttgctctcaccatctcttgcccttc

SEQ ID NO: 100753 - DNA, 653 bp, Homo sapiens
cacaggacatgctccgtcagcacaagcactcccaagtcaatctgaaaagcaggcagcagcattgcaggggacaggtcctcccctgatctgggtggtggtcttctcccacttaaagcactatatacagggggaggtcccaggctggacatctttaccaggggctgggagaaagcaggccgtgctctgtggtctcagagtcttcctggcgctctttggaacctgacagaacatgacctcagtcccagccagcgagtggcagagaggactttgtacttggctgcaataaaacatgcccttcttcgcagagacacgaacaatctcgtctctaccagaggcctgtgagacatcagctcaggaccttgacctgcagacacctcccctgtgcacattcttgatctcagactttcacaggtgctttctgtggcaggaagagtgagggtcccaggaaaggtgtggatcccagaagtctcactcagtgtcaccctcacggacacactgggaaactggtccgaccgagtccaggaagacagcagacacacgtgtcctctgtggcaccagctcctgtggacacgcccccagcaccgcaggccatgccagttactacccgggccaggctcggggacacagcctcatggtcctgagtagacgcaaag

SEQ ID NO: 100754 - DNA, 264 bp, Homo sapiens
gcaaaaagttgcacatgatgtttatgtgcagctttgttcatgattaccgaaacttggaagcaaccaacacatcctccagtaagtgaatggataaaaaattatgggacatcaatacaatagagtttctttgtttttttattttctacaacagggcctcactctgtcacccagggtggagtgtagtggtgcgatcataactccctgcatacttgaactcctggactcaagcaatcctcctgcctcagcctgctgaatggctgggac

SEQ ID NO: 100755 - DNA, 409 bp, Homo sapiens
aactaaatttcctctttttcacaggctagataattgtttttctaaattcactaactccatagaggtgcttcctgccacgggccacttgtgataaatcttgagatatccctgcaatcaaatggagtcagagtagcacattctgatgctgctttaggtggaagaaagagttctttctttacaggaaaaaggatccagaagaaatcagcctgccagaaagatgtgatttttttttttccctagacttccctggatatattataatgatgagaactaatgtctgaatcctttaaatgccaataaaatatacatttggggtaatgcagttattatgaaaatataaaagccagtgttacaggcatttctattttacacctgaaaaaggagagttgcctagatacttgcacactgg

SEQ ID NO: 100756 - DNA, 825 bp, Homo sapiens
agcttgtctttgtttcacgttgctgtaatggaatacctgagattgggtaatttataaagaaaagaggtttatttggcttatgattctggtggctagcaagtccaagattgggcacctatatctggtgagggcctcatgctgcttgcactcatggtggaaagcaggacagtgagtgagtgcaaagagatcacatggtgagaaagaaagcaagaaagaaaaccaaggaagcctttttaacaacctacactggagggaaccaatcctttggttccaatcctcttggaaccttctttggaaccaatcctcttgttttctgtgaaagcaagaacttattcacccactctggaaggcattaatctattcaagagggatctgcttcatgacccaaacacctcccatgaggccctacctcccaacactaccacattggtccacatgggaagcttattcaaaacaagcagagaaaaatgactataagacacatgcacacgtatgtttattgcggcactattcacaatagcaaagacttggaaccaacccaaatgtccaacaatgatagactggattaagaaaatgtggcacatatacaccatggaatactatgcagccataaaaaatgatgagttcatgtcctttgtagggacatggacgaagatggaaaccatcattctcagcaaactatcccaaggacaaaaaaccaaacaccgcatattctcactcataggtgggaactgaacaatgagaacatatggacacaggaagcagaacatcagacaccggggcctgttgtgaggtggggggagggaggagggatagcatttggag

SEQ ID NO: 100757 - DNA, 258 bp, Homo sapiens
tgtggcttcgtggtcactgctccagcctcagccagggcagggagggggactccgagacagggaagaccggggccctcctcccttatggggccggcacaatcagtgggctgggcggagccgcagctgcaaactctgacacaaaagacgtgccttaaggaacccgccgcgtgcccaggtgccccgcggggcatccagctcggccccttggccgcccccctcccaggccccagcgtcttctccccagccccgtcctcccac

SEQ ID NO: 100758 - DNA, 667 bp, Homo sapiens
agacagtctccttgtgcgatctcccagacatgagagccctgctgggctttctggctcctcctccgtgcagagttgtcccgtcaggagccaggaggggcgacgctggctccgtgggagggtgaacagtggctcaagatgagaagcgtattgagacaaagaattctgaaaccgaaagatgtggccatttattctggagaagtcaaccaagttattgctgacttaattaaaagaatctacctcctcaggagccaggcagaagatggagaaaccgtgaccaatgtcaatgatcttttcttcaaatattcaatggaaggagtggccaccatcctttatgagagtcgtttgggctgcctggaaaacagcatcccacagctgactgtggaatacatcgaggccctggagctcatgtttagcatgttcaagacctccatgtatgcaggcgccatccccagatggcttcgccccttcatcccaaagccctggcgggaattctgcaggtcctgggatggactcttcaaattcagccaaattcatgttgacaacaagttgagggacatacagtaccaaatggaccgaggccggaggggtgagcgggggacttctcacatacctcttccttagccaggctctgacgctgcaggagatctacgccaacgtgactgagatg

SEQ ID NO: 100759 - DNA, 735 bp, Homo sapiens
tccagggctgcagttattaacttctctctccccagcaaaaagtctttcctgtcttaattctactttgttgggcagctcttgttgattctttatggctgaaattttttctagaggttccttgaattctttcccagaatgtcagtgtaagtaagatgatttgaaactcacttgattcttctagggagggtgaacagtggctcaagatgagaagcgtattgagacaaagaattctgaaaccgaaagatgtggccatttattctggagaagtcaaccaagttattgctgacttaattaaaagaatctacctcctcaggagccaggcagaagatggagaaaccgtgaccaatgtcaatgatcttttcttcaaatattcaatggaaggagtggccaccatcctttatgagagtcgtttgggctgcctggaaaacagcatcccacagctgactgtggaatacatcgaggccctggagctcatgtttagcatgttcaagacctccatgtatgcaggcgccatccccagatggcttcgccccttcatcccaaagccctggcgggaattctgcaggtcctgggatggactcttcaaattcagccaaattcatgttgacaacaagttgagggacatacagtaccaaatggaccgaggccggaggggtgagcgggggacttctcacatacctcttccttagccaggctctgacgctgcaggagatctacgccaacgtgactgagatg

SEQ ID NO: 100760 - DNA, 185 bp, Homo sapiens
accctgccatcatcgtgtgaaagcagccagagacaatatgaacaagaataggtgtggctgtgttacaaaaacatttgttgggctgaatttggcttgagtgccattctctaaggagtcaacataatccagggaaaattatatggacttcataattagttttgataatcagaataacagaaataatt

SEQ ID NO: 100761 - DNA, 173 bp, Homo sapiens
gacaaattttgcatttgacaccaagactcaattgggcaaaaaaaactgatcttaactgatgtgagattatttatgttctatgtgtgaaatttactgaaaatttatatgtattcctgcagaaatatttgatgtggtaactgtgctcttccagatgctacacaacaaaaaaagca

SEQ ID NO: 100762 - DNA, 769 bp, Homo sapiens
gcagtaagatgctgtctatgaaccgggaagcagaccctcaccagatgctgaacgtgctggcaccgtggacttctcagcctccagaaatgcagatgacaagacccaaggagatggaggagccacacaactgaaagagatgaggttcctgaatcaccacatggagggaagtggccactgattagaaacatctgcctgtttcataaggataagtaaagagggaatggatgccacatggtgcagctgcctaaaagctaagaaggggtcatggggtaacaggaaataccaaggaaaaataataattgatccagagaaaaggaaagaagaatggacttgaaaccctcctgaggctctaatgatggtgattctgcaaggctgagagcagagatttacatatttgctgtcaaggtgaaggtaccacaacgtggatgccatctggcaggcacctgggtggctgacacgcaacatcaagtgcagtatcatgaaaattagccaagctgggccctggtacttcattgctacctggtgtgacggtggacacccaacatccacaccctggctcccagtctccccacctttaaaatggatttgatctccagattgctacgtttgtgtccatatgtaatggacaaaagtggtgatggactaacaaattacgggatgaggatctgcaggctttatttactactaaaatgtttatttcatgtgttgattatctgcagcatcgccaccttgcagttagtcactggagtcctctcagaataggaaccca

SEQ ID NO: 100763 - DNA, 711 bp, Homo sapiens
ccaagcagttgggacctcaggtttgccccactgtgcctgagtaatatttgtatttttttgtagagacggggtctcagtatgttttgttctgtgttgagacagggtctcactctgttgcccaggctggagtgcggtggtgcaatctcagctcattgcaacctctgcctcccaggtttaagcaattcttgtgcctcagcctgctgagtagctgggactacaggcacatgcctctatgcctggctgatttttgtatttttagtagagacagggtttcaccatgttggcctggctggtcttgaactcctggcctcaaatgatctgccctcctcagcctcccaaagtgctgggattatagatatgagccacgtgcctggccatcttgtttatgttttagagacagagtgttgctctattgcccaggctggagagcagtggctcgatctaagctcgctgcaacttctgtctcccaggctcaagtgatcctcccacctcagcctcctgagcagccaacatccattctactatggttccgtggggctctctctcttgcgatctgttctgtcactttcttgttggcctccaacctccctcatcctcactcagctgatgaccttgctttcggcttcagtgaaaaaatcaagcagaccttccgcacaccccaccaacagctgtgcccgcctgcctgtccctgtgccgtgcatgctgcctccc

SEQ ID NO: 100764 - DNA, 1229 bp, Homo sapiens
ggctggtttcttttgttgccttctacattcagtcttttggggtatgttattttagtcgaagtgtatggagaaaatacagctgcaatgataggtagtcagaaacagaggagcgtttttcagataattgtggatgttttttgacactacaccaaagctcaacaagtggaagattcatgtcagctgcaaggtggaatctgaaaccctatcaatgagcatttcattcattgttacattaaaatccattagcccatcttgcactttgaaaggctcttttacccatgcatggttttataacatgatgccatggccacttagaaaatgttggtttactgagttatgcacatcttttaaatatggatacgtttcattacacaatatcaaaatatcacatttcattaaattacaactgatcttgtcagaaatgtctctgaaaattctaagtattgaagagttgtcaagctcatacttgtggatgtaagtctttcaaaatccaattttcatttgaaagtttgactcataattatcattggtatcaaatactgtcagtttttctttaagtgatagattccctttgttcatttgacaaaatctgccaaaaagcgaagtctgaataaccagtttgacaattgttctttcaagtaaaaatggtgttccttgaagagtggttggtttagcttttaactctaaacttttcctggagatagccatcacatcttggtatgcagcaggactttatgtacgcatgcttcatattttaccccacaaagtattaaaaagagtcagggttgaatttcaataaaatgaatttatgctgctttgtgaagcacagtcttaatttaaattgtccctttttgaacttgtggtgaagaatacaatgattactggtgcagtttggtgccactgtcttgattcacgctaatgcaccagtagttttacccactgtggctatgaaccatgagtgcaaatgtcagcacagtgaaaaaggcaaatagcatcttagtatttattatgagaatagttttcaacttctgaatctccagaaaggattctggggactaccagggcctagggatttcacacttggagaacttctgccaatcatctactaaatattcaggacatgggccaggtgtggtggctcacacctgtaatcccagcactttgggaggctgaggcaggtggatcagttgagctcaggagttgagaccagcctgggcagcatggcaaag

SEQ ID NO: 100765 - DNA, 390 bp, Homo sapiens
ccatcctctcacgcgtccttccaggtccatccctggattattaatcaattaataattaattgacaatgaattattcatttgattaatatgaataattcccctgtgaactgcagcggcaaaagctctggccttgaatctaggcgcggcatttaccatccgtgtgacattaccaagccactgaggtttattttctcgtctacagaagaagaacgattaccatgcctgtctctcagggctgctgccagggttaactgagacaacagacagaaacctctaatgtcccctctccaggcctgttcaacccttcggctcttgcctcaagccggccgcgctgctggagtgtggactgaggaccagaccatgtagcccttgatcccctcacggcgtccc

SEQ ID NO: 100766 - DNA, 630 bp, Homo sapiens
ctgatggttaatcgtagacatctacttgactggattgagagacacacatagctggtcaaacacgatttcagccatgaatcaggcataaatattctgatggttaatcgtagacatctacttgactggattgagagacacacatagctggtcaaacacgatttcagccatgaatcaggcataaatattctgatggttaatcgtagacgtctacttgactggattgagagacacacacagctggtcaaacacgatttctgggcatatctatgagggtgtttctggaagacactgagataaccatgacccaatgtggatgggcactgatatggtttggctgtgtccccacccagatctcatcttgaattgtagttcctgtaatacctacatgtcgtgggagggacccaatgggaggtgactgaatcatggtggtggttaccgccatgctgttctcatgacagtgagtgagttctcatgatctgatggttttataaggggcttttcccctttgggtcagcacttcttgttgctgccatgtgaagagggacagctttgcttccccttctgccatgattgtgaggcccctgcagccatgtggaactgtcagcccattaaacccctttgttctttata

SEQ ID NO: 100767 - DNA, 343 bp, Homo sapiens
actcttttattcccaacaagttcagttttgctgacacttactgagagaggttatcatttggctgaacaccattgaccctctgaaagttatttatacatacatattcagggaatatatgtcacctaaattgaaacaattcaaattcttagtattctaatgacatgagctaaacctactggatggctccaactcatcaaaaaggacatggatgtttttcccttattaaaaataaaagagaccaggcgcagtggctcatgcctgtaatcctaacactttgggaggcagaggagggcagaccacctgagttcaggagttagagacgagcctggccagcatggtgaaa

SEQ ID NO: 100768 - DNA, 786 bp, Homo sapiens
gatctctgctcactgcaacctctgtctcccggattcgagtgattctcctgcctcagcctcccgagtagctgggattacaggcatgcacaaccacaccctgctaattttgtatttttagtagagatggggtttctccatgttggtcaggctggtctcgaacttctgacctcaggtgatctgcccaccttggcctccaaagtgctggaattacaggtgtgagccaccgtgcccggccaggagcttggtttttaatgggcttgccgtggccaagccaggccaggtgggagaagcggcagccttgccctggagggttttgagaagcactgctcctggaggccctggggaaggtccctgaaacctttggccaatgtggctgtccccatggtccacatgccctccccaccccctgcctagctgcttgactgcctgctgctccccagcccaccagcctgtccgtgggtcagcccagccacccgcttcggatctctgcacgtgtgtcacctgctgttctggccctcatcccaactatccacctgcccatctcctccctacctcctcgctgcctatctgcccaggacttatctgctgtctgctcacctgcctgcttgttgactgcttctctgccctcctatctgcctgtgagactagagatttgtcaccttggaaagcacggagagtactgctaagatgaaacacaggaaggacaggccttgatggaaggttggggggccgagagatccagagcctatgggaggggacttgtgagtgctggcatattcaggaccc

SEQ ID NO: 100769 - DNA, 264 bp, Homo sapiens
tgactggagataggtaggtttgtgtcctttgatttctccctagatgaagttgtaggtggagtaagaggtgtatcaggcagtccttgaaggagggggcatatgagtgctttgctgaattgggtgagaagagtgtttagaaaggaaaaagccatgagacagtattaagtcataaataaacaagaggactttgtgggtggaatggagctggagtatgaagggagaagaggagaagattgaagagtaacctgtgagagagggaaggat

SEQ ID NO: 100770 - DNA, 411 bp, Homo sapiens
caggccaagaagcagttggcatcgggttccatctgacttgatctatggcctaactaacctaaaataaagtttactttgctctgagcaggcccgattagtagagaaagccaattaacaggagcccttagcaaccagtcagggtgttctctgcagacagcctgagggaagagccctggtcagctcagagctgtcacaaggggcttgacaatggctctcctggggctcctgaaagtgggtgtccaaaagttacgagtgctaaaactacaaggtgcatgttatgcacatggccaccagagctacattggaacatttacatactgctctatgcagcctccaatcctggctctcccacggtgcccacaagctcatcccaaggctccctgccatacagcttcaccttccacctgccag

SEQ ID NO: 100771 - DNA, 349 bp, Homo sapiens
taaattcgcggccgcgtcgacattaatatcttatgtaaagaatccttgttaattataaaattgtgaccataatgaaataaaaataaaccactacaagtaaaaaacaatgcataaggtccctaattaatatcttatgtaaagaatccttgttaattataaaattgtgaccataatgaaatgaaaataaaccactacaagtaaaaaacaatgcataaggtccctaattaatatcttatgtaaagaatccttgttaattataaaattgtgaccataatgaaataaaaataaaccactacaagtaaaaaacaatgcataaggtccctaattaatatcttatgtaaagaatcct

SEQ ID NO: 100772 - DNA, 1485 bp, Homo sapiens
atttatagaaggaaaaagtatattttctgttgttaggaaagcattttccagtaatttgatttttctggcaccctaactaagggaagttggctttttaaattttactttgttgccagaagattaaatttaaggttgagttccactttgtttgcaatagtttgaaaaagaatagttaatgcagattttttttttaatttttttccttttaagctttgtgtcttgtacaatgtgagtttgccaaattttcttcatctgctacagattaggtatgccattgttgctgccatgtggcgtgcgaccccgtgcttcttaaacgcactgactggaggtttatcgcatcacttgttcacatgcacggagcctggtaacagcctcatctgtatcttgttagcttcattttcttatttttaaaatttcattatttataaactcaacatagcatttaaaaataaaggctagttttaattaattaatgttactacaaaaagtcattgctaaaattttcatagtgaaacagattttaacttttgttaaaatgtgctatgctttaattaaattgtatttactctacaagcagggatgttttacctgccattttaactgtatttgccaaattctaaatataattttgaaaattgaaattgaagcttatgtttatgtggcaaaagtaagcttcaggactgggctgtgtatttttattggcatgtaacagttaatatgagctctacaagaatttgtttttaaggagctaaagctatcaacagctgcagatttaaaaaattatatattaaaactgttaggttagctcagttgtacaacttagtgaatcttgtatcctgagtttctgaaggctggtggataggtatctctgaaatcattgtgttttagtctttttactgatagttttgtatagggaattcatcttctcttttaaaataacttttttcctttaatttatttctattacttattgtacataaattttaaaataaaaaaataaaagaaaaaagtcacttgtctatcacctgttaatagtttaaacattttggtttatttccattcatccttcccccccatgcattatttacatatttttttttctctgtaggcatattttaatttggatcacagtttactacttagtatctccttttcatgacatttgtaatttccctggtcattatttttgaaaatgagatttcttcatggttttatttcattttattttcatgcctgtgagtattttatcatgatggttgtcttcactctcctactcccaatgattcctagaaaagaaactttaaaacatgtttctacttcccattctgcagtttagtaaaatgatttggttaactcttaaaactttttgtggaataatgttctgtgaattcaagtatacaaggcaggaggatcacttcaggccaggagttccataccagcttgggcaacatagcaagacccctatctacaaaaaacaaaaagaga

SEQ ID NO: 100773 - DNA, 2046 bp, Homo sapiens
ataatgtaattcaactcttaaattatttcctgccttttcttcactcctatttacatgtgaaagcatgtgatcaattgttgctgcatcagatatgagagattcttttttattaggtgagcattatttataaactttgctatgaaaaagacattaaaatatgagatgtatgatgaaaatctaagtgaagagacttttatggttaacttataatattaagcaatgtgtgcgttaggcattcagagtaatattctgcattatgagaaaacttaatttcatttataagtaaattaaaattagtatattttactaatacttttatataaaatgcagtatattttttaaatttcagattatatgtgatgttaatatattcaacctttttaacatgttaaatactattgtgcattcagtgaagtgttattatgccacagacattaacctattccaccttactcaagggtgtacgtaaaacatggtaacagtatactatttggtaacataatggattaacatctctagtaatctcttttgctagtggctttgactgcaaataagttaaagaatattatttctgtaggttaaatttttgtttttattttattttatttttgagaggtagtcttgctctgtcacccaggctggagtgcagtggcacgatctcggctcactgtaacctccacctcctgggttcacgcaattctcctgcctcagcctcctaagtagctgggattacaggcacccaccaccatgcccagctaatttttgtattttagtagagacagggtttcataatgtaagtcaagctggtctcgaactcctgaccttaaatgatttgcctgcctcggcttcccaaagttctgggattacaggcatgagccaccgtgcccagccaaatgtttattttatttaaatttatttttcttaattatttggggtacataatatgagtatatattcatgcaatatatggcatattttgatacaagaatacagtatataataatcacatcagggtaaatgaggtatccatcacctctagtatttatcctttgtattacaagcaacccagttttatacttttagttattttaaaatgtaaaattaaattgttattgattacagtgttatttttatggtcataataaaagttatgtagaagtataataaaatccctacatttctgaggcctgaataagtatttttaaagttttctaatatttattttttgagcatgtttcctgtctgcctgcaaacacatgcagacatttagttttgatttacatatagttaaatatatgttagtctaaagataaaccttaagtgtaagaaaattatagagtgagtttgtgtgtatgaatttgtacctgttttccgaagaaaaaagcaatactgaacaaaacaaatcattttaacaagatgactactagaaaactaaaagcctcaaaaatgctaaaagaaaatgtattctctgctttgtattgaatttattactgtacattctgtggcttatagttctgaatctccccatgaaaattctgtttatacttgcctggtactcatgatagacccctaattattttgtatcttttttcatataaatattttacagattatgaagtattcattatgtgagctggtctgtgattataagaataatttttacaaaatttagtgcatacaaaatttttaaatgtaattccacaattagtgtattaagttacattttatttagttagaacacttcattttgtttttagttggagaactctatagccctttagttatttttcttttcactttttatagttgacataagtaaatttatttattgagtcaatttgttcaggtaagtactagggaagctttataagtcgtgaggatgtttttatatttaaatgtagcaaacatacatgacagttcttgctgtgtaacagatgctccatagtaagccataagtattcctgctaaagttagcttgtaacttcagttcagagatggaaaacatcagtggtgaagaaataaaattgattcttcatgtggagagga

SEQ ID NO: 100774 - DNA, 1184 bp, Homo sapiens
ataatgtaattcaactcttaaattatttcctgccttttcttcactcctatttacatgtgaaagcatgtgatcaattgttgctgcatcagatatgagagattcttttttattaggtgagcattatttataaactttgctatgaaaaagacattaaaatatgagatgtatgatgaaaatctaagtgaagagacttttatggttaacttataatattaagcaatgtgtgcgttaggcattcagagtaatattctgcattatgagaaaacttaatttcatttataagtaaattaaaattagtatattttactaatacttttatataaaatgcagtatattttttaaatttcagattatatgtgatgttaatatattcaacctttttaacatgttaaatactattgtgcattcagtgaagtgttattatgccacagacattaacctattccaccttactcaagggtgtacgtaaaacatggtaacagtatactatttggtaacataatggattaacatctctagtaatctcttttgctagtggctttgactgcaaataagttaaagaatattatttctgtaggttaaatttttgtttttattttattttatttttgagaggtagtcttgctctgtcacccaggctggagtgcagtggcacgatctcggctcactgtaacctccacctcctgggttcacgcaattctcctgcctcagcctcctaagtagctgggattacaggcacccaccaccatgcccagctaatttttgtattttagtagagacagggtttcataatgtaagtcaagctggtctcgaactcctgaccttaaatgatttgcctgcctcggcttcccaaagttctgggattacaggcatgagccaccgtgcccagccaaatgtttattttatttaaatttatttttcttaattatttggggtacataatatgagtatatattcatgcaatatatggcatattttgatacaagaatacagtatataataatcacatcagggtaaatgaggtatccatcacctctagtatttatcctttgtattacaagcaacccagttttatacttttagttattttaaaatgtaaaattaaattgttattgattacagtgttatttttatggtcataataaaagttatgtagaagtataataaaatccctacatttctga

SEQ ID NO: 100775 - DNA, 352 bp, Homo sapiens
gtgtcagggaggtggaggcccaggcctgccagcagggctgccgctcagggagctggggaggcagtggcagctttggcttgctctgaggctccagcccaaagatgtggaacagaacaggacaggagagtccctaggtgcctcggggtcagtcctcagaagtagccctggtgaagtggttaaagggggaagggcattaggcagagagaatgaccctgcacgaggcccaggtggagaggtgacccctgcatgtaggcacagggtcctgtggctagggctgagccacccggtgctgcgggtggacaatgtagacagggcttgatcctacaggtgcctgggggtgacccaggccaac

SEQ ID NO: 100776 - DNA, 794 bp, Homo sapiens
aggcaggagaatcacttgaacccaggaggcagaggttgcattgagccaagaatgcaccactgcactccaacctgggcgacggagtgagactctgtctcaacaataaaaaataataaagtgcttcattgcagtaactcaagtgtgtagggagaccctgggctggatggcatgcctgctggcagacagggtatgacccaggacccccaggtgagatgaacctgtcttgttgaattcccaagttaggagagttttcagttgttggtatattttgtcaggttagtaatctgaaatcatcaaattgctaatgtgcgaatgtgtattacttaccaaaatgtctatttttattctttttgaagttaagatctgaagaacagctcaggttcccaacattctcagagaataatgtcttgagaataagcaacctgctcttaagtaggtttgtcttgtccatagcagaatttattgccagtgccaaaaatcaattttggctaatacagcaattaatcaaaatttgctgtattgagtgaggtaagggcaattaggaaatcatgagttgggttttctatttgtttctgctgtcaagatttgtgttttcttaatgttgatttcttatttatggtgatgaggagggaggtgaaactatatttagttttcacaagtatatttgaaattctctggccaggaattcacactgggttcccaagcccgttgtgtgctgacaattctgacagagcaaatcattaatgctgatgtgtatttttgaggaagccacttccagggacacttagaaatgg

SEQ ID NO: 100777 - DNA, 214 bp, Homo sapiens
tatacacacagcattgtatacacgtacacaccatcaccatgacatacacacacaaccccagtgacacccagcattacacaaacacatccaaccatgacaacagaacagtacagtgacatagcaccttcacagatcttcccccaacacaacatcactctgacacatatacgatcccagcgtcaggacacaatcacatgggcacacacatctcact

SEQ ID NO: 100778 - DNA, 509 bp, Homo sapiens
acaggtgcccgccaccacagccagctaatttttatatttttagtagagatggggtttcactatgttggccaggctggtctcgaactcctgacctcaggtgatccacctgcctcagcctcccaaagtgctgggattacaggcgtgagccaccgtgcccagccagtgcctgccttcttttgctctgcataattattttgagacctcatccctgttgttgtgactatcaataaatagttcattcctttatattgctaaatagtatagtcacatcacaatttgtttatccattttttccagtttgtgactatcataaataaagctgctgtgaacattagtacacaagtcctttcagtagatacctaggagtggagctgctggtaggtgtacgttaacttcttttttttttttttttgagacggagtctcactctgttgcccaggctggagtgcagtggcacaatcttggctcaccacaacctccacctcccaggttcaagggatcatcttgcc

SEQ ID NO: 100779 - DNA, 192 bp, Homo sapiens
atgtgtttctcaattcttgccaatgatgtgtttcaggtggatttcaacactaagctatggtcagttgcataagacggctgccggttttagagacaacacgctgagttcctaagaagggctgggctcatgagactgggctctggagggcatggcctctgcaggtgactcagtgcggggctgaggcctggtcat

SEQ ID NO: 100780 - DNA, 285 bp, Homo sapiens
agcgtagcataggtattcagaatgtacaccaataatgagccaaaaggacagcttctctgttagatttgggagattttgtgtaggattatttcagataattaatgtgtagtcccatgaatcaagcagtgttacactgaaggtcctttgggttatagtaaaagctccatcgtggtaacctgatttttttttccaagacagagtctgactgtcgcccaggctggagtgcagtggtgcgatctcagctcactgcaacctccgcctcctgggttcaagccattcttttgc

SEQ ID NO: 100781 - DNA, 180 bp, Homo sapiens
gaaaacgttcagtaaaaatatggtaataaaatcttacgggaccactgttgtagatgtagtctgtcattgaccaaaatgctattatgtggcgcttgactgtaatttagctatttgaaggaagccaggttacacacacacacacacacacacacacacacacagagggtatatattgtataa

SEQ ID NO: 100782 - DNA, 407 bp, Homo sapiens
cttacgggtggggcctttgttccaattagtgtgtctttgttgtagcttcccctgctgaattgtagatgactgtactatggatgtttatgaagtccagaggggagtctcctgaccaggaagagttgcaagtacagaagtgcttcttcctttggggccccacaaccctaatgacctctttggagcttcagttctctatgactgatggtattgctgattggagcctcttgcaaaaggaagcagcattcacccttggagttctggactcacagctctgacgttgaaacaggtatattcctttaaagaagggtctcttctagttaaactgaatgcctggcccgtggagaccttgtaactcttttttttttttttttgacggaatcttgctctgtcacccagtctggagtgca

SEQ ID NO: 100783 - DNA, 750 bp, Homo sapiens
ctaaacgaccaccctctctgaagaccaccctctctgaagacgctgcactatgcctcagtgactgccccaagtacatttcactttgcaagttcttgaaccatctcactggggtaaggtttgatttgtctttttggatactatcatttctttcacaaatcttagagaatccagtgggccgaaattatttctgtgttctcccctcaataccagcatatgattgattgaccagcaatatgtctccggaaatggacactgggttggtttgaagacaatcttaacttctcaaagggtttgcttttcaaaggaagagtacaccaggagattcctctcagccccagggcattcacctgctcccttgagaggctacactccaacctcaggttgtcctctgtctcccattcccagataaccagagttcattccaggccaggagctgaaatttaccagagattctagcatacacagccacagtggatattttgatttatcctcagaaagtactgaaacccaggaccaaggaaaaaactgaagagtgactaaggacacattaccttataaagtttccaaagggaaaccttgacccaaaaatattctgataagatctctgtacctagggaagatttaaaaaaaaaaaaaaggcacagagattttttacaatacagcatcaggggatgagtctttggtttcttctcatgggaaatatttacaaacagataacaaatcttttttaaaatgccatccatgctttgt

SEQ ID NO: 100784 - DNA, 562 bp, Homo sapiens
tcccaaataatgatacttcaaaaattacacacatattttcttttgctaacatgagtatagtatgtggaagaaggagcgagttcatcttgtggagagaagtaaaaaggacaccctcttgagaacttttcatgtttctgcagataaatatctaataactaaacttcaacattcctgaaactttaattttaaacattcaaaatacactgagggaaacagataagagaacaggcaactgcaatatagtgtaaggagtgctatggtaggagaaaacatgggccccatgttggaaaatcttaactcagagtcaaaagtagtcatggaagagttcccaaagaagataacatgtaagctgagtcctgaaggagaaaaataatctagctacagaaaaaggtattccagttaaggcacagatattcaaaaaagcagaggtggctgggtgcggtggctcacgcctgtaatcccagcactttgggaggctgagacggccagatcacctgaggtcaggagttcgagaccagcctggccaacatgatgaaaccccgtctctattaaaaatagaaaa

SEQ ID NO: 100785 - DNA, 429 bp, Homo sapiens
acctccacctctcgggttcaagtgattctcctgcctcaacctccccagtagctgagactacagccatgtgccacggccagctaattttttgtatttttactagagacggagtttcaccgtgttagccaggatgggtctccatctcctgaccttgtgatctgcccgcctcggcctcccaaggtgctgggatcgcaggcgtgagccaccgcgcctggcctatttctcaatattttaaaaagcaatttcaataatatgcataatctttttaaaaaattttaacttccccagttttttagaagatgcataatcttatacaaatgcataaatgtccacatacatattgattttttaaagtattctttccctccccaatgtttttgttacttaacttccccattccctcttatcccttctgctacttccacttcc

SEQ ID NO: 100786 - DNA, 249 bp, Homo sapiens
ctattcttgtgaagagagaaagatacgttgttcttctgttttcacctttatgaaccatatatgtttctggttgaaattatgtgtataaacacgtgaacacatttatacattatacatatatgtgcatacaactatatacaaatttaggaaaagcatgtgcatggtgtgtgtgtgtgtgtgtgtgtgtgctgataccaccacatggattaaatctcaagattaatgtatataatcccatagagcccaaca

SEQ ID NO: 100787 - DNA, 383 bp, Homo sapiens
gggtgctctcagtatgaataaagcatttctttgcttgttgtgtattaatttagatcctcctccttgctcatttcatatttaaaactctcccattattgacataacaacatctctaaagcaattatttgtgattttcttttttatgtgacacagaattgtgaccaaagggggagtaaaccgcaaatctgattaactctgaagtgacaacactcccacatttcatgcacctgctggaacaatcaaatgatggagaagagggagggcagaaagcaggagtgcctttcaacaggaggcccgagggaaggtcgctgtgggtcactgacaggcaggcagacacccacagagaaatctgtgccagcatgtctagacatggcaggaaatgc

SEQ ID NO: 100788 - DNA, 750 bp, Homo sapiens
aacctgcgttagagtcacctcctccaactcagctgcaggcagaaacatcacgggaagtatttcaagagagtttgatggttaccaagttgattagaagtattaagggaaactgagactctgaagattcattttatcataaggacaatcatgtcctcccaaaaaacaagctgctatggcatctgctgtcaagagggattgccagatacaatataccctatattacagagtcgacacgaagttgcacattttacccaggccgatttctgagttacgggcctctgcagatgaaagaagatagaaagaaagcaaaatctatcttcacagtgcagtagacaaggagagagctctgcctaggaccaccaccatctggatacttgaacagaacgcaagctgtgcaacacttcttttaggctttaagatcaactgccccttttacagacttcacactgaattacctaagtccagcctcagagtcagacatgtgcattgggaaggggaggacagtggagtagccaggcaaggagggcagccaggagaaccaacatttcactattgaacatatgttcttccttgctctgtggctgcataattgtttctgttgagctctcatcacttccactcaaggcctaaagtgatgaaacaattctatcctggtttgccaatggcttgcattctagacttggtttctttccataaataattaacagtaatgctttattaaatagagtatggccttacttatgcttcata

SEQ ID NO: 100789 - DNA, 178 bp, Homo sapiens
aaaaggtgaaaaagaccaggcacacatctcttgcccacagggcactcaggctgcttgagtctcccctgcatccacgcactgagcattcatgtgatggaacatcagtcctggctgtctgcctgtgaggacacagcagggtaaccagggagaggcgtggaacaggacgtgcgttctggag

SEQ ID NO: 100790 - DNA, 1590 bp, Homo sapiens
gaaagattcatttattcattcaacaaacagtggccgaaggcttgttatgtgctgtgcctggacttggcatgaaggcaccagatgtcagaagcgaggctgctgcccaggaggacacacctgatggggctctgggaccaggacgatggtggagacatcacatccggaataactttgttaggaaggtgaacttgacagttaggacttagttctccttgaagacgtccttcacatccctttttcctgagctcgaactctactttttgcaacaagcagaatgtacacatgttaaacaagggcacacaagcaggtaacttggagattgtgaacggtgccgaaaaacacactcgagccaactccaagttccagcgaggctaaattggaagaggacagtgatgtgacttcttggtcagaagaaaaacatgaagagaaaatgctctttaccagttatcctgaggacagaaagttaaaaaagaacaagaagaatgcccatgaaggagtttcctggtttgttcctttggaaaatgtggagtctagataaaaagaaggaaaacatgctcaagactcatgaccctggcatctcccggttggaaccagtaaccaagaccaagccgtggagggagccactgtgggagcggaactggcaggggcagcacctggacagtcggggctacctggcaggcccaggcagagaggatggcagaaacccactgaagctgtttgtgagagcaaccctgcaggaatcgcttcagtttcacagacctgacttcatctcccacatttgggagcggataaagcgtctgaagttaatagtccaggagagaaagctgcagagcatgttaaagagcgagcgggatgcgctattcgacattgacagggaacggcagggccaccagaatcgcatgcgcccactacccaagagagtcttcctggctgtccagaagaacaagcctatcagcaagaaggaaatgattcagaggtccaaacggacacacgcaggaggaacagtagcacaaaggcttcccggtgccttgtgggtgaaagaaaggcttccagggaaaggagagaaacacccagggatcccggtgacgtcgggaagcagcacccagaccatgtaaggacaccgcctgcagggggagactcaaggcctgggaaggttttctaatctgtgccttgagtcgggtggggggattttctgggaaaggaaaaccagacacagtaggacaaatattgtatagtttcacttatatgaaattgtcagaataggcaagttcgtagagacagaatgtagaacagggctttccgggggctggaggagaagacaaggagttcttgcctagtgggtacagagtttctgtttgaaatgatgaaaaacttctggaaatagattgtggtgacagttacacaccattgtgaacataattagtaccactgaactgtacacgttaaaatggttagttgtatgttttatgtattttgccataataaaaactagggggaaaaaaaggaaggggagattgtctcaggctggctgactttccctgcatgtacgcacatcttcacatgtgcacacatgtaaaacaaaaatgaagc

SEQ ID NO: 100791 - DNA, 751 bp, Homo sapiens
gcaggctttggtactcataattctttttagagaaggatttttaactgtttaaaagcaattgattccagttattgatctcttttctagacctgtgcacaatttggatttaataatctgtcttatgtaaattaaatgtggtggttttttttgttttgttttgtttttgtttttgtttttgttttttttgaggtgggatcttcctgtattgcccaggctggacttgaactgggctcatgtgatcctgcctcattctcccaagtagacaggattataggcacaggccactgtacctgggctctaaatgtacacttttataactgctagtttgggagtttttctctcattgaggagattgctttgtaatgcttccaatgttaagaatttttttgtacttttcttatcctagtctcttatgaaagaaagatatagtaactacttcatcaattttcatttttattactgactttcacatatcaagattcagaagttctttaaatatttaaacacgtattcttgtttagtccatatactacctcttttctgtcatttgaactctctctgcctcctaatatataggttatacagctgccttaaattagtgtaaagtaatacggtttcagtttttttcttgccgcatcttgtgcattctatcctctgtgttccttttgactttaaatggaaagagagcaggcgtatgcgccagcagcattatatgcctgtgactcctgagtagccttttccctctcctttt

SEQ ID NO: 100792 - DNA, 418 bp, Homo sapiens
caggtttaattctggcctacttaaacaaaggaataataggaagaaattttttctatatcttttagaattccctagtttgccttattttgttcatctttttttttgtgctgatagccaaatagttttctaagtttcacatgaggctgtggcagaaacacatgtgaatttggggagtgtctgggaagctgatgagcacatctatgtattggaccttttactctaaacaagcggaaaggatttctttcttttggccagagtacatccttctgttttcaagattttagttcactgcacattgtgtatttctttttagtaaacatttctttattgaaaaagtaatacagattcatatggacaacttagaaaatagaaaggcagaaagaaaggaacaaaaattgcccataaatgaaccacccag

SEQ ID NO: 100793 - DNA, 389 bp, Homo sapiens
atataaaaattagccgggcgtggtgtcatgtgcctgtaatctcagctactcggggaggctgaggcaggagaatggcttgaacccgagaggcggaggttgcagtgagcagagattgtgccactgtactccagcctgggcgacagagtgaggctccatctcaaaaaaaggaaaacattagcttttttactttcttacttcctggatcctcagagctaaacatgagtggagaacaggcggaatcacaccaaccctgtctttgtcacagcacctgtccctctattctacttacctgggtgtgtcttcccctttgccaggctgtgagctccttaagaacaggcagattgaccctttctttcctagcactgtgcccggcacagagctgctctcaa

SEQ ID NO: 100794 - DNA, 768 bp, Homo sapiens
cccatttcaaaactcttaatcacatcttttgacttataaggtaatatttacagattcaggaatgaggatgtgaatatctttgggggccattattcagcctgccatagatctcatgtggatttccagctgttttagctctttacactaaatgatccatcttttctcactgatattcaacatcagctctctcataaatcaaatttacataataattttatgttcacattatagtatatgaacgcatttgtatataaacacaaagacacttgcagattaatcttatttgtgtctcaataattcagtaaggtaggctggaattattatctttattttacagatgagaaggctaaagcttagagaatttaggtgagttgtctgtggggcttcttaatccaagatttgaattctaggttgtgacagtcctggtccctgtcctgtaccacactaccccataaagacatggttccgctgaaatagtgcaacccatattccattcttgtaactctcagaaacagtcaggttcccagcccatccagaaactctatccagtttttctaaaacattttaaaacacctatataacaactcatcaaagattcctgtataacacaaggcatttaaaatattcaaattacctctataatgcttaaataagtaagtatataaatgggtgtattggtttgtagcacgtaaagatactgtacaattttagacatgaattacattttctttctgcactgctgtaaacatgaactgtaatacaaacaat

SEQ ID NO: 100795 - DNA, 443 bp, Homo sapiens
ctcttggcttcttgggagaacaaattgtaggagagcaggaaaagaaacatggagacagatgagagcaatgtgacgtggacagtgttgatggctgtggagatgcagagacatgagatgtgcaagaggctagaagaaaaaatgaggaatgtgaaggcacatgcttggaaagtgaaaagcctactggaatgaaaagggcatcattggctactctgtgaggactctgaactggaaatcatccccaccctgggttgccacagcaaatgtttaatctcaggctagtcttcccttgtagctgccctgcatgccttaccacgactcctgcccccacaccccagtcctcatggtgtgcctcaaatcttaatactagtctgagctgaataaaacccgatgctggcccgcccacatccccctactactactaacacccgcccgaccgctccata

SEQ ID NO: 100796 - DNA, 747 bp, Homo sapiens
  misc_feature (2)..(3): n is a, c, g, or t
  misc_feature (26)..(26): n is a, c, g, or t
  misc_feature (94)..(94): n is a, c, g, or t
  misc_feature (227)..(227): n is a, c, g, or t
  misc_feature (319)..(319): n is a, c, g, or t
  misc_feature (378)..(378): n is a, c, g, or t
  misc_feature (387)..(387): n is a, c, g, or t
gnntttcctacaagcacagagtttanttttcaagacgttaaaaaaaatctgtcccggcccaggggactgaacatcagaagccagcctgaccagncacgtgtggccttggggcaggtccactgctgctttcttgcccagctagcaagcacaccacccacctcccgcatcaaatgcccaccccaacccaactccctgccgccgccgcgctgctcggggagtgactccanggtcgccttcgtggagacatgggtagtctgagggggaaggccacgagatccagccagatggtttaaaaattcttaaggaactcttcagccanaattcgggcacgggcattgactgacagcttcatctcactgatctccttgtcaatctccnccatgaagnggatcacaaagtccaccaacttgtgtttgtacatctgcctgctctttcttacctccatgccttttaaagatgttgtctctatttagaatatccttgccttgctgcataattccatatcattatgactcatcattatgactcagcacagattgcattgccttcccagaaactctcagaccctatcctaatgtaagctgctgtccctcctctgtactcctaggctctcttctctgtctctctctgatcttactacatgatttggtcattctttttatgtttaccacattaaattgccaatatttgaccatttttgccctacaagaacaatttcttttttcttttttgagatggaatctcgct

SEQ ID NO: 100797 - DNA, 486 bp, Homo sapiens
gcaccctgcacctgcctcctaacagccctcttcacccagtgtcataacagcctgttgactggggtatctctcccctagactccaagctctgaaagggcagaactgtctgcttagtcaccaatatctggggcacatacttgacacaacataggtatttattaagtgaattaattaattagttagtaaaggagtgagtgaatgaaacagaatggcatgccattggtagacacacaggatttcatatcagttaaagactcttcctacctcagcctgactcatcattttactgaggaaaatgatgccttagagaagtcccatgatttgcctcaggtcacacacaaacagatattaattgggagagggtgtgtcttagtctgttttgtgttgctataacagaatatctgagactgtgtcatttataacaaacagaaatttatttggctcattgttcttgaggctgggaagtccaagatcaaggggctgcat

SEQ ID NO: 100798 - DNA, 434 bp, Homo sapiens
gcggccgcctactactactaaattcgcggccgcgtcgacaacgaatgtaaaatcctgcaatatccttgaaatccaaaagaggtccatgacatagacccaaaggtattcatgagttattcatttaaatgcctggaactgacttcttgataaaaatataaaaaataatttccatgtaagttaccagaaagcccaccagcaacataattttaaagcctttcagattacttttaaaaaatgcagcttacatataacaacttgtgcctattttatttctaatctatcacttcaaaagatggtaatctttcaactcattattcctccaatttttaatgtcgaatttttttctaacacaataaccaaaagcttttatttataaaaaggcttgaaaaatatagacaatctttaatgtattatttgtaattatattctacctg

SEQ ID NO: 100799 - DNA, 353 bp, Homo sapiens
gaatatctaaacttccatctcaccagctttttgtctcagcgtctagtttgtttgagccataccttttttctataactaactttaccatttcaaaggggtttaacttttaatggcatggtgagagcatgaagaacctcagccctccaagagggtgaatgtgcaagatttggagagtataggaaataactcactctaaaattgaaaccaggagagtggaagaaaattgaagtaatgaccaggcgcggtggctcacacctgtaatcccagcactttgggaggccctggcgggcggatcacctgaggtcaggagatcgagaccagcctggccaacatggtgaaaccctgtctctact

SEQ ID NO: 100800 - DNA, 793 bp, Homo sapiens
aacaaacttgacatgttctctttacctcatttcccaaggtgaaataatcacaaaatggtaagtagctaagctttcatcatgccaaactgctgaggagagatccatgggagaggtgttatggacaaacaccaagcaggcatgcgcccaaaggaaaaattcaggtagatgtttgtatcatttttatgttactattttcagaaacatgcctgattttaagtgactctacttacattctactgttcagatgattcttatctaagtccagagaatcatatacagtcactggaaacagctcccacatcaatgtatattgaaaaatgactgttaaattatgtacacaataccgtgctccttgtgggatctgggaagaataaaaaaatatgtacacaataccgtgctccttgtgggatctgggaagaataaacaaagtcttcttttgcttctccagccagcacaaccaaatatcccaaatctacatagtttttctcccttcttctccctcaacctcaattagatctatgtctgtttgtttgttttaactactggatttaaaaagtgcttccagaatacagtactagtttgacagtcgctagcagagttgattacacattaaactaaacatagatggatatgtcctctttcagacagctaaaattaccttttggttgggtgtctgttttggaaagctcaatttcagttccagcaactgtacacctgaaaatgcaaggcatacccattaggaacaaacagtactttttctctatttaaaccctgatggccttgaggaggcaaa

SEQ ID NO: 100801 - DNA, 118 bp, Homo sapiens
ctttgccctgggttggtcctggctgagcacccacaccctgagccctgctccaggaatgtctgcagcttgtcccacagctggccatcaatcatggatggaagattcctgccctggcatg

SEQ ID NO: 100802 - DNA, 675 bp, Homo sapiens
gggagacattggacaggacagctctgatgatattcacagcgggactcttggcctgtccctcacatccgatgcaccctttttgtcagattatcaggatgggggaatggaagacatcgtaaaaggagctcaagaacttgataacgtaatcaagcaaggatacttggagaagaaaagcaaagatcatagtttctttggatcggagtggcagaagcgatggtgtgttgtcagcagaggtctcttctactactatgctaatgagaagatttacagctactagtccagcagaagccagagactgggtggatcaaataagtttcttgttaaaggatctgagctccttaaccattccatatgaagaggatgaggaggaagaagaaaaagaagagacatatgatgatattgatggttttgactccccaagttgtggttcccagtgcagacccactatcttgcctgggagtgtggggataaaagagcctacagaggagaaagaagaagaagatatttatgaagtcttgccagatgaagagcatgatctagaagaggatgagagtggcactcgacgaaaaggagtagactatgccagttactaccagggcctatgggattgccatggtgaccagccagatgaactgtccttccaacggggtgacctcatccgtattctgagcaagg

SEQ ID NO: 100803 - DNA, 406 bp, Homo sapiens
tcggtcggtcccgtgaggtacagctgaaccaaagtcctggaatatgaggagaggagaggccagaacaggcctctggggattcactaagtgcatcactccaaggcccaactgaactcagaccagtaaacatcccatactctgtggcaagtctgcagaagggaggatgcagcccctgtcctcagggaacatacattctaacaacatatgacataatgtgcccataacagagatgctttgggagccaaacaatgcaaggggcaaacccacgttcccagaggaactcactgttttggtgacttttcttccataaaattgtcaggaaagggcaggctgtaagatagaccttctgtctggagacaggatacgtcaaggttaggatcacaagccagagtccagctacccaggt

SEQ ID NO: 100804 - DNA, 223 bp, Homo sapiens
tctcccaaacctacaccactaacccagtgcccacccggccattcaggtctttgccctcatccctaacccatcaccactaacccttcagtccacctgcccctttctagctgcaatttgccctttggccaacctgaattacatggactcactttataatcacttattttgcaaatgaaaatacttcttggccgggtgtgggggatcatgactgtaatcccagcac

SEQ ID NO: 100805 - DNA, 569 bp, Homo sapiens
agccgagatcgcgtcgactgcactccagcctgggtgacagagcgtgactctgtccccctccccccaaaaaattatagaactttcccacgctggaaacaaatcaagggtcctttaccagataaatgcataaacgaattgtgccatattcaaacaatggaatgcatttgagccatagaaaagaaagaactaatgttacatataacacatggataaatctcaaaagcattatgctaagtgaaaacagccaaaaacgaaaatactgaatgatttcatttctatgaaattctagaaaaggcaaaactagcgttagaagtcacttcagacattgcctgtgttgagagtgagacattatctacggtaggcatgagagaacattttgaatgaagggaatattctacatcttgatagtggtactggccacattgaattatttccttatatttgttgaatttttacttatatgtaaattccacttcaatcaagctgttaaaaataggaatgtgagaccaggcacagtggttcacgcttgtaatcccagcactttgggaggccaaggcgggcagatcacc

SEQ ID NO: 100806 - DNA, 226 bp, Homo sapiens
agataacagaaaaaaaaataaaatagcatgcaattaactaccagctggcattaaaatgtcaccctaaacacagcagtcactcaatgaatgtggtttatgaacaatcttccttgacattccactctcttctgtggggaaacttgccatacttttctctgattccaaggaaaaagccaggaactaaataaaagggccaccgagaaggcagccttttattggctttagt

SEQ ID NO: 100807 - DNA, 112 bp, Homo sapiens
gtgtgatgactccctccccagcaggacccactttatgcatacagtcaactggccacccacacccgggcttgaaggatgctggcatgatctccccagcaggctcatcaccaca

SEQ ID NO: 100808 - DNA, 514 bp, Homo sapiens
ctttatatattctaatgagtactacctttgttaacgcagtcaagtttgcaagctgtacacacatttctgagatactgacatagctggaacaattgtttgaagggcctattaaggtcctaccttcaaagcccagtgcccgttatgcagaagaatatcatcaaaagtggttaatctgactttgaagagagtattgtatttttgagaacagttaaaaatcatttagaattaactgacaaattaagcagtttatttttcatctgaaacaaagtttagaaagcattcacaaaactgcttttcttctatcaccataaatttaaggacttattctaaagaaaaagagttccgtaaatgagcaatgaaagacgctatgatctcccaaagtacatactgtgaagggaaatattcttagtaatgtatatttggtgtatttgtgaaacacacacacacacacacacacacacacacacacacacacatagctacacacaacaatctctcacccccatctcctctg

SEQ ID NO: 100809 - DNA, 377 bp, Homo sapiens
cctccatgtgcaggtgtgtgtgggctgggaaggtccatgctggggctgtgtggtgggcacagaagtcaaatactggaagggggctcaggagaagctgcgacctggtcccgtctccctgacctcaggcagacccagggtttcaaggtgacaaggtccacgggaagtggcggggctgggggacgctgtgttaggaaatgaggttcacctgcctccctgtcttgcgtgtgccctctggtgggaagcagatgcccccagtgaacccagaggtggtcctggttttgttgtctttgttttttgttgttgagacagagtcttgctctgtcacccaggctggagtgcaatgacgcagtcttggctcactgaaacctccgcctcca

SEQ ID NO: 100810 - DNA, 700 bp, Homo sapiens
gtggagaagccaaggccgcacactgtgtttcaaatgggaggtcgagaggagcatcagggtttaggccgggaagctgtggcagctctctccacagttccaaattcccaaagggacaaagctctgcagcgacaggaaggcagatccaacttgagacattttcctttatgacagggcagaaacagtagtgcagagctggagaagcctttattttagggggtgtaagaagtttaaatgtggtcaatctatctgtgagctgcaaattagtctagggatctaaatttagtctcaggtctaccaggtatctcaagacgccaagatgactcatgataaatcccagccttagtttgtccctaggcctctagagcaccacagttactggaacttcacaggtgcggccactgcgcacaccttcctggaagcaggcccagccccacacgccatgttctcggaggagaagccttctctgagatcctctccttttgttgagaaaggcctggctagagtgctttgtgcaggatggttccagtgcctacaccctaggtctgagaagccacatggctcagtgccttcaggacatgccctcccctcccctcctagtgtcgtttctgctgagcagctggtcgtaaggacccgggccttcagctttccccgcatgctggctttccaatttgacatcactgaccaggcactaagagattcc

SEQ ID NO: 100811 - DNA, 801 bp, Homo sapiens
agcgcgagattagagctcctgctagtccccagctgaccctgggcctcaaaggcaagccctgacctcagtcacacggggtggcggtgatatggtttggctctgtgtgcttcactctgcctcactcgccttccgcctgctggacgctgccctgttccccgcaggcggccgccgtggagggcaggcaccgcgctccctggctgctcccggggccttccaagcacagccgcggccatggggccgaaacccagacctcgaggggcctgcgggcggagctccacaagcccagctgctacactgaagggaaaaacctgaggaagcccctgaccttcttgaataacctggatattgcagaatcatgcctggcacacggcactggcagagacgcagaagggaaagtgtccagcgatgagagataccggccagggggcaaatcttcagcttgcagcactcactttgcagatccagttggaattatttgtgttgacgctctctgctctctccgctctcccctggaaatgacgaggaactgagtacagtggacaatggcttccgtgtccctagctccccccgagccatgagctgctacatcaaaagtctgcagtgggctgcccttcccataatatttcaatttaagcaccgacttgctgctgcggagtcatatctcattcatgctgcagcctttgcaggagtcagggatcattatggagcaagcactgagaaaaaacagattacagcttggcaccgagcagccaggttgcaccccagatgcttcagggacatggtgcctgctctggagaatgg

SEQ ID NO: 100812 - DNA, 282 bp, Homo sapiens
tggggaggggtgggccactgggttggtgggggttacgcagacccttggcagctgctgcatttgtccagggactaaggagcaaggctgtagatgagcctgtgggctccttaaagcagggactgggatgacaagtccccatctccagcccctgcagggtgctgggtcctaggaggggctaaggaatgatgggtgtgtctcattcctcctgcacccttcctgcttgcccagggagaacaccaatgcctgctgatatgtttctagacgcacccaagtcctggacac

SEQ ID NO: 100813 - DNA, 415 bp, Homo sapiens
gctgaaatattgagatcaaaaagtgggtaattagctgagactggtttggccagctggcttggccagagaaactgaatacagcaaaggcatccaaaggtccttggatttatagctccatgtgggaagggaagtcaattcctgataaccatgatatgttaatcccactggtaaaaactccagatgacaaaaaataatgcaaagttgggaagaactgaaaaatgtttccaattcatgtttgtagttttttctataactaggagtttcggaagcaggactaagactcctgggaagaagggctggcaaaagggaggtatattttggggacccagatatgcacactgagatttaaagaagaaccccttgcagtataggtatgtgtaacacaaagtcaccaaagaaaaaaatatccatttcc

SEQ ID NO: 100814 - DNA, 280 bp, Homo sapiens
tgcctgtgcttgcctctctcacggagaaataatttctcagaattgctgggtgtttaaactctaccatggtcaaattctccacacccctgtttcagaatgttgtctatctttttgttttttttggttctagcttctatacacctaatgctgtctatttagctatctgggcttcctcccaaatttgagaggagtgtgagatggggtagaaagaaggaacagggctgggcgcagtggctcatgcctgtaatcccagcactttgggaggccggggcaggtggac

SEQ ID NO: 100815 - DNA, 437 bp, Homo sapiens
actggagagaggacctggggaggaggaggaggacagatgaagttggtgactgtaccttcatggccatagctgggttctcagcacccggggatctgctgatcacctactcataggccaggcccctatcgaagttctaggtgacccagtgctggggacgggggggccacctgcaaggtctaatcatggaggtgggggctacagtgttggcttgtgctggggccagcatccttaggaaggcatcttggaggtggaggagacagccgcccacttcttgattggggccttcagcagcaccagcttcttgggcaggctggtgctggctttcatcaccatgtcgtgttcaatcttcttccagatcctgacttctaggttcagctttcctcagaccctggttcctttcagaggccattgctgctgccttgctctttgctggcttg

SEQ ID NO: 100816 - DNA, 293 bp, Homo sapiens
tggagctgggacacactttttctcctgcctttaagcattagaactgcatgttcctttggactccaggacttaaatcagtgtaccctctcagccccatgttctcaggcttttggccatgcagtgagagttacaccattggcttctctggttctgagaccttcagacttggactgagccctactgccagcttccctggccctccagcttgcagatggccaatcactggacttctcagcctctataattttgtgagctaattccctaaaaaatattctcatatatctttatgctgt

SEQ ID NO: 100817 - DNA, 418 bp, Homo sapiens
tattttgagatggagtcttgctctgtcatccaggctgcagtgcagtggtgcaacctcggctcactgcagcctctatctctcgggctcaagcagttctcctgcctcagctgggattacaggcgcccgtcaccacgcctggctaatttttgtatttttagtagagacagggtttcaccatgttgacgaggctcacctcaagtgatcctgccaccctagcctcccagagtgctgggattactggcatgagccactgtgcccggcctcaggccagtatttttaaatatcggttaataattgcaggaaacatcatttcaggttgacttttctcacctttaacctctttatatagcacagtgcaatctggccctactgccacttcatctgggttatctgtagcttgagttgtaaaaaaaaaaaa

SEQ ID NO: 100818 - DNA, 685 bp, Homo sapiens
ctctcagggtagctccagctgtccctcccgcagttggccctgtggtgttccgaagccggttacgtacggcctgagggccaggcgaacctcaggctctttgtcctactaaaaagcgcagcacaatggtagaagcagatcgtcctggcaagcatttcattggtggcctaaatagggaaaacaatgaaaagatgtttaaagcagtatttgcgaaacatggtcccatatcagaagttcttttgataaaggatcgaaccagcaaatccagaggctttgcatttactacttttgagaacactgcagatgctaagaatgctgccaaacatatgattggaaagcctttggatggaaaagcaataaaagtagaacaagccaagaaaccatcttttcaaagtggtggtaggcagagaccaccagcttcctcaagaagcagaagcccttcaggatgtctgagatctgcaagaggaagtagtggaggaacaagaggatggcatccctcacatgaaggacgcttgggtaatgttttaaaatgtaaagatggaaccataggactgaaagaaaataagtttgaagatatcgaaatttctcaattatatttatttcctttatgaacagaaaattgacttataataagcaaacttatttctaagtactaaaggtgtattacaagaatgattgaagtaatatc

SEQ ID NO: 100819 - DNA, 401 bp, Homo sapiens
atccctctctcacgatccttccctctctcaccctgaataatctataaagtatctatgccttgtgcatgcctcttgcgttgcatatgttggttacattatgccatcattttttgtctacaagcaggcaggcccctactggactctatacttctagaggatgatgactcacaaagagcttgcacatagtatgtactcaatacaatttgctgaactgagcccaagcatctcagaaaaaatccagcagttaattgcaaagcatcaaagcacttggagtctcaaaaaaaaaaagtttagcaatttcttttctaggctacaatatcacctagcattcagaaattataaagaaatttcatcctgctttgccacaaagaactggcacagtaaccccgtgagagagggaa

SEQ ID NO: 100820 - DNA, 456 bp, Homo sapiens
ccctgggaatttgcccccacacagaatgcctcttgagggacttgctttatgagttctgatgtgcatcttcctcttttcttgctgtccgtggtacttctctttgtcccctcttcatttctaatctgacacagacttagaggaatctttttgggtgaggtagggcttagacattgtggctcagagtgtaggccctggcgccaagtcccagccctgctgcacatgctgtgtgacacgggccacgtatctaccccgtcaggggaccgccatggtggctactacacgggggcgtgcatgtgtgtggattaagtgagatcatctgcgtaaaatctcagaggagtaagtactacaaagctaactattcaatggttaaaccaatggttgaaaaatatttcctcccagtgtgtgcatatgggtgaggtgtggactctgcagagaaaccctcctggccacccctgg

SEQ ID NO: 100821 - DNA, 239 bp, Homo sapiens
tatatttggatgtggcctactgagattttgagatcagttgtattgcagccaatacatggttcatatgggataaggagggaaataatcttaaaattggccaggtgcagtggctcatgcctgtaatcctagcactttgggtggccgaggtgggtggatcacctgaggtcaggagtttgagatcagcctgcccaacatggcgaaaccccatctctactaaaaatacaaaaattagccaggtg

SEQ ID NO: 100822 - DNA, 1124 bp, Homo sapiens
cagggataagctttttgttttttgcctgtgagttattcttggccttgtttttcctgctgcttccccttacagttgggtcttacaagccctctcacctacagactccaatctggcccaggtcctgagccacacctaagtgaagctatgtaattacaccctttctcacctctccttccagtcatcaaagtgaggcatctggagccagccaatttagcatcccagtctctggggcttcaagtgtatctcatctcggaggcctgccatttgtttcagggtcttgttggcagcagttgggctttgcaaaactctggcccgaccactcttgctttcctgccttggtttctccacaagcaaacctgccacacctcacaacatcatatgggatttgggtccgagtcttgctgttatatcaccacctgggtcatctaggcttgtcactgaattgttctgaaacccagctttgtttctcacccactcccaagctcctctagctaactgaagaactggactaattccctggtattaaaatctggcctcacgtaagagttgcttggggaacttctctaaaatacagattcctgtctccctttagccgaggatttttgattcagtagatttcagccacttaatgccctaggtgtcattgtctcactgggttagtagagccttgctccctgttctggtacctctttgttctctctgcttgttgatgacaatctgaacactgtccttcaatggaggtcaaagccctaaacaagatcctttctcctcctcaggggaagagctcctcattgttgggagagaggcctgttctcagcataaggaagagaatccattctttcttatgcacaatttctgctatttatctcgcatttggtaaaaattcagactgtgctgtctgccacaccgctgctattggttagccctcttctctttttttgtactcaaggcaacttccctacctttttcaccgaaatactgatctcaggggaagggaggggttactgctgtatcagccacaacctttgcaatccatagattctccatcaggtataaccaagtgttttaaaatcagtccaagaagcgaggtattttgtaccttattttcatcatttaaaaaaaaa

SEQ ID NO: 100823 - DNA, 961 bp, Homo sapiens
  misc_feature (953)..(953): n is a, c, g, or t
acgcctgtaatccccagcactttgggaggcccaagacgggtggatcacctgaggtcaggagttcgagaccagcctggccgacatggtgaaatccccatctctactaaaaatgcaaaattagtcaggtatggtggcatgtgcctgtggtcccagctgctcaggaggctaaggcaggagaatcgcttgagccgaggaggtggaggttgcagtgagctgagactgtgccactgcactccagcctggatgacagagcgagactttgtctcaaaaaaaagttatacgtgaaatgtgaagccacagtcttggaaacacatagatccttggggagcaactacccacaaaagaaaggaaaagtgtcctttggcatttgggtgtgaagagagaggcaaatggagaagtttaactgccctccaagacaaaaaaaaaaagaaggcccacaacccccacccctgcaaaaacaaattcactaaagcatctggacttcacaatgttgccagaagagggcgtgttatctagggatcttgtaaaacacccaataccacaaaaatgaataatgaaaagataggttcatacagctattgcaaaatatcagaaaatgaatttcatcacatatgaaccaaggaaaattcacacaaacctctgaaacaatagccatgaagaagaagaaagctgtaattccagcactttgggaggtcaaggtgggaagatagcttgaggccaggtgtttgagaacagcctgggcaacatggtgagaccctgtctctacaaaaattaaaaaaaaaaaaaagaaaaaacacaacagccaagtgtggtggcgcatgcctgaggtcctagctgctcaggaggctgaggcaggaggatggcagcttgagcccaggagttcaaggttgcagtaagccatgatcacaccactgcactccagcctgggtgacagggtgaggccttgtatcaanaaaaaaaa

SEQ ID NO: 100824 - DNA, 498 bp, Homo sapiens
ccctaactcctagggaccactctcccccagttaactacagcccgcccacatccaggcgtttgccatttggggagcccagcctcccacttccagagacaatcctgctctaccctcagcccacagctccgagggctggcccgcctctctccctgcctccacccccttccaaactctgggcgggccctggcacctgtcaggccaatgcggggggcggggagggggttgggggggtcgggtcggccccctcccaagtgcgtctcagctgccaaaacgcggagcccccacctccgcagcaaggacacgctcagagttggggcagggaagaaggtctgtggtgcaggcgctaaaaactcaagtcactcaaggatgaccccttttcagtcccggttctcaatttcaccttctcgcaggaaagccccgcgtctctattaacccttccatcaccgctgcaccgcgagagggaccggagaagtcttagcactgcgcagcagcggccgc

SEQ ID NO: 100825 - DNA, 1328 bp, Homo sapiens
ttttttttccccaaatgctgcacgtagcatccaaaagtagtcttttttgagagagtggctagggacattaggtaaagagaaagcaaagatactttattgaggattaatttttcatttctttaagataaatgcccaggagtgaaactgatgggttgtatgtagttacaaactgccaagctgttttccagagttggcggtaccattctaatttcccatgacaattttttgaagagtccaagctagttgctttagagtgcctcacctacattttttaattgtctgactttttcctaatgacatcacttaatttgttcctcaatctcctgaatttcctatagactggaggttaggtctggtggtttgattagattttttaaaaaaatatgacttcatctgtgatgctgtgtactttatgttgcataacatgaaccctaagaacagagtgagctgctggacagcaagtttcatggggtgcagtaattaacacaccacatagtataaatctgaaataatgacaaatgtgttaagggccttgggatattgggccatgtactctgaggagcacaaggtgaggtgcaggttcctgcccctaaagaactctatcttttgagattagcaactaacagtgtgagcccactaataggatgtgaaagttgtcaaaatcaagttctggtcattgtgttaaaaatcctaacaaatagagctggggaaggccgtgaaaggacgattttcatgcacagatgtctgataatgaggactatcattaaaagactgcacaaaaccacaccttgcacaaaggccatcacaacctgacacacacaaaaaatacttctatgaggacatttgcccagcaactccctgtccaatgtccaactggcaacatccttgttattgatccttgtagccaaggataattctctcaaaacaatcatttttgctttaaaaaccgttgtcttccttgacctccctgtatatgcacatagtttactgtggcacttgtattcttattgcaatgcctactcctgaataaacatcattttctttcagagagtctccctctctgttatttaggctgacaaggatatgccaagaagtagcttggatatagcagttaactctgcctttaggatatgtgtatggggatataagagttaactaaaagctgacctttgagttggtccttgaataaaagaagaatagattccaaaaataagaggaataaataatgatcctgagctaggagagtacattttgcagacctttggtttccatattaagaaattcagatttttatgtacaataaagaagttctggaattctcaaaaaaa

SEQ ID NO: 100826 - DNA, 3176 bp, Homo sapiens
  misc_feature (377)..(377): n is a, c, g, or t
gcacgaggatctcttcagaactatatccaatggtacctcagctgttgtatatgagaccctaaagctcaagttgaggagaagactagctatgggaaaaaatgtttcaaaggctgttgagcacatcaataaaactattgagcctgccctgattagcaagcacctgaatgttatagaacagaagaggattgacaaattgatgatagagacagttgaccctgacaataggtctaaatttggagtgaacattatactgggaatctcttttgctgtttgtaaggctggagctgccgaaaagggattctccctgctgtcacagaattgtgaatttgctggcaattctgaaggcatcctgctagttccagctttcactgtgaccngcaatggttctcaatctggcaataagctggcagtataggagttcataatcttccccgtcagcaaacttcagggaagccatgctcgttagagccaaggcttagcacacttgagccgtgtcatcaaagagaaatgtgagaaagctgctgccaatgtgggggattgtggtaggctgcataatgtctcctaaagatgtccatgtcctaatccctggaacttgtgaatatactactttacttggccaaagggatttgcagatatgattaaggttatgaaccttaaaacggggacattatcctgtattatccagaagggtccagtgtaatcttatgagtccttaaaagcagagaagaaagccttttatgtctgtggtcagagaggtcagaagttatgatattgctggctttgaagatggaagagggggccatgagccaaggagagtgatgaccttgcagctgagtacggcccttggccaacaatgagcaaggaaatggatttcagtcacataaccacaaggaactgagttctatgagtatcccaaatgagcaaggaaacaaatcctcccctagagccaagaaaggaaggcagctctgtggataccttggttttggcctggtgctgcccatgtcatacttttgacatacagaactgtaagatagcaagtgtatgttgactaagctgctaaattggtggtgattgcttatggcagcaatagaaagctatatatcctagagaataaagaaggctagagctgctgtggaatgcacttgggaaagctggctacattgataatatgtaactgccatgggcatagttgcctttgtattcttccaggtctgggaagtacaacttagacttcagatctcgtaatgacccaggaggcatataaacctgagcagctagtggccctgtacaagtccttcatcagggaaaaacattgagtattccctgattaaggacttgtacagaggactctgttttccctggtgtttctggtgtgtctcaaaaattgtttgactgtgatgacagggaagtttggaagaagttcactgctaatgcatgtctccaggaagcagggaatgatctcacagtgacacttgaggcacattgctgaggccgtcgatgagaattcatgtaactttctccagcttacagtggactagattgacatgcaagctgatccagtccaattggtagggcatcatggtttctcattactcactgacttaaaatacttttattgccatcctggtgaagcactgcactgggtagataacacaggggcaccttgctgatcagagcccttggccaggtacaaagagctcagtttctaaaactctgtcatttcaataatgttataaattgaatcatacagtatgtaattttatgggattcgctttttttctgttgatctctttttttctgagtcatctcagctgttgtgtgtatcaatagttcatttccttttactgttttgtttggtttaactcattgacctattgaaggatatctgggctcattccagtctgtgaataatgctgctgtggacattcatgtgcaagtttttgtgtgaacattaagttttcatttctttaagataaatgcccaggagtgaaactgatgggttgtatgtagttacaaactgccaagctgttttccagagttggcggtaccattctaatttcccatgacaattttttgaagagtccaagctagttgctttagagtgcctcacctacattttttaattgtctgactttttcctaatgacatcacttaatttgttcctcaatctcctgaatttcctatagactggaggttaggtctggtggtttgattagattttttaaaaaaatatgacttcatctgtgatgctgtgtactttatgttgcataacatgaaccctaagaacagagtgagctgctggacagcaagtttcatggggtgcagtaattaacacaccacatagtataaatctgaaataatgacaaatgtgttaagggccttgggatattgggccatgtactctgaggagcacaaggtgaggtgcaggttcctgcccctaaagaactctatcttttgagattagcaactaacagtgtgagcccactaataggatgtgaaagttgtcaaaatcaagttctggtcattgtgttaaaaatcctaacaaatagagctggggaaggccgtgaaaggacgattttcatgcacagatgtctgataatgaggactatcattaaaagactgcacaaaaccacaccttgcacaaaggccatcacaacctgacacacacaaaaaatacttctatgaggacatttgcccagcaactccctgtccaatgtccaactggcaacatccttgttattgatccttgtagccaaggataattctctcaaaacaatcatttttgctttaaaaaccgttgtcttccttgacctccctgtatatgcacatagtttactgtggcacttgtattcttattgcaatgcctactcctgaataaacatcattttctttcagagagtctccctctctgttatttaggctgacaaggatatgccaagaagtagcttggatatagcagttaactctgcctttaggatatgtgtatggggatataagagttaactaaaagctgacctttgagttggtccttgaataaaagaagaatagattccaaaaataagaggaataaataatgatcctgagctaggagagtacattttgcagacctttggtttccatattaagaaattcagatttttatgtacaataaagaagttctggaattctcaaaaaaa

SEQ ID NO: 100827 - DNA, 383 bp, Homo sapiens
cattccaaatttcagcaatccacaaaccttgttgactcttcccggtgtgaacgttcttgtatcttttccttcctttccatgtacactgtctaattaagcctctccacacctcattattaataccaccaacagcctcttcaccacagataaatattcctaacataacactgtaatcacatcaaatccctgctcaagagccttcaatgacagcccacagaaggaagccaaagctacacccttaggatagatagctttcaagactgtttcatttgggatccaagttaccttccaggcctatcttcgtaaggctagaagtatatctgaatcaggaaagcttttagaaatatatcccactttggggatcacttgagcccaggagttca

SEQ ID NO: 100828 - DNA, 337 bp, Homo sapiens
acagagtcttgctttgtcacccaggctggagtgcgatggcatgatctcggctcactacaatctccacctcccaggttcaagcgattctcctgcctcagtctcctgagtagctggggttacaggtgcctgccaccaagtccagctaatttttgtatttttagtagagatggggtttcaccatgttggccaggctagtcttgagctcctgacctcaagtgatctgtccacctcggcctcccaaagtgctgggattacaggcatgagcaatttgaaggagaaacagagcagaagcgacacctgttgggggttgtggatctgtttgtttctgcagtcagag

SEQ ID NO: 100829 - DNA, 654 bp, Homo sapiens
acagggatgaggaaacctcatgaaagcagttggagaattttgttggcatgtgaccatcatattttctaaccatgaaaactgagtcacagagcgccacgccccagtaagttggaggatacacgattaaaacactgctgaatagcggggaacaaaaggcaaagtgctgggattacaggcatgagccaccgtgcccagtccatattctattctacaagaaaatgtattataccagaatgggaaggaagtcacaagtgagagaaatgttgctgaagagaagcctggattatttctgatgtgtatgaagtatctatatccatgtggccaccaacagtttcaaagcttgttctgatgcctaggatactaaatttgggtacataatttgtggctattcagaaggtttatgggactggtgtccgtgagtgacggatcgttaatcttcagtagacaggtagtaacagtacgcatgtcggtagaagatcaaagttcccacaggtgacgagtgattatccattttatgccgcataggtattcattatatagttaaaatctacattggtaagggatacaaaatacccaacagagaggaagaagcacagagcagaaatttggggtactttgcatgcaagttgtaaggtctgtggggttctatactaa

SEQ ID NO: 100830 - DNA, 4812 bp, Homo sapiens
  misc_feature (3789)..(3789): n is a, c, g, or t
  misc_feature (3957)..(3957): n is a, c, g, or t
  misc_feature (3998)..(3998): n is a, c, g, or t
  misc_feature (4000)..(4002): n is a, c, g, or t
gagctcctcaatcagagtagagaagttagaggggggcgggcgacttggttttgaagtcttagctgaacagtcacccctcctctccttggcaaaaaggattcctttagaacctccgaggctcctggatttctcccttcgcaaatggagccgcatactgcattcccccgctctttcggatcgctaagcatgtttcatgagggtcgctgtccccgggtggaatgcggccgtatgcacgcgcctccctgcacacgcacacacacgcacacttacaataagtgtctgcaggaggagtgtcctgcgcgccagctctgcgtttaagacaggaagctgccgggttaccgagtcaaatgggagtgacactattcctctccatcagcaaggaaagcggaccacaaaagtccctttgtatctcggcagctcatttaatattatttatgcattttgtgcaaggaattgtgggatttcgccccacggtaaacaatatggaaatcttaaaaatagcgatcttcctgtgcgtgtccacctacgcgccccggggtgacctggcggggctgtcgccgggtgactcacacccctgaaccgcgaagcgacagggaaagcgcgggcgagcgcaggagacgcggtcgggggtctctccgggttcctgggctcccgcacccggagcgggggacgcggccgctttaaggggaggaggggcggcgggctgctcctgtcacccagcggcggccggagcgtcacgtgggcgcgcggcgccgcggccattggcccgaggcacgtgtccaggagaccggcctgcgacgtcactcgagggggctctgttaaaaataagaacaaaaatccagagtgaaagtgtctcaggttgcgccgagtggcctggaaatttccgagcccgcgcggaggccgaggcggcgagggcggcggacggccggggagcgcgggcggcccagcccggcccggccgggccctggcctcgcgtctctcacccatgcgactcgggccgcggagctctgcggggctcggcgggggcgcggccgcacgccggtggggcgccccggcccgcagcggggcggcggccgcgaggagggggcctccatgtgcgtgcgggcggtggcgggcgcgctgaccgcgggcgcccggcaccctcgagggccggctagggcgtgcgggcggggacggccgggcggcggcggcggccggagccggcccgggcgggcgtgagcgccggggaacgcgctgcctgcatgcgcgcagctctcgccccgggcggcccaggcggcggcgccggagcccgaggcggccggacgcggagaggagcggggagcccgggaggcggcccgcgtccccgccggaccactgcgactgtctagaccccggctgcgcggcgaagtcgaggacttggctctgttgaatctctcatcgtctgggcgagcggggcggctcgtggtgtttctaacccagttcgtggattcaaaggtggctccgcgccgagcgcggccggcgacttgtaggacctcagccctggccgcggccgccgcgcacgccctcggaagactcggcggggtgggggcgcgggggtctccgtgtgcgccgcgggagggccgaaggctgatttggaagggcgtccccggagaaccagtgtgggatttactgtgaacagcatggaggagaatgaccccaagcctggcgaagcagcggcggcggtggagggacagcggcagccggaatccagccccggcggcggctcgggcggcggcggcggtagcagcccgggcgaagcggacaccgggcgccggcgggctctgatgctgcccgcggtcctgcaggcgcccggcaaccaccagcacccgcaccgcatcaccaacttcttcatcgacaacatcctgcggcccgagttcggccggcgaaaggacgcggggacctgctgtgcgggcgcgggaggaggaaggggcggcggagccggcggcgaaggcggcgcgagcggtgcggagggaggcggcggcgcgggcggctcggagcagctcttgggctcgggctcccgagagccccggcagaacccgccatgtgcgcccggcgcgggcgggccgctcccagccgccggcagcgactctccgggtgacggggaaggcggctccaagacgctctcgctgcacggtggcgccaagaaaggcggcgaccccggcggccccctggacgggtcgctcaaggcccgcggcttgggcggcggcgacctgtcggtgagctcggactcggacagctcgcaagccggcgccaacctgggcgcgcagcccatgctctggccggcgtgggtctactgtacgcgctactcggaccggccttcttcaggtcccaggtctcgaaaaccaaagaagaagaacccgaacaaagaggacaagcggccgcgcacggcctttaccgccgagcagctgcagaggctcaaggccgagttccagaccaacaggtacctgacggagcagcggcgccagagcctggcgcaggagctgagcctcaacgagtcacagatcaagatttggttccagaacaagcgcgccaagatcaagaaggccacgggcaacaagaacacgctggccgtgcacctcatggcacagggcttgtacaaccactccaccacagccaaggagggcaagtcggacagcgagtagggcggggggcatggaggccaggtctcagtccgcgctaaacaatgcaataatttaaaatcataaagggccagtgtataaagattataccagcattaatagtgaaaatattgtgtattagctaaggttctgaaatattctatgtatatatcatttacaggtggtataaaatccaaaatatctgactataaaatatttttttgagttttttgtgtttatgagattatgctaattttatgggtttttttcttttttgcgaagggggctgcttagggtttcacctttttttaatcccctaagctccattatatgacattggacacttttttattattccaaaagaagaaaaaattaaaacaacttgctgaagtccaaagattttttattgctgcatttcacacaactgtgaaccgaataaatagctcctatttggtctatgacttctgccactttgtttgtgttggcttggtgaggacagcaggaggggcccacacctcaagcctggaccagccacctcaaggccttggggagcttaggggacctggtgggagagaggggacttccagggtccttgggccagttctgggatttggccctgggaagcagcccagcgtaccccaggcctgctctgggaagtcggctccatgctcaccagcagccgcccaggcccgcagcctcacccggctccctctcctcaccctcctgcacctaactccctcctccttctcctttttcctcctcttcctccttcctccttcctcctgctcctcctttcttcttctttttcttctcctcctcctccttccttcctcctcctccttctctttcctcctcctcctcaccaagggcccaaccgtgtgcatacatcgtctgcgtctgtggtctgtgtcgctgtccccagtcccaccgcagtcctgccgcaggcctaaccctcctgccctgggcactgcctccatgcagaagcgcttcgaggttctggggctaaaggcctggggtgtgtggcctaaagcccaagagcggtggggcgaccctccttttggcttggccccaggaatttcctgtgactccaccagccatcatgggtgccagccagggtcccagaaatgaggccatggctcactgtttctgggcnggcagaaggctctgtagagggagatggcatcatctatcttcctttcctttttcttttcttccctatttttttctttttttcctttatttttttcttttcttggagtggctgcttctgctatagagaacattcttccaagataaatatgtgtgttacacatatgtctgnatgcatgtgaacacacacacacacacacacacaccaggcgngnnngagtccacagttctgaaacatgtggctaccttgtctttcaaaagaactcagaatcctccaggatctagaagaaggaagaaagtgtgtaaataatcatttcttatcatcactttttgtcttttcttgttttttaaaatatacattttatttttgaaggtgtggtacagtgtaaattaaatatattcaatatatttcccaccaagtacctatatatgtatataaacaaacacattatctatatataacgccacactgtcttctgtttagtgtatggggaaagaccaatccaactgtccatctgtggctgggacagccagggggtgtgcccacggctgacccaggggtgtgcacacggctgagctgggagtcccgctggtctccctgaggactgagggtgaacttcgctctttgccttaaacctctttatttcattgcagtaatagttttacgttgtacataatagtgtaaacctttttaaaaaggaaagtataaaaacaaaagttgtaatttaaaagtctgaataaccatctgctgcttaggaaactcaatgaaatgacatgcctttttagcaggaagcaaagttggtttctgttttttgttttctttgttgttttagtttataaaacatgtgcattttacagttccagtatcaaatatttataatcttatgagaaatgaatgaatgtttctatttacaactgtgcttatcaaaattgtgaacacccccacccccgcatttttgtgtgttgaaattcttgaaggttacattaaataaaacaaaatctctttattataaaatactgaaggtcc

SEQ ID NO: 100831 - DNA, 638 bp, Homo sapiens
catttcactgtgatcaaaaagtttagcctttaagtaattattgcaaaaaaacaaatttactcatttattttacctttatttgttaatctcttattataaacattagctaagaatgcaattacagagtgaacataaacagctcttttataattttaaagttctgctgaaatatgttaggaataatataatcatatgagcaaataaagatccatacgtcatttctaggaagaaggactgattgaatattttttaaatgcccactttggggagtggcaccagggaaatagtggagtgggaagctctgaattcctgtgtttcatcagaaatataataaacatatcagaaacattgagaactctgtcttaagtttgtaaaacagtcaaagtcttagagcaataattgaatgctgagtcaataaaagtcaggtaaaaattcccctgtaatgcaaggaaatcttagccaaaacaaagtaagcctagaataatcaaaatagcaaatcctggggaaagagaatacctcattgccagagttagtccattaaaatttagaaatgtccaattttcagccaaaaatcataaagccatacaaagaaatcagaaagtattggacactcaaaggaaaaaataattcacagaagt

SEQ ID NO: 100832 - DNA, 852 bp, Homo sapiens
aacctaggtcaggacaggcacacctgctttcccgcccaaacttcgcattttccaagaccaccctggctctccatgcccccattctgggcctataaaaacccaagacccttgcaggcagatacacaagtggctggacgtcctaatgaacaacacatcaggggaagaagacacaagcgctggtcatccataggagcaccccagcagaaggacacgctgacaggcacccggaagccagtaggccgtggaccagcgggaggaggcggaggttggcctgggcagtcaggggagagccggggctgccgagcaccccaactccaggggaaaaccatctcccttctggctgccccatgggcggagagctacttccactcaataaaactttgcactcattctccaagcctatgggtgatccgattcttcaggtacaacaaggcaagaacccagatacagaaagccctctgttcttgccacaacgtagagggcctaattgagctggttaacacgagccgcctatagatggcagactaagagagtatcctgtaacatgcccactggggcttcaggagctgtaaacattcacccctagaccctgccctggggtaggagtcccacagcctgcccgtctgtatgctcccctggaggtctgagcagcggggcactgaagaagcccgctatgcccccatcgcgagccccgcgagggggaggagggagcctttgccttttcaactggagacatcgaccgggatcctggaagggtgtggttaagagaaaaaaaattggccataaggaatcagacaataggatgtctgaagtgaggatatggcactaattctgaaatttaagtatctggac

SEQ ID NO: 100833 - DNA, 5168 bp, Homo sapiens
  misc_feature (4816)..(4816): n is a, c, g, or t
  misc_feature (4888)..(4888): n is a, c, g, or t
  misc_feature (4910)..(4911): n is a, c, g, or t
  misc_feature (4941)..(4941): n is a, c, g, or t
  misc_feature (4946)..(4946): n is a, c, g, or t
  misc_feature (4986)..(4986): n is a, c, g, or t
  misc_feature (5022)..(5022): n is a, c, g, or t
  misc_feature (5054)..(5054): n is a, c, g, or t
  misc_feature (5062)..(5062): n is a, c, g, or t
  misc_feature (5101)..(5101): n is a, c, g, or t
  misc_feature (5156)..(5156): n is a, c, g, or t
cttgtgagattcatttctagagttgatgctatttctttttgtcaggggacctttactcctggcctgggattcagtggaagaaattgttcatgatacaattactaggaacctacaagctttttataacatgctacgctcatatgaccttggagacacagggcgcattggccgaaataatttcaagaaaatcatgcacgtcttctgtccatttttaacgaatgcacatttcataaaactctgcagtaagattcaggacattggttcaggaagaatcctttacaagaaacttttggcatgcataggaattgatggcccacccactgtctctccagttcttgttccaaaggatcagctgttaagtgaacatttacaaaaagatgaacagcagcagccagatctttctgagagaaccaagctcacggaggataaaaccaccctgaccaagaagatgaccacagaagaagtgattgaaaaattcaaaaagtgtatacagcagcaggacccggcattcaaaaaacgatttcttgacttcagcaaggagcctaatggaaaaattaacgtgcatgactttaagaaggtactggaagacactgggatgcccatggacgatgatcagtatgccctgctgaccactaaaataggcttcgagaaggaagggatgagctatcttgattttgcagcaggatttgaagatcctccaatgagagggccggaaaccactccgccgcagcctccaactccttcaaaaagttacgtgaacagccactttatcaccgcagaagaatgcctgaagcttttccctaggaggctgaaggagtcattccgggacccctactctgccttctttaaaacagatgctgacagggatggcataatcaacatgcatgaccttcacagactgctcctgcatctactgcttaatctcaaagacgacgagtttgagcgcttccttggccttcttggcttgagacttagtgtcactttaaattttcgggaatttcaaaatttgtgtgagaagagaccatggagaacagatgaagcgcctcaaagactcattagaattttctagaaaccgataatgagggcaatggcattcttcgacgccgggacataaagaacgcactgtacggttttgatattcccctcacaccaagagagtttgaaaagctttgggcaagatacgacaccgagggaaaagggcacattacttaccaggaatttttacagaaattgggtattaactattcgcctgctgtccatcggccctgtgcagaggattatttcaacttcatgggtcattttacaaagccacagcagctacaggaagagatgaaggagctgcagcagagcacagagaaggctgtggcagccagggataagcttatggaccgccatcaagatatcagcaaagcattcaccaaaactgatcaatccaaaaccaactacatatccatatgcaagatgcaggaagtgctggaagaatgtggatgttctcttaccgaaggggagctgacccatctgctaaacagttggggagtcagccggcatgataatgctatcaattacctcgacttcctgagagcagtggagaacagcaagtcaacaggagctcagcccaaggaaaaagaagagagcatgccaatcaattttgcaacgctgaatccacaggaggttgtgaggaagatccaggaagtagttgagtcctcccagctggctttgtccacggcattttctgcattggataaagaggatacaggatttgtaaaggctacagaattcggacaagttcttaaggatttctgttacaaactaacggacaatcagtatcattattttttgaggaaactaagaattcatctaaccccctatataaattggaaatattttctccagaactttagctgtttccttgaggagacagctgatgagtgggctgagaaaatgcccaaaggcccgccgcctacctctcccaaggccacagccgacagagacatcctggctcgcctccacaaagcagtgacttcccattaccatgccatcacccaggagtttgagaattttgacaccatgaaaacgaacaccatctccagagaggagtttagggccatttgtaatcgccgcgtccaaatcctgacggacgaacaggtaagaaacgccagtcagtcctcaccctgcacaccgttggctgagcgtcagcctggtccctggccagaatgtacagagtttaagactgttctctatttttaaaatgcttgcagttttgttattttgtttttcaatcttcctgaagattcacaggaatcttctgtttatgtaacaactataaattacaccattttcatcagggtacaaatactgtcactgttgcctttaaaatcaaattcaactccgcttcggctcccacactccttctcccttccctggagcatcccggaggtaatgtggtctgggtctgtcatgggcagcaactatctggggccagtgttgcgcaggcagtaaaaagaatgtaccaagacagttgtaggtaaaaaaggcagatgtattagaaaaagtatgaaaatatgttgcaagagtgcaaggggcaagtcagcaagagaaaagctgactgcaaagagacaaaggtttgctggagattttataggatggtgcttgtgctgggtgctgaagaaggctttgtgcagtactggaaacaccaaggttgcagtgagctaccttgcatttttctatgagccgggggtctggtgatagctgggcgcaggaaggttgttatttgtgcaggaggactacgtgttctggaccatgaacaaaggcagacttagcggcttacctgctttttcattttgctttcctctgttcccaccagcctgattcctttcccctaattaggactccacatggtccaaagaaggtgggcagtcggtccccacgcctggagggtcacagaccctggcaggaggctggcgctcctcccgccaccccaacctgccttctccttgctactacctggtgctgctgctggcagtgtgggatgctccgggctgctgctctaagcatgctgggtacatgccacccctggtgggcctctccactgtgcacaggctggacacaggccctgcctctctaagatcctcctccctatcacagaatccccagaaggaggttcttcccagcctcctcccctaaggactggactgagctcttctgtggctcaaaggctccgacaacctgctcccctgggccgctatggcccttcatggccttccaaggccaagagcacctcccagtggggtggcgtcctcagagtctgccttgccatggcagctgtgggagggaagagagcacctgcccagcctgcctcccatccatagtcacactgaacaccagcaccaggggagcagtgccccaggttgctttgttcctcgctgtgccctaaatgccaaagcagtgcagggcgctgagtgggtgctcagtacatgctgctgaatggacagcgtccatactccccagcccttcaccgtcctcggcagccccgtggctgatcagccaagtaacacagagcaccactgatccagttacagaagtagatttcccttcactcagaaaatgcacagctacaagccctctctagttctcaaatgcatcaatgtcccattcccagagaataattcagactaaaacataaaatccccaaatacttaacaaagcaactctgcctccctccttcctcctggttctgctcagtctcagcccagggagttccctgcagacactgcgtggaaatgtcactctttcgcctccaaaactgggccattacaacctcttgtctcattttgtcagagttgcagggtaaggccttggaagtattcatagggaagcgtgatcatcgcagtcacccctggctctactcacagctctgaactcactgccccaagaatgcatgccgtaaagacattaagaatgtgactatcaggtttaacattcctaaaatatcacctttctcaagcattttggtgtgatcatttttgctaagcaaaattaaatgctgtttccaaatgatcctgccccattgcacgtcaaagccgagcaaactctgtatttgcaaatactcctcttagcataaatgaaaataagcctttgaaattaatacagttgcatttattattctatggggccaagtaatcaaggttttactaataaagatttttttaatttcacctaaatgagtaaaattttactctaattatagatagaaattaatgacatgctgacatatctggcattcatcacagagaattcaattttaattgtccactaagaaaacttcaccatcctcagcacatcaagccccttccccaaccaaattaaacacttatttttaaacgcggctttctaaaaataagctgacgtgtctcttacatgcagccaacaaacatatgaaaaaaagctcaacatcactgagcattagagaaatgcaaattaaaaccacagtgagataccatctcacgccagtcagaatggctactatttaaaagtcaaaaaacaacagatgctggtgaggttacagagaaaaaggaatgcttctacactgttggtagaagttgggagtgtcagttagtttagccattgtggatgacactgtggtgatttctcaaagacctagaggcagtaataccatatgaccaagccatcccattactgggtatatgccccaaggaatataaatcattctattataaagatacacacacgtatgtacattgcagcgcttttcacaatagcaaagacaaggaaaaaaactaaatgcccatcagtgatnggctggttaaagaaaatgtggtacatctacaccgtggaatactatgcagccataaaaaggaatgagaggccnggcacagcggttcacgcctgtnntcccagcattttgggaggctgaggtgggtngatcncgaggtcagggtttcaagaccagcctggccaatatggtgnaaccccgtctctactactaaaaatgcaaaaaaattngctgggcacggtggcacgcatctgtagtcccngctgctcnggaggctgaagcaggagaatcacgtaaacccaggaggcngaggttgcagtgagccgagatcacaccactgcattccagcctgggcaaaagagcnagactctgtctc

SEQ ID NO: 100834 - DNA, 2095 bp, Homo sapiens
aaagactagcttgtgagcaggctcatcagtatcttgttaccaaagcaaaaaacagatggtcagacttgtctaagaattttctagaaaccgataatgagggcaatggcattcttcgacgccgggacataaagaacgcactgtacggttttgatattcccctcacaccaagagagtttgaaaagctttgggcaagatacgacaccgagggaaaagggcacattacttaccaggaatttttacagaaattgggtattaactattcgcctgctgtccatcggccctgtgcagaggattatttcaacttcatgggtcattttacaaagccacagcagctacaggaagagatgaaggagctgcagcagagcacagagaaggctgtggcagccagggataagcttatggaccgccatcaagatatcagcaaagcattcaccaaaactgatcaatccaaaaccaactacatatccatatgcaagatgcaggaagtgctggaagaatgtggatgttctcttaccgaaggggagctgacccatctgctaaacagttggggagtcagccggcatgataatgctatcaattacctcgacttcctgagagcagtggagaacagcaagtcaacaggagctcagcccaaggaaaaagaagagagcatgccaatcaattttgcaacgctgaatccacaggaggttgtgaggaagatccaggaagtagttgagtcctcccagctggctttgtccacggcattttctgcattggataaagaggatacaggatttgtaaaggctacagaattcggacaagttcttaaggatttctgttacaaactaacggacaatcagtatcattattttttgaggaaactaagaattcatctaaccccctatataaattggaaatattttctccagaactttagctgtttccttgaggagacagctgatgagtgggctgagaaaatgcccaaaggcccgccgcctacctctcccaaggccacagccgacagagacatcctggctcgcctccacaaagcagtgacttcccattaccatgccatcacccaggagtttgagaattttgacaccatgaaaacgaacaccatctccagagaggagtttagggccatttgtaatcgccgcgtccaaatcctgacggacgaacagtttgacagactctggaacgagatgccagtcaatgccaaggggaggctgaaatacccggacttcctgagcaggttcagttccgagacagcagccacaccaatggccactggtgactcggccgtggcccagagagggagcagtgtccctgacgtctcggaaggcaccagatctgccctctcattgcccactcaggagctgagaccagggtcaaagtcgcagagccacccctgtactccagcgagcaccaccgtgatcccgggcactccacccttgcagaactgtgatcccatagagagcaggctccggaagagaatccagggctgctggcgccagctcctgaaagaatgcaaggagaaggacgtggccagacagggggacatcaacgcctccgatttcctggctcttgtggagaaattcaacctggacataagcaaagaggagtgtcagcagctcattataaaatacgacttaaagagcaacgggaaatttgcatactgtgacttcattcagagctgtgtcctcctgctaaaagcaaaggaaagctcactgatgcacaggatgaagatccagaatgcacacaagatgaaagaagccggcgcggagacgccatctttttactctgctctgctgcgtattcagcccaaaattgtgcactgctggaggccaatgcggcgcacgttcaaaagctatgatgaggctggaacagggctgctaagcgtcgcagatttcaggacggtcctgagacagtacagcatcaacctctctgaggaagagttcttccatattctggagtattacgataagacgctgtcttcaaaaatctcctacaacgacttcctccgggcattcctccagtagacacccctgctgtgtgcccagcgggacgacagccacagggcctgtttcaaggctaataaaatcctataatttggggg

SEQ ID NO: 100835 - DNA, 1320 bp, Homo sapiens
tcctcactttgcgtggaaatatacaatctctaaagtcattcagttatatgttaaataacttgaagatgttttttgttccaagagagaagtgaagaatgtagttttcaaccaaagggatgacagctgatgagtgggctgagaaaatgcccaaaggcccgccgcctacctctcccaaggccacagccgacagagacatcctggctcgcctccacaaagcagtgacttcccattaccatgccatcacccaggagtttgagaattttgacaccatgaaaacgaacaccatctccagagaggagtttagggccatttgtaatcgccgcgtccaaatcctgacggacgaacagtttgacagactctggaacgagatgccagtcaatgccaaggggaggctgaaatacccggacttcctgagcaggttcagttccgagacagcagccacaccaatggccactggtgactcggccgtggcccagagagggagcagtgtccctgacgtctcggaaggcaccagatctgccctctcattgcccactcaggagctgagaccagggtcaaagtcgcagagccacccctgtactccagcgagcaccaccgtgatcccgggcactccacccttgcagaactgtgatcccatagagagcaggctccggaagagaatccagggctgctggcgccagctcctgaaagaatgcaaggagaaggacgtggccagacagggggacatcaacgcctccgatttcctggctcttgtggagaaattcaacctggacataagcaaagaggagtgtcagcagctcattataaaatacgacttaaagagcaacgggaaatttgcatactgtgacttcattcagagctgtgtcctcctgctaaaagcaaaggaaagctcactgatgcacaggatgaagatccagaatgcacacaagatgaaagaagccggcgcggagacgccatctttttactctgctctgctgcgtattcagcccaaaattgtgcactgctggaggccaatgcggcgcacgttcaaaagctatgatgaggctggaacagggctgctaagcgtcgcagatttcaggacggtcctgagacagtacagcatcaacctctctgaggaagagttcttccatattctggagtattacgataagacgctgtcttcaaaaatctcctacaacgacttcctccgggcattcctccagtagacacccctgctgtgtgcccagcgggacgacagccacagggcctgtttcaaggctaataaaatcctataatttgggggtttcatgaattttcaaaaaaaacaaaactcaagcccaa

SEQ ID NO: 100836 - DNA, 384 bp, Homo sapiens
gtcatacagtgccctggaggcagtgcctgctcagaaagaagccggcgcggagacgccatctttttactctgctctgctgcgtattcagcccaaaattgtgcactgctggaggccaatgcggcgcacgttcaaaagctatgatgaggctggaacagggctgctaagcgtcgcagatttcaggacggtcctgagacagtacagcatcaacctctctgaggaagagttcttccatattctggagtattacgataagacgctgtcttcaaaaatctcctacaacgacttcctccgggcattcctccagtagacacccctgctgtgtgcccagcgggacgacagccacagggcctgtttcaaggctaataaaatcctataatttggggg

SEQ ID NO: 100837 - DNA, 3071 bp, Homo sapiens
ttagatgagaaagacatctccctgtacagatgctaagacacctttcctcctggcctgggattcagtggaagaaattgttcatgatacaattactaggaacctacaagctttttataacatgctacgctcatatgaccttggagacacagggcgcattggccgaaataatttcaagaaaatcatgcacgtcttctgtccatttttaacgaatgcacatttcataaaactctgcagtaagattcaggacattggttcaggaagaatcctttacaagaaacttttggcatgcataggaattgatggcccacccactgtctctccagttcttgttccaaaggatcagctgttaagtgaacatttacaaaaagatgaacagcagcagccagatctttctgagagaaccaagctcacggaggataaaaccaccctgaccaagaagatgaccacagaagaagtgattgaaaaattcaaaaagtgtatacagcagcaggacccggcattcaaaaaacgatttcttgacttcagcaaggagcctaatggaaaaattaacgtgcatgactttaagaaggtactggaagacactgggatgcccatggacgatgatcagtatgccctgctgaccactaaaataggcttcgagaaggaagggatgagctatcttgattttgcagcaggatttgaagatcctccaatgagagggccggaaaccactccgccgcagcctccaactccttcaaaaagttacgtgaacagccactttatcaccgcagaagaatgcctgaagcttttccctaggaggctgaaggagtcattccgggacccctactctgccttctttaaaacagatgctgacagggatggcataatcaacatgcatgaccttcacagactgctcctgcatctactgcttaatctcaaagacgacgagtttgagcgcttccttggccttcttggcttgagacttagtgtcactttaaattttcgggaatttcaaaatttgtgtgagaagagaccatggagaacagatgaagcgcctcaaagactcattagaattttctagaaaccgataatgagggcaatggcattcttcgacgccgggacataaagaacgcactgtacggttttgatattcccctcacaccaagagagtttgaaaagctttgggcaagatacgacaccgagggaaaagggcacattacttaccaggaatttttacagaaattgggtattaactattcgcctgctgtccatcggccctgtgcagaggattatttcaacttcatgggtcattttacaaagccacagcagctacaggaagagatgaaggagctgcagcagagcacagagaaggctgtggcagccagggataagcttatggaccgccatcaagatatcagcaaagcattcaccaaaactgatcaatccaaaaccaactacatatccatatgcaagatgcaggaagtgctggaagaatgtggatgttctcttaccgaaggggagctgacccatctgctaaacagttggggagtcagccggcatgataatgctatcaattacctcgacttcctgagagcagtggagaacagcaagtcaacaggagctcagcccaaggaaaaagaagagagcatgccaatcaattttgcaacgctgaatccacaggaggttgtgaggaagatccaggaagtagttgagtcctcccagctggctttgtccacggcattttctgcattggataaagaggatacaggatttgtaaaggctacagaattcggacaagttcttaaggatttctgttacaaactaacggacaatcagtatcattattttttgaggaaactaagaattcatctaaccccctatataaattggaaatattttctccagaactttagctgtttccttgaggagacagctgatgagtgggctgagaaaatgcccaaaggcccgccgcctacctctcccaaggccacagccgacagagacatcctggctcgcctccacaaagcagtgacttcccattaccatgccatcacccaggagtttgagaattttgacaccatgaaaacgaacaccatctccagagaggagtttagggccatttgtaatcgccgcgtccaaatcctgacggacgaacagtttgacagactctggaacgagatgccagtcaatgccaaggggaggctgaaatacccggacttcctgagcaggttcagttccgagacagcagccacaccaatggccactggtgactcggccgtggcccagagagggagcagtgtccctgacgtctcggaaggcaccagatctgccctctcattgcccactcaggagctgagaccagggtcaaagtcgcagagccacccctgtactccagcgagcaccaccgtgatcccgggcactccacccttgcagaactgtgatcccatagagagcaggctccggaagagaatccagggctgctggcgccagctcctgaaagaatgcaaggagaaggacgtggccagacagggggacatcaacgcctccgatttcctggctcttgtggagaaattcaacctggacataagcaaagaggagtgtcagcagctcattataaaatacgacttaaagagcaacgggaaatttgcatactgtgacttcattcagagctgtgtcctcctgctaaaagcaaaggaaagctcactgatgcacaggatgaagatccagaatgcacacaagatgaaagaagccggcgcggagacgccatctttttactctgctctgctgcgtattcagcccaaaattgtgcactgctggaggccaatgcggcgcacgttcaaaagctatgatgaggctggaacagggctgctaagcgtcgcagatttcaggacggtcctgagacagtacagcatcaacctctctgaggaagagttcttccatattctggagtattacgataagacgctgtcttcaaaaatctcctacaacgacttcctccgggcattcctccagtagacacccctgctgtgtgcccagcgggacgacagccacagggcctgtttcaaggctaataaaatcctataatttggggg

SEQ ID NO: 100838 - DNA, 1947 bp, Homo sapiens
tcctcactttgcgtggaaatatacaatctctaaagtcattcagttatatgttaaataacttgaagatgttttttgttccaagagagaagtgaagaatgtagttttcaaccaaagggatgacagctgatgagtgggctgagaaaatgcccaaaggcccgccgcctacctctcccaaggccacagccgacagagacatcctggctcgcctccacaaagcagtgacttcccattaccatgccatcacccaggagtttgagaattttgacaccatgaaaacgaacaccatctccagagaggagtttagggccatttgtaatcgccgcgtccaaatcctgacggacgaacagtttgacagactctggaacgagatgccagtcaatgccaaggggaggctgaaatacccggacttcctgagcaggttcagttccgagacagcagccacaccaatggccactggtgactcggccgtggcccagagagggagcagtgtccctgacgtctcggaaggcaccagatctgccctctcattgcccactcaggagctgagaccagggtcaaagtcgcagagccacccctgtactccagcgagcaccaccgtgatcccgggcactccacccttgcagaactgtgatcccatagagagcaggctccggaagagaatccagggctgctggcgccagctcctgaaagaatgcaaggagaaggacgtggccagacagggggacatcaacgcctccgatttcctggctcttgtggagaaattcaacctggacataagcaaagaggagtgtcagcagctcattataaaatacgacttaaagagcaacgggaaatttgcatactgtgacttcattcagagctgtgtcctcctgctaaaagcaaaggaaagctcactgatgcacaggatgaagatccagaatgcacacaagatgaaagaagccggcgcggagacgccatctttttactctgctctgctgcgtattcagcccaaaattgtgcactgctggaggccaatgcggcgcacgttcaaaagctatgatgaggctggaacagggctgctaagcgtcgcagatttcaggacggtgagcacagctctgcgcccagtgcctctgcagggagcagctgccaaatgccagcggccagaaacttcccacggggagccctctacctgctgccgaaggcccggtgtgacctggctgcttcagatctcacttccctgggacccccaagttatccagtcctgggtccactcgcctcaccttcagaccccgggttctccttcccaaaggttgctggagccctgcgtggatgccccatacctgcatcgccagctcctcagggtcctgagacagtacagcatcaacctctctgaggaagagttcttccatattctggagtattacgataagacgctgtcttcaaaaatctcctacaacgacttcctccgggcattcctccagtagacacccctgctgtgtgcccagcgggacgacagccacagggcctgtttcaaggctaataaaatcctataatttgggggaaaaaaaaaaaaaaaaaaaaaaaaaaaaaaaaaaaaaaaaaaaaagagagagaacaacgaaaaaaaaaaaaacaacaaaaaaagaaaaaaaaaaaaaagagacacagaacagtgggaacaaacggcggcccccacaagcactgttaatacaacgagacacggcgcgacaagacaaccaaaacacgacaagagaaacaggaggagacaacacaccagccgccacgcagagcacagacatcatcgtgggagtagacagaagacacagaatacaaatctgcgcggggagggaagccacacaaaaagggagcagcaaccaaccctaatgccatacacacgacaaactatacaacaccgccacacgcgagaccaccaacaatagaaccgcacacaagaaggagcccaacagg

SEQ ID NO: 100839 - DNA, 960 bp, Homo sapiens
ttagatgagaaagacatctccctgtacagatgctaagacacctttcctcctggcctgggattcagtggaagaaattgttcatgatacaattactaggaacctacaagctttttataacatgctacgctcatatgaccttggagacacagggcgcattggccgaaataatttcaagaaaatcatgcacgtcttctgtccatttttaacgaatgcacatttcataaaactctgcagtaagattcaggacattggttcaggaagaatcctttacaagaaacttttggcatgcataggaattgatggcccacccactgtctctccagttcttgttccaaaggatcagctgttaagtgaacatttacaaaaagatgaacagcagcagccagatctttctgagagaaccaagctcacggaggataaaaccaccctgaccaagaagatgaccacagaagaagtgattgaaaaattcaaaaagtgtatacagcagcaggacccggcattcaaaaaacgatttcttgacttcagcaaggagcctaatggaaaaattaacgtgcatgactttaagaaggtaggagaatgggtttctctttgtttctatcctgcagaagttcagctgttttcttatactaacatactttaaaggacaatggcttatcccaggacgcagcagatccatttctaggcatctttcaacaatttaaaaggatttttttttttggccaaaaaattgtcattggcacatttcttagagaatactttcaatatggatgtggccagcttttgatatttaagcttttacatatcagaagcatttattgatgcggtttggctatctgctgcatacctggcactgtgcatcattgggcagcctgcgggtgagagtacaaagccactcggcccctgcctgccagtggagagtttccaatcacagagctatggtttgttcctctagaatgaaaa

SEQ ID NO: 100840 - DNA, 681 bp, Homo sapiens
tagtgaaccgaggatgggaaaccttcttactgtcatgggttacatggaaatgggtgcagtctggaggaagcaccctgcgtgtgtcagttgacactgggtctaaatgcctgcttgtgattttagaaccaagctcacggaggataaaaccaccctgaccaagaagatgaccacagaagaagtgattgaaaaattcaaaaagtgtatacagcagcaggacccggcattcaaaaaacgatttcttgacttcagcaaggagcctaatggaaaaattaacgtgcatgactttaagaaggtaggagaatgggtttctctttgtttctatcctgcagaagttcagctgttttcttatactaacatactttaaaggacaatggcttatcccaggacgcagcagatccatttctaggcatctttcaacaatttaaaaggatttttttttttggccaaaaaattgtcattggcacatttcttagagaatactttcaatatggatgtggccagcttttgatatttaagcttttacatatcagaagcatttattgatgcggtttggctatctgctgcatacctggcactgtgcatcattgggcagcctgcgggtgagagtacaaagccactcggcccctgcctgccagtggagagtttccaatcacagagctatggtttgttcctctagaatga

SEQ ID NO: 100841 - DNA, 1540 bp, Homo sapiens
tcctcactttgcgtggaaatatacaatctctaaagtcattcagttatatgttaaataacttgaagatgttttttgttccaagagagaagtgaagaatgtagttttcaaccaaagggatgacagctgatgagtgggctgagaaaatgcccaaaggcccgccgcctacctctcccaaggccacagccgacagagacatcctggctcgcctccacaaagcagtgacttcccattaccatgccatcacccaggagtttgagaattttgacaccatgaaaacgaacaccatctccagagaggagtttagggccatttgtaatcgccgcgtccaaatcctgacggacgaacagtttgacagactctggaacgagatgccagtcaatgccaaggggaggctgaaatacccggacttcctgagcaggttcagttccgagacagcagccacaccaatggccactggtgactcggccgtggcccagagagggagcagtgtccctgacgtctcggaaggcaccagatctgccctctcattgcccactcaggagctgagaccagggtcaaagtcgcagagccacccctgtactccagcgagcaccaccgtgatcccgggcactccacccttgcagaactgtgatcccatagagagcaggctccggaagagaatccagggctgctggcgccagctcctgaaagaatgcaaggagaaggacgtggccagacagggggacatcaacgcctccgatttcctggctcttgtggagaaattcaacctggacataagcaaagaggagtgtcagcagctcattataaaatacgacttaaagagcaacgggaaatttgcatactgtgacttcattcagagctgtgtcctcctgctaaaagcaaaggaaagctcactgatgcacaggatgaagatccagaatgcacacaagatgaaagaagccggcgcggagacgccatctttttactctgctctgctgcgtattcagcccaaaattgtgcactgctggaggccaatgcggcgcacgttcaaaagctatgatgaggctggaacagggctgctaagcgtcgcagatttcaggacggtgagcacagctctgcgcccagtgcctctgcagggagcagctgccaaatgccagcggccagaaacttcccacggggagccctctacctgctgccgaaggcccggtgtgacctggctgcttcagatctcacttccctgggacccccaagttatccagtcctgggtccactcgcctcaccttcagaccccgggttctccttcccaaaggttgctggagccctgcgtggatgccccatacctgcatcgccagctcctcagggtcctgagacagtacagcatcaacctctctgaggaagagttcttccatattctggagtattacgataagacgctgtcttcaaaaatctcctacaacgacttcctccgggcattcctccagtagacacccctgctgtgtgcccagcgggacgacagccacagggcctgtttcaaggctaataaaatcctataatttggggg

SEQ ID NO: 100842 - DNA, 363 bp, Homo sapiens
ctggtggagagaagggccccagtggtgacgcactgggcctgataatcagaaaccttggtggcatttgctgagcattttccatgtgtccctctcctcgctgggactctaggactgaaacccaggccacatcctcacagatgtcctggcatctccaaggcaaccctgaaaggaaagtatgttgatgaattaagcaactgtttgcttaattctccatgccattcttgaatttaagccccactgctgatcattgggagcaggagttagcatgcccattgacagacaagcaaactgaggcaaagaggttagatagccaggcatggtggcatatgcctgtaatctcagctactcaggaggccggagtag

SEQ ID NO: 100843 - DNA, 429 bp, Homo sapiens
tttattttgtgagtagaatgtttctctgaatgctggaaacaataaagccaaccacttgcctgtaattagcctggaccccataagtcacccagacataataccaagctctaaaattgccttcagagtaaggggccagcaccctggagttacaggcacttgcttttttggcaccagatttattgacattaatgatcccaatcccatatggagttccctggactgtttagataatgaatttgccttatgacagcagtgctccttctaatgaggaatgagtattttctataagtttttattttaatgtggtggctcttgtgatattgatcactggatcatgtgctgttcaagctcagctttaattttctcgataacatggttcaccaatccattgggatgctggtttaaacaaggatggaattctacagaact

SEQ ID NO: 100844 - DNA, 1236 bp, Homo sapiens
agcacacggagctgaaggagaagtgcgcagcatccaaccaggggcctggaccgcctgcgcagggtcagccaccagggctacagcactgaggctgagttcgaggagcccagggtgattgacctgtgggacctggcgcagtccgccaacctcacggacaaggagctggaggcgttccgggaggagctcaagcacttcgaagccaaaatcgagaagcacaaccactaccagaagcagctggagattgcgcacgagaagctgaggcacgcagagagcgtgggcgacggcgagcgtgtgagccgcagccgcgagaagcacgccctgctggaggggcggaccaaggagctgggctacacggtgaagaagcatctgcaggacctgtccggcaggatctccagagctcggcacaacgaactctgaaggcattggggagcccagcccggcagggaagaggccagcgtgaaggacctgggctcttggccgtggcatttccgtggacagcccgccgtcagggtggctggggctggcacgggtgtcgaggcaggaaggattgtttctggtgactgcagccgctgccgtcgcgacacagggcttggtggtggtagcatttgggtctgagatcggcccagctctgactgaaggggcttggcttccactcagcatcagcgtggcagtcaccaccccagtgaggacctcgatgtccagctgctgtcaggtctgatagtcctctgctaaaacaacacgatttacataaaaaatcttacacatctgccaccggaaataccatgcacagagtccttaaaaaatagagtgcagtatttaaaccaaaaaaaaaaaaaaaaaaaaaaaaaaaaaaaaaaaaaaaaaaaaaaaaaaaacacaaacaatatggtgtgcccacccaacaaaacctcccccatcagagtacacccccagttcaccgacacccccattttttttaaaacaaacgtggccccaccatatgggggcgcgccttaattatacagcaagccggagcggcgggcgccaaggtttataaagaggtgcggaaacggaggacaaaaccggcgcccacagagcgggacacacattgcgcgcaacgagggtgcgaacaataaacatacatagtgggggagacaaaacaaaagtggggcgaacaaacaaccacaaagagagagctgttattaagaccctcacaaggagcggaatataaagaagcattacagcggggcatacacg

SEQ ID NO: 100845 - DNA, 589 bp, Homo sapiens
gggatacctggagtggcataccagagctgcggtattcatggatgatgggctgtggctaggacttcaggaagtggacgggcacaggtgggaagggtcctcaggtccagcctctaccgggaggtgtttgcagcccctcaaagcgccggtgcatggtgagcaatggtggagattctccagcacgtcatcgattacatcagggaccttcagttggatctgaactcggaatccgaagttggaacccccggtggccgagggctgccggtccgggctcctggggtttatcgtgtgagcacaccatatatttacagtaggaatagacgtagacacacgagcatatttcacccccacgagcccacgacgagccccaccaagtgccacgcaacgagcctcaccaggcgccacacgaagatcttggggctggcacgggtgtcgaggcaggaaggattgtttctggtgactgcagccgctgccgtcgcgacacagggcttggtggtggtaaagaatcctcaagatcaaacccacgcagtgctgagagcttggcctgattctagggctggggctggagaaactgctagagatgatgcggata

SEQ ID NO: 100846 - DNA, 238 bp, Homo sapiens
caagccccttcagtcagagctgggccgatctcagacccaaatgctaccaccaccaagccctgtgtcgcgacggcagcggctgcagtcaccaccccagtgaggacctcgatgtccagctgctgtcaggtctgatagtcctctgctaaaacaacacgatttacataaaaaatcttacacatctgccaccggaaataccatgcacagagtccttaaaaaatagagtgcagtatttaaacca

SEQ ID NO: 100847 - DNA, 1344 bp, Homo sapiens
gcgccgcggagggtcaggtcgtttctgcgcgggctcccggcgctgctactgctgctgctcttcctcgggccctggccattgcgagccacggcggcaagtactcgcgggagaagaaccagcccaagccgtccccgaaacgcgagtccggagaggagttccgcatggagaagttgaaccagctgtgggagaaggcccagcgactgcatcttcctcccgtgaggctggccgagctccacgctgatctgaagatacaggagagggacgaactcgcctggaagaaactaaagcttgacggcttggacgaagatggggagaaggaagcgagactcatacgcaacctcaatgtcatcttggccaagtatggtctggacggaaagaaggacgctcggcaggtgaccagcaactccctcagtggcacccaggaagacgggctggatgaccccaggctggaaaagctgtggcacaaggcgaagacctctgggaaattctccggcgaagaactggacaagctctggcgggagttcctgcatcacaaagagaaagttcacgagtacaacgtcctgctggagaccctgagcaggaccgaagccaccagggctacagcactgaggctgagttcgaggagcccagggtgattgacctgtgggacctggcgcagtccgccaacctcacggacaaggagctggaggcgttccgggaggagctcaagcacttcgaagccaaaatcgagaagcacaaccactaccagaagcagctggagattgcgcacgagaagctgaggcacgcagagagcgtgggcgacggcgagcgtgtgagccgcagccgcgagaagcacgccctgctggaggggcggaccaaggagctgggctacacggtgaagaagcatctgcaggacctgtccggcaggatctccagagctcggcacaacgaactctgaaggcattggggagcccagcccggcagggaagaggccagcgtgaaggacctgggctcttggccgtggcatttccgtggacagcccgccgtcagggtggctggggctggcacgggtgtcgaggcaggaaggattgtttctggtgactgcagccgctgccgtcgcgacacagggcttggtggtggtagcatttgggtctgagatcggcccagctctgactgaaggggcttggcttccactcagcatcagcgtggcagtcaccaccccagtgaggacctcgatgtccagctgctgtcaggtctgatagtcctctgctaaaacaacacgatttacataaaaaatcttacacatctgccaccggaaataccatgcacagagtccttaaaaaatagagtgcagtatttaaacca

SEQ ID NO: 100848 - DNA, 1287 bp, Homo sapiens
gcgccgcggagggtcaggtcgtttctgcgcgggctcccggcgctgctactgctgctgctcttcctcgggccctggccattgcgagccacggcggcaagtactcgcgggagaagaaccagcccaagccgtccccgaaacgcgagtccggagaggagttccgcatggagaagttgaaccagctgtgggagaaggcccagcgactgcatcttcctcccgtgaggctggccgagctccacgctgatctgaagatacaggagaaggaagcgagactcatacgcaacctcaatgtcatcttggccaagtatggtctggacggaaagaaggacgctcggcaggtgaccagcaactccctcagtggcacccaggaagacgggctggatgaccccaggctggaaaagctgtggcacaaggcgaagacctctgggaaattctccggcgaagaactggacaagctctggcgggagttcctgcatcacaaagagaaagttcacgagtacaacgtcctgctggagaccctgagcaggaccgaagccaccagggctacagcactgaggctgagttcgaggagcccagggtgattgacctgtgggacctggcgcagtccgccaacctcacggacaaggagctggaggcgttccgggaggagctcaagcacttcgaagccaaaatcgagaagcacaaccactaccagaagcagctggagattgcgcacgagaagctgaggcacgcagagagcgtgggcgacggcgagcgtgtgagccgcagccgcgagaagcacgccctgctggaggggcggaccaaggagctgggctacacggtgaagaagcatctgcaggacctgtccggcaggatctccagagctcggcacaacgaactctgaaggcattggggagcccagcccggcagggaagaggccagcgtgaaggacctgggctcttggccgtggcatttccgtggacagcccgccgtcagggtggctggggctggcacgggtgtcgaggcaggaaggattgtttctggtgactgcagccgctgccgtcgcgacacagggcttggtggtggtagcatttgggtctgagatcggcccagctctgactgaaggggcttggcttccactcagcatcagcgtggcagtcaccaccccagtgaggacctcgatgtccagctgctgtcaggtctgatagtcctctgctaaaacaacacgatttacataaaaaatcttacacatctgccaccggaaataccatgcacagagtccttaaaaaatagagtgcagtatttaaacca

SEQ ID NO: 100849 - DNA, 1756 bp, Homo sapiens
gcgccgcggagggtcaggtcgtttctgcgcgggctcccggcgctgctactgctgctgctcttcctcgggccctggccattgcgagccacggcggcaagtactcgcgggagaagaaccagcccaagccgtccccgaaacgcgagtccggagaggagttccgcatggagaagttgaaccagctgtgggagaaggcccagcgactgcatcttcctcccgtgaggctggccgagctccacgctgatctgaagatacaggagagggacgaactcgcctggaagaaactaaagcttgacggcttggacgaagatggggagaaggaagcgagactcatacgcaacctcaatgtcatcttggccaagtatggtctggacggaaagaaggacgctcggcaggtgaccagcaactccctcagtggcacccaggaagacgggctggatgaccccaggctggaaaagctgtggcacaaggcgaagacctctgggaaattctccggcgaagaactggacaagctctggcgggagttcctgcatcacaaagagaaagttcacgagtacaacgtcctgctggagaccctgagcaggaccgaagccaccagggctacagcactgaggctgagttcgaggagcccagggtgattgacctgtgggacctggcgcagtccgccaacctcacggacaaggagctggaggcgttccgggaggagctcaagcacttcgaagccaaaatcgagaagcacaaccactaccagaagcagctggagattgcgcacgagaagctgaggcacgcagagagcgtgggcgacggcgagcgtgtgagccgcagccgcgagaagcacgccctgctggaggggcggaccaaggagctgggctacacggtgaagaagcatctgcaggacctgtccggcaggatctccagagctcggcacaacgaactctgaaggcattggggagcccagcccggcagggaagaggccagcgtgaaggacctgggctcttggccgtggcatttccgtggacagcccgccgtcagggtggctggggctggcacgggtgtcgaggcaggaaggattgtttctggtgactgcagccgctgccgtcgcgacacagggcttggtggtggtagcatttgggtctgagatcggcccagctctgactgaaggggcttggcttccactcagcatcagcgtggcagtcaccaccccagtgaggacctcgatgtccagctgctgtcaggtctgatagtcctctgctaaaacaacacgatttacataaaaaatcttacacatctgccaccggaaataccatgcacagagtccttaaaaaatagagtgcagtatttaaaccaaaaaaaaaaaaaaaaaaaaaaaaaaaaaaaaaaaaaaaaaaaaaaaaaaaacacaaacaatatggtgtgcccacccaacaaaacctcccccatcagagtacacccccagttcaccgacacccccattttttttaaaacaaacgtggccccaccatatgggggcgcgccttaattatacagcaagccggagcggcgggcgccaaggtttataaagaggtgcggaaacggaggacaaaaccggcgcccacagagcgggacacacattgcgcgcaacgagggtgcgaacaataaacatacatagtgggggagacaaaacaaaagtggggcgaacaaacaaccacaaagagagagctgttattaagaccctcacaaggagcggaatataaagaagcattacagcggggcatacacg

SEQ ID NO: 100850 - DNA, 569 bp, Homo sapiens
ccactaaagcagctgagagcgcagaactgaggacaagagcgtgggcgaggacgtgtgaccgacgcaaacaccctgtgagcgaccaaggactgggtacacgtgaagaagcatctgcaggacctgtccggcaggatctccagagctcggcacaacgaactctgaaggcattggggagcccagcccggcagggaagaggccagcgtgaaggacctgggctcttggccgtggcatttccgtggacagcccgccgtcagggtggctggggctggcacgggtgtcgaggcaggaaggattgtttctggtgactgcagccgctgccgtcgcgacacagggcttggtggtggtagcatttgggtctgagatcggcccagctctgactgaaggggcttggcttccactcagcatcagcgtggcagtcaccaccccagtgaggacctcgatgtccagctgctgtcaggtctgatagtcctctgctaaaacaacacgatttacataaaaaatcttacacatctgccaccggaaataccatgcacagagtccttaaaaaatagagtgcagtatttaaacca

SEQ ID NO: 100851 - DNA, 652 bp, Homo sapiens
gcgccgcggagggtcaggtcgtttctgcgcgggctcccggcgctgctactgctgctgctcttcctcgggccctggccattgcgagccacggcggcaagtactcgcgggagaagaaccagcccaagccgtccccgaaacgcgagtccggagaggagttccgcatggagaagttgaaccagctgtgggagaaggcccagcgactgcatcttcctcccgtgaggctggccgagctccacgctgatctgaagatacaggagagggacgaactcgcctggaagaaactaaagcttgacggcttggacgaagatggggagaaggaagcgagactcatacgcaacctcaatgtcatcttggccaagtatggcctggggtcgtccaggccggctccctgggtgacggagggagttgtgggcccggaggggtggattgactgcgcgggcgtcaccggcgcgtgcatacaggcgggcgaagcgacgttccagcgaggaccctggcagccgcgatgcagacgcgaacggcgggcaaggtacatcagcggcgatgacagaaccaaccacaaagagctgtcacccagaacccagccgacgctcggggagggaggaacgttgcagcatggaaccagaagcagaatccaggatgatgggatcaaagg

SEQ ID NO: 100852 - DNA, 226 bp, Homo sapiens
gcagtcaccaccccagtgaggacctcgatgtccagctgctgtcaggtctgatagtcctctgctaaaacaacacgatttacataaaaaatcttacacatctgccaccggaaataccatgcacagagtccttaaaaaatagagtgcagtatttaaaccacccgcttgttggctggtcactaagtgtcctggtggctggggccggagccagtgctcgtgaagggatcgc

SEQ ID NO: 100853 - DNA, 824 bp, Homo sapiens
agcacacggagctgaaggagaagtgcgcagcatccaaccaggggcctggaccgcctgcgcagggtcagccaccagggctacagcactgaggctgagttcgaggagcccagggtgattgacctgtgggacctggcgcagtccgccaacctcacggacaaggagctggaggcgttccgggaggagctcaagcacttcgaagccaaaatcgagaagcacaaccactaccagaagcagctggagattgcgcacgagaagctgaggcacgcagagagcgtgggcgacggcgagcgtgtgagccgcagccgcgagaagcacgccctgctggaggggcggaccaaggagctgggctacacggtgaagaagcatctgcaggacctgtccggcaggatctccagagctcggcacaacgaactctgaaggcattggggagcccagcccggcagggaagaggccagcgtgaaggacctgggctcttggccgtggcatttccgtggacagcccgccgtcagggtggctggggctggcacgggtgtcgaggcaggaaggattgtttctggtgactgcagccgctgccgtcgcgacacagggcttggtggtggtagcatttgggtctgagatcggcccagctctgactgaaggggcttggcttccactcagcatcagcgtggcagtcaccaccccagtgaggacctcgatgtccagctgctgtcaggtctgatagtcctctgctaaaacaacacgatttacataaaaaatcttacacatctgccaccggaaataccatgcacagagtccttaaaaaatagagtgcagtatttaaacca

SEQ ID NO: 100854 - DNA, 647 bp, Homo sapiens
gcgccgcggagggtcaggtcgtttctgcgcgggctcccggcgctgctactgctgctgctcttcctcgggccctggccattgcgagccacggcggcaagtactcgcgggagaagaaccagcccaagccgtccccgaaacgcgagtccggagaggagttccgcatggagaagttgaaccagctgtgggagaaggcccagcgactgcatcttcctcccgtgaggctggccgagctccacgctgatctgaagatacaggagagggacgaactcgcctggaagaaactaaagcttgacggcttggacgaagatggggagaaggaagcgagactcatacgcaacctcaatgtcatcttggccaagtatggtctggacggaaagaaggacgctcggcaggtgaccagcaactccctcagtggcacccaggaagacgggctggatgaccccaggctggaaaagctgtggcacaaggcgaagacctctgggaaattctccggcgaagaactggacaagctctggcgggagttcctgcatcacaaagagaaagttcacgagtacaacgtcctgctggagaccctgagcaggaccgaagaaatccacgagaacgtcattagcccctcggacctgagcgacatcaagggcagcgtcctg

SEQ ID NO: 100855 - DNA, 302 bp, Homo sapiens
gcgccgcggagggtcaggtcgtttctgcgcgggctcccggcgctgctactgctgctgctcttcctcgggccctggccattgcgagccacggcggcaagtactcgcgggagaagaaccagcccaagccgtccccgaaacgcgactccggcgaagaactggacaagctctggcgggagttcctgcatcacaaagagaaagttcacgagtacaacgtcctgctggagaccctgagcaggaccgaagaaatccacgagaacgtcattagcccctcggacctgagcgacatcaagggcagcgtcctg

SEQ ID NO: 100856 - DNA, 1098 bp, Homo sapiens
gcgccgcggagggtcaggtcgtttctgcgcgggctcccggcgctgctactgctgctgctcttcctcgggccctggccattgcgagccacggcggcaagtactcgcgggagaagaaccagcccaagccgtccccgaaacgcgagtccggagaggagttccgcatggagaagttgaaccagctgtgggagaaggcccagcgactgcatcttcctcccgtgaggctggccgagctccacgctgatctgaagatacaggagagggacgaactcgcctggaagaaactaaagcttgacggcttggacgaagatggggagaaggaagcgagactcatacgcaacctcaatgtcatcttggccaagtatggtctggacggaaagaaggacgctcggcaggtgaccagcaactccctcagtggcacccaggaagacgggctggatgaccccaggctggaaaagctgtggcacaaggcgaagacctctgggaaattctccggcgaagaactggacaactggagattgcgcacgagaagctgaggcacgcagagagcgtgggcgacggcgagcgtgtgagccgcagccgcgagaagcacgccctgctggaggggcggaccaaggagctgggctacacggtgaagaagcatctgcaggacctgtccggcaggatctccagagctcggcacaacgaactctgaaggcattggggagcccagcccggcagggaagaggccagcgtgaaggacctgggctcttggccgtggcatttccgtggacagcccgccgtcagggtggctggggctggcacgggtgtcgaggcaggaaggattgtttctggtgactgcagccgctgccgtcgcgacacagggcttggtggtggtagcatttgggtctgagatcggcccagctctgactgaaggggcttggcttccactcagcatcagcgtggcagtcaccaccccagtgaggacctcgatgtccagctgctgtcaggtctgatagtcctctgctaaaacaacacgatttacataaaaaatcttacacatctgccaccggaaataccatgcacagagtccttaaaaaatagagtgcagtatttaaacca

SEQ ID NO: 100857 - DNA, 1167 bp, Homo sapiens
gcgccgcggagggtcaggtcgtttctgcgcgggctcccggcgctgctactgctgctgctcttcctcgggccctggccattgcgagccacggcggcaagtactcgcgggagaagaaccagcccaagccgtccccgaaacgcgagtccggagaggagttccgcatggagaagttgaaccagctgtgggagaaggcccagcgactgcatcttcctcccgtgaggctggccgagctccacgctgatctgaagatacaggagagggacgaactcgcctggaagaaactaaagcttgacggcttggacgaagatggggagaaggaagcgagactcatacgcaacctcaatgtcatcttggccaagtatggtctggacggaaagaaggacgctcggcaggtgaccagcaactccctcagtggcacccaggaagacgggctggatgaccccaggctggaaaagctgtggcacaaggcgaagacctctgggaaattctccggcgaagaactggacaagctctggcgggagttcctgcatcacaaagagaaagttcacgagtacaacgtcctgctggagaccctgagcaggaccgaagccaccagggctacagcactgaggctgagttcgaggagcccagggtgattgacctgtgggacctggcgcagtccgccaacctcacggacaaggagctggaggcgttccgggtgaagaagcatctgcaggacctgtccggcaggatctccagagctcggcacaacgaactctgaaggcattggggagcccagcccggcagggaagaggccagcgtgaaggacctgggctcttggccgtggcatttccgtggacagcccgccgtcagggtggctggggctggcacgggtgtcgaggcaggaaggattgtttctggtgactgcagccgctgccgtcgcgacacagggcttggtggtggtagcatttgggtctgagatcggcccagctctgactgaaggggcttggcttccactcagcatcagcgtggcagtcaccaccccagtgaggacctcgatgtccagctgctgtcaggtctgatagtcctctgctaaaacaacacgatttacataaaaaatcttacacatctgccaccggaaataccatgcacagagtccttaaaaaatagagtgcagtatttaaacca

SEQ ID NO: 100858 - DNA, 1302 bp, Homo sapiens
gcgccgcggagggtcaggtcgtttctgcgcgggctcccggcgctgctactgctgctgctcttcctcgggccctggccattgcgagccacggcggcaagtactcgcgggagaagaaccagcccaagccgtccccgaaacgcgagtccggagaggagttccgcatggagaagttgaaccagctgtgggagaaggcccagcgactgcatcttcctcccgtgaggctggccgagctccacgctgatctgaagatacaggagagggacgaactcgcctggaagaaactaaagcttgacggcttggacgaagatggggagaaggaagcgagactcatacgcaacctcaatgtcatcttggccaagtatggtctggacggaaagaaggacgctcggcaggtgaccagcaactccctcagtggcacccaggaagacgggctggatgaccccaggctggaaaagctgtggcacaaggcgaagacctctgggaaattctccggcgaagaactggacaagctctggcgggagttcctgcatcacaaagagaaagttcacgagtacaacgtcctgctggagaccctgagcaggaccgaagccaccagggctacagcactgaggctgagttcgaggagcccagggtgattgacctgtgggacctggcgcagtccgccaacctcacggacaaggagctggaggcgttccgggaggagctcaagcacttcgaagccaaaatcgagaagcacaaccactaccagaagcagctggagattgcgcacgagaagctgaggcacgcagagagcgtgggcgacggcgagcgtgtgagccgcagccgcgagaagcacgccctgctggaggggcggaccaaggagctgggctacacggtgaagaagcatctgcaggacctgtccggcaggatctccagagctcggcacaacgaactctgaaggcattggggagcccagcccggcagggaagaggccagcgtgaaggacctgggctcttggccgtggcatttccgtggacagcccgccgtcagggtggctggggctggcacgggtgtcgaggcaggaaggattgtttctggtagcatttgggtctgagatcggcccagctctgactgaaggggcttggcttccactcagcatcagcgtggcagtcaccaccccagtgaggacctcgatgtccagctgctgtcaggtctgatagtcctctgctaaaacaacacgatttacataaaaaatcttacacatctgccaccggaaataccatgcacagagtccttaaaaaatagagtgcagtatttaaacca

SEQ ID NO: 100859 - DNA, 168 bp, Homo sapiens
caaaaaagaaaaaaagaaacagaaaccaggcaaaccatacatctaaaggatctattattctccttggacatctttttagaattcgaagaattaggttttgtggctcagaaagaccatgtactctagggagtatgtattactccaaatacacaggcaatttccaggaca

SEQ ID NO: 100860 - DNA, 252 bp, Homo sapiens
ttcttcttattcaaacactcgcagcaggggcaaagaaagcgacttcggccgcatcttaagttttaccataactttctggcattttcttttcttccagttttcccagactacttaggggcagtgaagaattataacatacatgaattattagtactcccctcgagttaaagggggaggaaagcgcctcattttctatgcccccaagggacggaccgagcgggcagcctctaaacaatgtatttatcactttgc

SEQ ID NO: 100861 - DNA, 378 bp, Homo sapiens
ctgtggtagctccttcttggctgattttaaaagatggcttttcccagagcttcttagaacttgctcttagcaaaggatctgtgtttcccatcgaaaaaaaagtaaaccatttaataaatttttaaaataaaatttggaatggcttccatcttgtttcttgtcatcttctcctctcaaaaagcctccttttcccttttttcatcctagttttgatgtctgagcagttggcctttctagatacccttatttagaatttttctcttcttcattctacggggagtgtcgccagtgggtaagtgcagtgggcactgcactgggtgagactcgcccttgccccctccctgctcactgctcgggggacttcgaatgaagaagaga

SEQ ID NO: 100862 - DNA, 653 bp, Homo sapiens
gtgggatccaaccatgtatgaatagatctccctgagtgagctgagatctgatgtaagagccccttgtcccgatgtcatggccagtccctgtgactggctgcctaatagtacttactggcttctcttgcagttatgcttgagactttgtggcccttcagaatctgtacctctgtcacttcaggactaacctctacagccaggtcatttccaccagggcttccccgtgtggcccagtgcgctttccccccttgccacccagccacccctgtgtgtgtgccagggagcacagatggcagtctgagctcaccacatggttttcctcttctaatctgtaaatgtggtggagtatcataacattctctcacgttaagatatccttgcattcctggaagaagacagtcacaatggatttgttattatactgccggatttggttctctggtattttggcatccaggtgtataggtgaaatggtttaaggttttccttttccgtactgcccccaccctttgttttgtatcaaggttataccagcttcatataaataagttggaaagtgttttccctttattttcattacgagagtttgtataagattggaattttgcatttctacaatttttggtaaagcttgctgtaaaaccaaccatgcc

SEQ ID NO: 100863 - DNA, 711 bp, Homo sapiens
taagacggggtctcagtatgttgcccaggctggtcttcaattcctgggctcaagtgatcctcctgccttgcctcggaaagtgctcagattatagtcatgagtcactgcacctggcctggcattttcttggaatgttcaacacacacctgtagtatgatccagccattccaccgctaggaatctgcccaagagaagtgaaagcagatgttctcataaagacttgtacatgtaacaacatgcacagatttcaaagtatcacatctatctgattaactccactgttacactggttgccactgctacatatatttttgatttctgcaaaagggcctactgcactgactggatggaaagtgtggcaggtgaggcaggaggtagttttctggacattacttaaaactttcagggcaacagttttacacctgctttcatagcaagtcatatttagtaagcatttactgtgtcagtcatggttctaaggggcttgcatggattctaatggaattgtcatagcatgagctgtggggactattactgtccccactttcagacaaaaaaaatgtaggcagagagaagttaggaaacctactggaggccacctggtgagaagagatagagtctgggttagaacctggggcttccaactttcctgccatgaagcgtcactctgcttccagccagggctgtcagacatcattggtcctgcttaag

SEQ ID NO: 100864 - DNA, 143 bp, Homo sapiens
tgaagtggtgtgctggggtcaggcgctctcacgggagtctgcaggcctggggccacgtgcaatgcttgtggctgtttgtggtttgcccccgatgccccaggccctgtgacgcacctcccccgcacatcacgttcacatgagct

SEQ ID NO: 100865 - DNA, 849 bp, Homo sapiens
tttttagtagaggcggtgtttcaccatattggccaggctggtctcaaactcctcaggtgactctcttgccttggcctcccaaaatgctgggattacaggcgtgagccaccgcgcccagcctgttccttcttcttaaaacaatctttgacttaactccaattcctgcagatattagcttaaatgtcactttctccactgataaagcgatagtctcagaaatgtttcctgtttatatttctctaaacatattgtacttttccttcatagtactttattacactgtacaatttatttttagatttcattagtatctgtccttcctgttagagtgtaacctctgcagtgtcatgtagagcatgtctctcttatttgccattgtgtcccagtgccaggcacataatggttagcactcagtaaatttagactaagttaattaatgaacagaattaagtctggatgttctgccctgtatctctggtttttgttttataccagcatttcccaaactgtatttcaaaagttttctatcaatgattagtggataatttctgaaaaaaatgattccattgtcattggttcggaatggctgtatcctcctttaagaactacagtttacattaccatgctctcagaagtccttaaaaaaaaaaaatctaagtttcaaacccagccttctgtacacttaaattatcaaacttctcattagactacctattaataatttgaaagtagtacttcagtgaaacagcttggaatatcattgtaatttacacttgtataatctcagatatttagtcaagtcattagatatctgttgaatgaaacacagaactcatttcctaatttatt

SEQ ID NO: 100866 - DNA, 507 bp, Homo sapiens
gaattccatgtctattgtttgtaagtattttaaaattttctatgtaaagctcattttattcaattctaaggaattataatttttaaccatattttactaatttttcagtttcagataactatgagtaaatggttcacagcatttgtaagaggtgcaagaaagaatttaagattttaatgtattacggatttttcaagggcagtgtttttttaattgaaaaagtaataaaattctcaaaacttcagtttgtgaaatgacataaactgatgcttaaatgccatctaattcagtctctaacttcctggataaattcctcaaaattatttcaaacatgtgatgattcatattttacctaaacacattcagagatagaaatagggggcttaaattgggtcattcattccatattcagaaagctctatttatcttaaagttctattgtattgagtcaaaatttatgtccctatgattcgtattcattaatgttagttctctcctctggaatta

SEQ ID NO: 100867 - DNA, 561 bp, Homo sapiens
  misc_feature (324)..(324): n is a, c, g, or t
  misc_feature (332)..(332): n is a, c, g, or t
  misc_feature (337)..(337): n is a, c, g, or t
  misc_feature (339)..(340): n is a, c, g, or t
  misc_feature (343)..(343): n is a, c, g, or t
  misc_feature (356)..(356): n is a, c, g, or t
  misc_feature (359)..(360): n is a, c, g, or t
  misc_feature (365)..(365): n is a, c, g, or t
  misc_feature (367)..(369): n is a, c, g, or t
  misc_feature (372)..(372): n is a, c, g, or t
gcatttcggagtgcatggctactgatgttgagcatattttcatgtgctttgttgaagatgtgtatactttccttggagaaatgtctcttcaactgttgaccattttaaaatcagatagtttgtctttttgttgttgacttgtaagaattcttttttcttttcttttcttttttttttttagacatcgtctcgctctgtcgcccaggctggagcgcagtggcgctatcttggctcactgcagcctccacctcccgggttgaagcgattctcctgcctcagcctcctgagcagctgggattacaggtgcacaccaccacacccaantagttttngtatntnnagnagagatggggttncannatgtngnnnagnctggtctcaaactcctgacttcaaatgatccacctgcctcggcctcccaaagtgttggtattacaggcatgagccactgcacccgccctatggattcttttaatctatccatcaccatatcccattgactctatgtcaaaaacgtggaccaaatctgtgtgtttctttcctgtccactacacctgctgc

SEQ ID NO: 100868 - DNA, 383 bp, Homo sapiens
cagtcagacctggacctgccttccttccctgtgagatggagggaaagctggggatttccccaaggcggcgaacgccctagatttagatatatcccatcatgccggaagtgtcagcaccccctagattattggcagctgcatgacctaccagctcatgattaaactcttgcctggtcctacagaagagatctctgctgggttggcattcctccgcttaaattatcaaagtagatacagtccagttatgtattttggcatattatacttttgcagttaagtaattgggtgtagcatttagattaatcacttaatcatttttaggactccagtcctatcaaggggcaaaaagggcacatagatcacactgaaattcctctgtgaaa

SEQ ID NO: 100869 - DNA, 414 bp, Homo sapiens
ctaacacaggcagcttatggcatgcaaaaggaggctgcaaagtaaccactgttggtgtgtccagggttagaaaaatttccacagggatttctgtgaaatccaattaaggcagccctttctttttaatagatgattatggagaaaagagactgacgaaacaaaatcagcaaggggaagttaaaaaatttcctgaattgttcagtttcttgtggaaactctagttcctgaatctgagtcttttgctgagatagtgtacagaaagtttgttttgctgctcttcccacttccctcagaatacattatttctgagggaagaactcaccacttttgtctctagccagctttcagttaggcacctggccctaaacttagtcttaaagatgcagtcaaggcctggcaaagttcctttgtctg

SEQ ID NO: 100870 - DNA, 425 bp, Homo sapiens
tcaaaccactgccaccatttactccacattcttttacagggtctactctaaaaaaaaactgtgtctactaaccataaaccaaacctactgaagagtccctctgcttgtgaaaaggacatcattctttttcaactttagtcaaaattttcccacattttggccttttttatcatctgaatctgatctttacatttctacatatgagtataatcttccaaacatttgcttaaaaggcacaagtaattttgctttgttaattaaaaaaaatttttgtttggctgggcatagtggctcatgcctgtaatcctaacacattgggaggctgaggcaggaggatcacttgaggccaggagtttgagaccagcctggccaacatggcaaaaccctgtctctaataaaaatacaaaagttagccgggtatgttc

SEQ ID NO: 100871 - DNA, 438 bp, Homo sapiens
ttttcaggtcccgaataaagcaagtcttcgagaacactaaaatttctaccgcatgctgccttaagcatcacccttactgagaaatggtgatatctcttctatatcaacaggagtggtggtgaactgtaatttctaaaaggcaaaattgcattgtaaaattgctaaatgttgcaaataaggattttagagaagctatttggtcacagtagaatggagatttctgttaacgttcaatggaaggttcacattagaggtcatctcagagagatcaaggtaatattcttttagaaacttgctatgaccctctactgtaattagtgagtccgagatacctgagggaaatctaaatttgtgatagttctggtaggcctttgtagtcagaagtggggagaaattgaaagtttggatgagacttatgtctactgttattgacatatt

SEQ ID NO: 100872 - DNA, 397 bp, Homo sapiens
gccaggcacagaacaactaccagggaactgtgaactgaataactactaaaattcacacaagactgtaagacattgagtgttcaaacaggctacagtggagaaacccacagacattcaacagagaccccagaaaatccacatttagggctagggctaatccagccctacagtaaaggctggcccctgttctaacagagactgaaacaaacctcaaaggatcaagatggtctgcaagtgaattaacagcctgccaggacgacattcaacactctttaaagagaacaacaaaatccaaacactcacgggccagcattcctcatccccatagccagcccaattcactaggcacagcaagaagcaagaaaatgtggtctgtattcgggaggaaaaaatccat

SEQ ID NO: 100873 - DNA, 221 bp, Homo sapiens
gtattttccatctttttttctcagtgctacactgaacagtttcatctgaccttaattccaattcagtaattttctctttagctgtgtttaatctgctttaaaactcacccatcaatttcttaattttagctattgcattttagttctagaattccttttttaaaaatttgttatgtatttaatagttttcagttccctgctgaagttttcaagctggtgtt

SEQ ID NO: 100874 - DNA, 540 bp, Homo sapiens
taaattcttgaaaagttttttgaagactttgagcctgaggcctgttcttattgtttgtttgtttgtttgtttgtttgtttttatgacagagtttcgctcttgttgcccaggctagagtgcaatggcatgatctcggctcattgcagcatttgcctcctgtgttcaagcgattctcctgcctcagcctcccgagtagctgggattacaggtgcccgccaccatgcccagctaatttttgtattttagtagagatgggtttttgccatgttggccaggctggtctcgaactcctgacctcaggtgatccacctgccttggcctcccaaagtgtggggattacaggcgtgagccaccatgctcggcctgttcttattgttaaaaagagagatttgtgtgaaagctgctgacgtctttttggcaccaagtcaagactgagttagttcttgtcagaatctgattgtttgtgaaattgatggctttttttttttttcctgagttgggggtctcgctctgtgccccaggctggagtacgaccactat

SEQ ID NO: 100875 - DNA, 485 bp, Homo sapiens
taaacaaaaaaaaatatgttttaaatttgcctagtataagtgctactttctacagaaggccttcccaggtttgtcttaaccagaattattctgccttcccccatgctctgatagcccttggtttgcacctatataaaagcacctaaataccagtgcaatggaggcagtagagtatgctgggcaacccacagcctctggagttgggagagcctggctttgtatcctgcctcttttagcttcaaagacaagttatgagaacttaaccactctggacctcagttttctcatcataagatggcagtagtaatatctatctcataggggctgttgtaaaaattaagtaatgttatccaaggtacttagcaaagtacctaatagagtagttctgtgtctggcatatagtaaggattcaatttatcttggagattatttagagaattttggacatttaaccattcacttaataaataaatatttattaacaa

SEQ ID NO: 100876 - DNA, 731 bp, Homo sapiens
ttcaaggtataaatttatctttttctatataccataccagctaaatttaagtataaatataagagcagtttcttccccagttctttctggtcatggcagacgtaaaaaatggtactcattgaacagcgtgccactctaccctatcccacaggctaagcagatcaatagctgggtaccccagaaacccaactgtgaactaatttgtggagactaatgcaaatattgtagataatagtcctaatacttgcaagacttgcagggattagatcggtcaaaagtgatttacaatatcacaaacataaatttttaagtaaacttttaactattttaggatttaagaaagcagtctcaactagtttaagagtgggagtgaaagtaaagacagtttacttcttacttaactgaataaattagtatgaagaccagtcgagtcattgcagacattttaggtaatggccttttttttcatctttatccttttcggttggttggttggggtttttttttttttttttttttgctttttattttgaaataattttagactcaaaagtcgcaaaaaaatagtacagagaaggcccatgtacccatcacccattgatggtaccttacataactacagagtattatcaaaaccaggaagttgatgaactacacaatactattaactagacttactgaagtttcaccagttttatattcacttatttttttctgtgtctttatgaatg

SEQ ID NO: 100877 - DNA, 672 bp, Homo sapiens
agggatctaggttgccggttccttgtgagaatctgagaatctaactaatgcctgatgatctgaggtgaaacagtttcatcctgaaaccatatccccacccagatccatggaaaaaaatgtcttccacaaaactggtccccagtatcaaaaaggctggggaccactgctctgaaagttttgtttaggtggaagagtggcatagggctatgagtatttatttgatttttgttttaagagacagggtcttctatattgtccaggctgatctcaaactcttgagctcaagtgttccccctgtcttggcctcccaaagtgcattttgatggtctttgaaaaatatttggacaatagagccttgacagaaaatttaaataattaaataaaaaatgttttaaaattgtccttttatgggctcattttcttagattgtaactcttatgcagtcattttctctttctttttttccttctttctctttttcttttttttttttttttttttgtggcagtctcagtctgtcttccaggctggagtgtagtggcgtgatcagggctcactgcaggtcacaacctcctgggctcaggcgattcttccatctcagcctcccgagtagctgggactacaggcacatgcaaccatgccaagctaatttttgtagagacaatttcacca

SEQ ID NO: 100878 - DNA, 853 bp, Homo sapiens
ctggggcctcagccacaggcagctgtggcctggctgcccacctccttccttcccagccaggagcactgctgcagcactgagtggagagccccacagccagcagcccttcgggggtccatgggtaatggggatatgaaggaagaatcagctgcacaattaggttgttgtcataggcccatggccctgggaggtacagggggctccctgtcccccagcctggacttccagctcttccgaggtgaccaggtcttctcagcctgcagaccacttccaggcatggtggatgctcgtggcccatcctgtgccagctggctgtgtcccttgcccctggcaccgggcaggtctgcactgctggcctgcctacaggacctggacctgaacctgtgcaccccacagccggcacccctgggcacagacctgcagggcctccaagaggacgccttgagcatgaagcacgagccaccagggctgcaggccagctccaccgatgacaagaaattcacagtcaagtacccacagaacaaggacaagctgggaaaacagccagaaagagctggcgagggggccccctgcccagccttctcctctcataacagctcttccccaccaccgctgcagaacagaaagagccccagccccttggctttctgcccctgtccccctgtcaactccatctccaaggagctcccatttctcctccacgccttctaccctggatacccacttctcctgcctccagcccacctgttcacctatggggccttagcttctgaccaatgtcccacctcctcatgctgccccaagacccctcctaccccaccatggctatgcctagcctgctgatgatggtcaa

SEQ ID NO: 100879 - DNA, 847 bp, Homo sapiens
atgccctggggaggtagcacaaagggaggaccatggtcttctaactgaggaacctgagcagatgccttgacccagaccagagacccaagccaaggaaagcccatgatcaccagaggtaatggggatatgaaggaagaatcagctgcacaattaggttgttgtcataggcccatggccctgggaggtacagggggctccctgtcccccagcctggacttccagctcttccgaggtgaccaggtcttctcagcctgcagaccacttccaggcatggtggatgctcgtggcccatcctgtgccagctggctgtgtcccttgcccctggcaccgggcaggtctgcactgctggcctgcctacaggacctggacctgaacctgtgcaccccacagccggcacccctgggcacagacctgcagggcctccaagaggacgccttgagcatgaagcacgagccaccagggctgcaggccagctccaccgatgacaagaaattcacagtcaagtacccacagaacaaggacaagctgggaaaacagccagaaagagctggcgagggggccccctgcccagccttctcctctcataacagctcttccccaccaccgctgcagaacagaaagagccccagccccttggctttctgcccctgtccccctgtcaactccatctccaaggagctcccatttctcctccacgccttctaccctggatacccacttctcctgcctccagcccacctgttcacctatggggccttagcttctgaccaatgtcccacctcctcatgctgccccaagacccctcctaccccaccatggctatgcctagcctgctgatgatggtcaa

SEQ ID NO: 100880 - DNA, 847 bp, Homo sapiens
atgccctggggaggtagcacaaagggaggaccatggtcttctaactgaggaacctgagcagatgccttgacccagaccagagacccaagccaaggaaagcccatgatcaccagagtgggttgggaagtgcggatagaggggaagtagtttttatttttttctaacagagaggttgtgcaaggtgttctgagagttgggagcagagtgtgatgccaggagagggcagagctggcagatggaagccaaaggtgtgcgggtcaccccttctgggtggggacatctgatcgacctagtccatgtatgcctgcatgaagtgctgggtaatggggatatgaaggaagaatcagctgcacaattaggttgttgtcataggcccatggccctgggaggtacagggggctccctgtcccccagcctggacttccagctcttccgaggtgaccagagcacgagccaccagggctgcaggccagctccaccgatgacaagaaattcacagtcaagtacccacagaacaaggacaagctgggaaaacagccagaaagagctggcgagggggccccctgcccagccttctcctctcataacagctcttccccaccaccgctgcagaacagaaagagccccagccccttggctttctgcccctgtccccctgtcaactccatctccaaggagctcccatttctcctccacgccttctaccctggatacccacttctcctgcctccagcccacctgttcacctatggggccttagcttctgaccaatgtcccacctcctcatgctgccccaagacccctcctaccccaccatggctatgcctagcctgctgatgatggtcaa

SEQ ID NO: 100881 - DNA, 978 bp, Homo sapiens
cagcaaggaagggcttggcaggcagaggcttctccacgtgggaacctgagggagtctgtcctcagcccacctcctggggcatttcctagccaagccagggagctttcaggattggagacctggaaatctccaaggccatttccttttttatttttttctaacagagaggttgtgcaaagtgttctgagagctgggagcagagtgtgatgccaggagggggcacagctggcagatggaagccaaagggtaatggggatatgaaggaagaatcagctgcacaattaggttgttgtcataggcccatggccctgggaggtacagggggctccctgtcccccagcctggacttccagctcttccgaggtgaccaggtcttctcagcctgcagaccacttccaggcatggtggatgctcgtggcccatcctgtgccagctggctgtgtcccttgcccctggcaccgggcaggtctgcactgctggcctgcctacaggacctggacctgaacctgtgcaccccacagccggcacccctgggcacagacctgcagggcctccaagaggacgccttgagcatgaagcacgagccaccagggctgcaggccagctccaccgatgacaagaaattcacagtcaagtacccacagaacaaggacaagctgggaaaacagccagaaagagctggcgagggggccccctgcccagccttctcctctcataacagctcttccccaccaccgctgcagaacagaaagagccccagccccttggctttctgcccctgtccccctgtcaactccatctccaaggagctcccatttctcctccacgccttctaccctggatacccacttctcctgcctccagcccacctgttcacctatggggccttagcttctgaccaatgtcccacctcctcatgctgccccaagacccctcctaccccaccatggctatgcctagcctgctgatgatggtcaa

SEQ ID NO: 100882 - DNA, 981 bp, Homo sapiens
atgccctggggaggtagcacaaagggaggaccatggtcttctaactgaggaacctgagcagatgccttgacccagaccagagacccaagccaaggaaagcccatgatcaccagagtgggttgggaagtgcggatagaggggaagtagtttttatttttttctaacagagaggttgtgcaaggtgttctgagagttgggagcagagtgtgatgccaggagagggcagagctggcagatggaagccaaagggtaatggggatatgaaggaagaatcagctgcacaattaggttgttgtcataggcccatggccctgggaggtacagggggctccctgtcccccagcctggacttccagctcttccgaggtgaccaggtcttctcagcctgcagaccacttccaggcatggtggatgctcgtggcccatcctgtgccagctggctgtgtcccttgcccctggcaccgggcaggtctgcactgctggcctgcctacaggacctggacctgaacctgtgcaccccacagccggcacccctgggcacagacctgcagggcctccaagaggacgccttgagcatgaagcacgagccaccagggctgcaggccagctccaccgatgacaagaaattcacagtcaagtacccacagaacaaggacaagctgggaaaacagccagaaagagctggcgagggggccccctgcccagccttctcctctcataacagctcttccccaccaccgctgcagaacagaaagagccccagccccttggctttctgcccctgtccccctgtcaactccatctccaaggagctcccatttctcctccacgccttctaccctggatacccacttctcctgcctccagcccacctgttcacctatggggccttagcttctgaccaatgtcccacctcctcatgctgccccaagacccctcctaccccaccatggctatgcctagcctgctgatgatggtcaa

SEQ ID NO: 100883 - DNA, 703 bp, Homo sapiens
ctggggcctcagccacaggcagctgtggcctggctgcccacctccttccttcccagccaggagcactgctgcagcactgagtggagagccccacagccagcagcccttcgggggtccatgggtaatggggatatgaaggaagaatcagctgcacaattaggttgttgtcataggcccatggccctgggaggtacagggggctccctgtcccccagcctggacttccagctcttccgaggtgaccagccggcacccctgggcacagacctgcagggcctccaagaggacgccttgagcatgaagcacgagccaccagggctgcaggccagctccaccgatgacaagaaattcacagtcaagtacccacagaacaaggacaagctgggaaaacagccagaaagagctggcgagggggccccctgcccagccttctcctctcataacagctcttccccaccaccgctgcagaacagaaagagccccagccccttggctttctgcccctgtccccctgtcaactccatctccaaggagctcccatttctcctccacgccttctaccctggatacccacttctcctgcctccagcccacctgttcacctatggggccttagcttctgaccaatgtcccacctcctcatgctgccccaagacccctcctaccccaccatggctatgcctagcctgctgatgatggtcaa

SEQ ID NO: 100884 - DNA, 688 bp, Homo sapiens
  misc_feature (20)..(22): n is a, c, g, or t
ggccgcccggcggggggccnnngccccccccgccccccccgcgccgcccacccccccccgcgcctgctgggagcaaaggacagcctcagagactaatccttggagaccaaaaagctaatcagccaggcatggtggcctgcgcctgtagtcccaactactgaggaggatgaagtgacaagatccctggagcccaggagttcaagaccagcctaagcagcatagcaagactctgtctcttaatcaaaaaagaaaaaaaaaaaagcaagctgatgagatcatttaaaacccagtctgccttaatccaaactctactcttttacactacataatgtgacttcaaatactttttcatcaaaatgttttcatgtgaaatcaaggtgagataatcgaatgaaataattttttaattgtggcaaaatacatataaatattgccatcgtgacatttaatacattcacaatgttgtataactatcaccattatttggatccaaaacattttcatcaccccaacaggaaatcccaaactgatgaaacagtcactccccaccctcagtccctggcaaccactaatctctatattatatatttacctattctggacatttcatataaataagatcttatgatttgtatttgatccactatgtctggcttctctcacttaacatgtgttcaagattcatcta

SEQ ID NO: 100885 - DNA, 753 bp, Homo sapiens
agcgggttgtttgttgttggtgaaaggtgaggggaacagctgatccgtctgttgggaggacagatatctcaaggccaggatggaagaatcaccactaagccgggcaccatcccgtggtggagtcaactttctcaatgtagcccggacctacatccccaacaccaaggtggaatgtcactacacccttcccccaggcaccatgcccagtgccagtgactggattggcatcttcaaggtggaggctgcctgtgttcgggattaccacacatttgtgtggtcttccgtgcctgaaagtacaactgatggttcccccattcacaccagtgtccagttccaagccagctacctgcccaaaccaggagctcagctctaccagttccgatatgtgaaccgccagggccaggtgtgtgggcagagcccccctttccagttccgagagccaaggcccatggatgaactggtgaccctggaggaggctgatgggggctctgacatcctgctggttgtccccaaggcaactgtgttacagaaccagctcgatgagagccagcaagaacggaatgacctgatgcagctgaagctacagctggagggacaggtgacagagctgaggagccgagtgcaggagctcgagagggctctggcaactgccaggcaggagcacacggagctgatggaacagtacaaggggatttcccggtccatggggagatcacagaagagagggacatcctgagccggcaacagggagac

SEQ ID NO: 100886 - DNA, 651 bp, Homo sapiens
agcgggttgtttgttgttggtgaaaggtgaggggaacagctgatccgtctgttgggaggacagatatctcaaggccaggatggaagaatcaccactaagccgggcaccatcccgtggtggagtcaactttctcaatgtagcccggacctacatccccaacaccaaggtggaatgtcactacacccttcccccaggcaccatgcccagtgccagtgactggattggcatcttcaaggtggaggctgcctgtgttcgggattaccacacatttgtgtggtcttccgtgcctgaaagtacaactgatggcacaacaggagaaccatcacttaaatttggacctgaaggaggcgaagagctggcaagaggagcagagtgctcaggctcagcgactgaaagacaaggtggcccagatgaaggacaccctaggccaggcccagcagcgggtggccgagctggagcccttgaaggagcagcttcgaggggcccaggagcttgcagcctcaagccagcagaaagccacccttctggggaggagtggccagtgcagcagcagccaggaccgcaccatagccgaactacaccgcagccgcctggaagtggctgaagttaacggcaggctggctgagctcggttgcacttgaaggaagaaaa

SEQ ID NO: 100887 - DNA, 92 bp, Homo sapiens
ggtgccaggactgtcaccttcctccaccagctgaaccctggagtaaactgccaaatgctgacagtgggaagaagcggaatcaggcctacttg

SEQ ID NO: 100888 - DNA, 322 bp, Homo sapiens
catgagaggggatgatagcagctggtggccctgtgccagatcctggccacagctggcctcagtcatcttcacgagaggagcccttgaggcacgtcttgctctcatccttgggtggttagtggtggcttgaggctgggtggtcagagtagctgtccaaggtcagcactggccatggaggagcccggccacccgccaagctgcacggcgcctccgcctcgggtgccacacagccccccacggagagactcctcatccgccatcctccctgccgctgcctttattttgcccgatcatattttaataaatactcgctttgaacttg

SEQ ID NO: 100889 - DNA, 665 bp, Homo sapiens
ggtcgtctagaggatcccgaggctgcagtgagccgagatcgtgcactgcactccagcctggataacagagcgagatgctgtcttaaaaaaaaaaaaactttattatcaagctctcacagcactactagaagtgatcactaagtcaaaatatactgagtgcctatttggtgccagtaactgctccaaggtgctgggattacaggcgtgagccaccgtgcctggcacattttagttcttaacttacctaacttctctttagttttctgcctatagagcttctttctcctcacccgtgttcctccttgtctcagataagcaggactgctgtgattaggacggatcagacgaagaggggcgtcgggtatggggttatggcagggggttttatatggataatggtggtgatgaaattgatggcccctaagatagaggagacacctgctaggtgtaaggagaagatggttaggtctacggaggctccaggttgggagtagttccctgctaagggagggtagactgttcaaccggttcctgctccggcctccactatagcagatgcgagcaggattaggagagagggaggtaagagtcaaaagcttatgtggtatatgcggggaaacgccatatcgggggcaccgattataggggaactagtcagtgcaaag

SEQ ID NO: 100890 - DNA, 2128 bp, Homo sapiens
agcgggctcggggctcggctggcctcggctcgcctcgagctgcgctcggcaggctgcggtaaatccgggcttgcggccgctggcgtagtctgtggccgggtggtcgttgctgcgcgccccgagccccgagagccatgcagatgtcctacgccatccggtgcgccttctaccagctgctgctggccgcgctcatgctggtggcgatgctgcagctgctctacctgtcgctgctgtccggactgcacgggcaggaggagcaagaccaatattttgagttctttcccccgtccccacggtccgtggaccaggtcaaggcgcagctccgcaccgcgctggcctctggaggcgtcctggacgctagcggcgattaccgcgtctacaggggcctgctgaagaccaccatggaccccaacgatgtgatcctggccacgcacgccagcgtggacaacctgctgcacctgtcgggtctgctggagcgctgggagggcccgctgtccgtgtcggtgttcgcggccaccaaggaggaggcgcagctggccacggtgctggcctacgcgctgagcagccactgccccgacatgcgcgccagggtcgccatgcacctcgtgtgcccctcgcgttacgaggcagccgtgcccgacccccgggagccgggggagtttgccctgctgcggtcctgccaggaggtctttgacaagctagccagggtggcccagcccgggattaattatgcgctgggcaccaatgtctcctaccccaataacctgctgaggaatctggctcgtgagggggccaactatgccctggtgatcgatgtggacatggtgcccagcgaggggctgtggagaggcctgcgggaaatgctggatcagagcaaccagtggggaggcaccgcgctggtggtgcctgccttcgaaatccgaagagcccgccgcatgcccatgaacaaaaacgagctggtgcagctctaccaggttggcgaggtgcggcccttctattatgggttgtgcaccccctgccaggcacccaccaactattcccgctgggtcaacctgccggaagagagcttgctgcggcccgcctacgtggtaccttggcaggacccctgggagccattctacgtggcaggaggcaaggtgcccaccttcgacgagcgctttcggcagtacggcttcaaccgaatcagccaggcctgcgagctgcatgtggcggggtttgattttgaggtcctgaacgaaggtttcttggttcataagggcttcaaagaagcgttgaagttccatccccaaaaggaggctgaaaatcagcacaataagatcctatatcgccagttcaaacaggagttgaaggccaagtaccccaactctccccgacgctgctgagcccttccctcccctaatctgagaagtcagcctcttggctcctcaggccaccatttaggcctgactggggtaagaaatgtcgctccactttacagaggtagctgtggtgttgaaacactggacttggatatggggtgctgggatcgattcctagctttaccactaactagctgtgtggccttgagtaaatcccgttacctctctgagcctcggttaccctgtctgtaaaaagggaggtgagaatacctacctcacggaactgttgggaggctcagatgagatgctatatgtgaaaacattctgtaagcttcgtacaaatgtgaagtattaatattatcgcagtattattgttgttattattattgttattattaacaatcttgggtgggtagtaggagagcaaaaagtatgaatgggatggagctaagaagtctgaatacttaatgaaatggactttttggaaagaaatcagatgaaggcataaaatttagttcttagctcttgaacagaagcctaaaattcctggttctctcagggcttcgccttcaagggttctggaggagggaagggtctgcaggttccatgggtgacagcctgagatctgtcccttcaacgggctgggctgggtatgtgcctaccgatgacaatgtgtaaataaatgcgtgttcacacccacaaaaaaaaacaacgccgagcaaaaattcacctgaggggccacgctacgcgacccgctacgacacgggcca

SEQ ID NO: 100891 - DNA, 1722 bp, Homo sapiens
agcgggctcggggctcggctggcctcggctcgcctcgagctgcgctcggcaggctgcggtaaatccgggcttgcggccgctggcgtagtctgtggccgggtggtcgttgctgcgcgccccgagccccgagagccatgcagatgtcctacgccatccggtgcgccttctaccagctgctgctggccgcgctcatgctggtggcgatgctgcagctgctctacctgtcgctgctgtccggactgcacgggcaggaggagcaagaccaatattttgagttctttcccccgtccccacggtccgtggaccaggtcaaggcgcagctccgcaccgcgctggcctctggaggcgtcctggacgctagcggcgattaccgcgtctacaggggcctgctgaagaccaccatggaccccaacgatgtgatcctggccacgcacgccagcgtggacaacctgctgcacctgtcgggtctgctggagcgctgggagggcccgctgtccgtgtcggtgttcgcggccaccaaggaggaggcgcagctggccacggtgctggcctacgcgctgagcagccactgccccgacatgcgcgccagggtcgccatgcacctcgtgtgcccctcgcgttacgaggcagccgtgcccgacccccgggagccgggggagtttgccctgctgcggtcctgccaggaggtctttgacaagctagccagggtggcccagcccgggattaattatgcgctgggcaccaatgtctcctaccccaataacctgctgaggaatctggctcgtgagggggccaactatgccctggtgatcgatgtggacatggtgcccagcgaggggctgtggagaggcctgcgggaaatgctggatcagagcaaccagtggggaggcaccgcgctggtggtgcctgccttcgaaatccgaagagcccgccgcatgcccatgaacaaaaacgagctggtgcagctctaccaggttggcgaggtgcggcccttctattatgggttgtgcaccccctgccaggcacccaccaactattcccgctgggtcaacctgccggaagagagcttgctgcggcccgcctacgtggtaccttggcaggacccctgggagccattctacgtggcaggaggcaaggtgcccaccttcgacgagcgctttcggcagtacggcttcaaccgaatcagccaggcctgcgagctgcatgtggcggggtttgattttgaggtcctgaacgaaggtttcttggttcataagggcttcaaagaagcgttgaagttccatccccaaaaggaggctgaaaatcagcacaataagatcctatatcgccagttcaaacaggagttgaaggccaagtaccccaactctccccgacgctgctgagcccttccctcccctaattaagaagtctgaatacttaatgaaatggactttttggaaagaaatcagatgaaggcataaaatttagttcttagctcttgaacagaagcctaaaattcctggttctctcagggcttcgccttcaagggttctggaggagggaagggtctgcaggttccatgggtgacagcctgagatctgtcccttcaacgggctgggctgggtatgtgcctaccgatgacaatgtgtaaataaatgcgtgttcacacccacaaaaaaaaacaacgccgagcaaaaattcacctgaggggccacgctacgcgacccgctacgacacgggcca

SEQ ID NO: 100892 - DNA, 949 bp, Homo sapiens
taggaaatatcattcgggctgatgtgttagaggggtttgattttgaggtcctgaacgaaggtttcttggttcataagggcttcaaagaagcgttgaagttccatccccaaaaggaggctgaaaatcagcacaataagatcctatatcgccagttcaaacaggagttgaaggccaagtaccccaactctccccgacgctgctgagcccttccctcccctaatctgagaagtcagcctcttggctcctcaggccaccatttaggcctgactggggtaagaaatgtcgctccactttacagaggtagctgtggtgttgaaacactggacttggatatggggtgctgggatcgattcctagctttaccactaactagctgtgtggccttgagtaaatcccgttacctctctgagcctcggttaccctgtctgtaaaaagggaggtgagaatacctacctcacggaactgttgggaggctcagatgagatgctatatgtgaaaacattctgtaagcttcgtacaaatgtgaagtattaatattatcgcagtattattgttgttattattattgttattattaacaatcttgggtgggtagtaggagagcaaaaagtatgaatgggatggagctaagaagtctgaatacttaatgaaatggactttttggaaagaaatcagatgaaggcataaaatttagttcttagctcttgaacagaagcctaaaattcctggttctctcagggcttcgccttcaagggttctggaggagggaagggtctgcaggttccatgggtgacagcctgagatctgtcccttcaacgggctgggctgggtatgtgcctaccgatgacaatgtgtaaataaatgcgtgttcacacccacaaaaaaaaacaacgccgagcaaaaattcacctgaggggccacgctacgcgacccgctacgacacgggcca

SEQ ID NO: 100893 - DNA, 626 bp, Homo sapiens
ccacgcgtccgccacgcgtccgatcgattcctagctttaccactaactagctgtgtggccttgagtaaatcccgttacctctctgagcctcggttaccctgtctgtaaaaagggaggtgagaatacctacctcacggaactgttgggaggctcagatgagatgctatatgtgaaaacattctgtaagcttcgtacaaatgtgaagtattaatattatcgcagtattattgttgttattattattgttattattaacaatcttgggtgggtagtaggagagcaaaaagtatgaatgggatggagctaagaagtctgaatacttaatgaaatggactttttggaaagaaatcagatgaaggcataaaatttagttcttagctcttgaacagaagcctaaaattcctggttctctcagggcttcgccttcaagggttctggaggagggaagggtctgcaggttccatgggtgacagcctgagatctgtcccttcaacgggctgggctgggtatgtgcctaccgatgacaatgtgtaaataaatgcgtgttcacacccacaaaaaaaaacaacgccgagcaaaaattcacctgaggggccacgctacgcgacccgctacgacacgggcca

SEQ ID NO: 100894 - DNA, 2064 bp, Homo sapiens
  misc_feature (2057)..(2057): n is a, c, g, or t
agcgggctcggggctcggctggcctcggctcgcctcgagctgcgctcggcaggctgcggtaaatccgggcttgcggccgctggcgtagtctgtggccgggtggtcgttgctgcgcgccccgagccccgagagccatgcagatgtcctacgccatccggtgcgccttctaccagctgctgctggccgcgctcatgctggtggcgatgctgcagctgctctacctgtcgctgctgtccggactgcacgggcaggaggagcaagaccaatattttgagttctttcccccgtccccacggtccgtggaccaggtcaaggcgcagctccgcaccgcgctggcctctggaggcgtcctggacgctagcggcgattaccgcgtctacaggggcctgctgaagaccaccatggaccccaacgatgtgatcctggccacgcacgccagcgtggacaacctgctgcacctgtcgggtctgctggagcgctgggagggcccgctgtccgtgtcggtgttcgcggccaccaaggaggaggcgcagctggccacggtgctggcctacgcgctgagcagccactgccccgacatgcgcgccagggtcgccatgcacctcgtgtgcccctcgcgttacgaggcagccgtgcccgacccccgggagccgggggagtttgccctgctgcggtcctgccaggaggtctttgacaagctagccagggtggcccagcccgggattaattatgcgctgggcaccaatgtctcctaccccaataacctgctgaggaatctggctcgtgagggggccaactatgccctggtgatcgatgtggacatggtgcccagcgaggggctgtggagaggcctgcgggaaatgctggatcagagcaaccagtggggaggcaccgcgctggtggtgcctgccttcgaaatccgaagagcccgccgcatgcccatgaacaaaaacgagctggtgcagctctaccaggttggcgaggtgcggcccttctattatgggttgtgcaccccctgccaggcacccaccaactattcccgctgggtcaacctgccggaagagagcttgctgcggcccgcctacgtggtaccttggcaggacccctgggagccattctacgtggcaggaggcaaggtgcccaccttcgacgagcgctttcggcagtacggcttcaaccgaatcagccaggcctgcgagctgcatgtggcggggtttgattttgaggtcctgaacgaaggtttcttggttcataagggcttcaaagaagcgttgaagttccatccccaaaaggaggctgaaaatcagcacaataagatcctatatcgccagttcaaacaggagttgaaggccaagtaccccaactctccccgacgctgctgagcccttccctcccctaatctgagaagtcagcctcttggctcctcaggccaccatttaggcctgactggggtaagaaatgtcgctccactttacagaggtagctgtggtgttgaaacactggacttggatatggggtgctgggatcgattcctagctttaccactaactagctgtgtggccttgagtaaatcccgttacctctctgagcctcggttaccctgtctgtaaaaagggaggtgagaatacctacctcacggaactgttgggaggctcagatgagatgctatatgtgaaaacattctgtaagcttcgtacaaatgtgaagtattaatattatcgcagtattattgttgttattattattgttattattaacaatcttgggtgggtagtaggagagcaaaaagtatgaatgggatggagctaagaagtctgaatacttaatgaaatggactttttggaaagaaatcagatgaaggcataaaatttagttcttagctcttgaacagaagcctaaaattcctggttctctcagggcttcgccttcaagggttctggaggagggaagggtctgcaggttccatgggtgacagcctgagatctgtcccttcaacgggctgggctgggtatgtgcctaccgatgacaatgtgtaaatgtgcgccggagatcctgcngagtcga

SEQ ID NO: 100895 - DNA, 2089 bp, Homo sapiens
ctgttctaaagctgcggcactgcttgggctacggtggtagtactgtggcacgttgtggccgtatgttgatgcactgccgtagccacggcagagccatgcagatgtcctacgccatccggtgcgccttctaccagctgctgctggccgcgctcatgctggtggcgatgctgcagctgctctacctgtcgctgctgtccggactgcacgggcaggaggagcaagaccaatattttgagttctttcccccgtccccacggtccgtggaccaggtcaaggcgcagctccgcaccgcgctggcctctggaggcgtcctggacgctagcggcgattaccgcgtctacaggggcctgctgaagaccaccatggaccccaacgatgtgatcctggccacgcacgccagcgtggacaacctgctgcacctgtcgggtctgctggagcgctgggagggcccgctgtccgtgtcggtgttcgcggccaccaaggaggaggcgcagctggccacggtgctggcctacgcgctgagcagccactgccccgacatgcgcgccagggtcgccatgcacctcgtgtgcccctcgcgttacgaggcagccgtgcccgacccccgggagccgggggagtttgccctgctgcggtcctgccaggaggtctttgacaagctagccagggtggcccagcccgggattaattatgcgctgggcaccaatgtctcctaccccaataacctgctgaggaatctggctcgtgagggggccaactatgccctggtgatcgatgtggacatggtgcccagcgaggggctgtggagaggcctgcgggaaatgctggatcagagcaaccagtggggaggcaccgcgctggtggtgcctgccttcgaaatccgaagagcccgccgcatgcccatgaacaaaaacgagctggtgcagctctaccaggttggcgaggtgcggcccttctattatgggttgtgcaccccctgccaggcacccaccaactattcccgctgggtcaacctgccggaagagagcttgctgcggcccgcctacgtggtaccttggcaggacccctgggagccattctacgtggcaggaggcaaggtgcccaccttcgacgagcgctttcggcagtacggcttcaaccgaatcagccaggcctgcgagctgcatgtggcggggtttgattttgaggtcctgaacgaaggtttcttggttcataagggcttcaaagaagcgttgaagttccatccccaaaaggaggctgaaaatcagcacaataagatcctatatcgccagttcaaacaggagttgaaggccaagtaccccaactctccccgacgctgctgagcccttccctcccctaatctgagaagtcagcctcttggctcctcaggccaccatttaggcctgactggggtaagaaatgtcgctccactttacagaggtagctgtggtgttgaaacactggacttggatatggggtgctgggatcgattcctagctttaccactaactagctgtgtggccttgagtaaatcccgttacctctctgagcctcggttaccctgtctgtaaaaagggaggtgagaatacctacctcacggaactgttgggaggctcagatgagatgctatatgtgaaaacattctgtaagcttcgtacaaatgtgaagtattaatattatcgcagtattattgttgttattattattgttattattaacaatcttgggtgggtagtaggagagcaaaaagtatgaatgggatggagctaagaagtctgaatacttaatgaaatggactttttggaaagaaatcagatgaaggcataaaatttagttcttagctcttgaacagaagcctaaaattcctggttctctcagggcttcgccttcaagggttctggaggagggaagggtctgcaggttccatgggtgacagcctgagatctgtcccttcaacgggctgggctgggtatgtgcctaccgatgacaatgtgtaaataaatgcgtgttcacacccacaaaaaaaaacaacgccgagcaaaaattcacctgaggggccacgctacgcgacccgctacgacacgggcca

SEQ ID NO: 100896 - DNA, 349 bp, Homo sapiens
acagcactccactggaagctgagtctccagaaagaccaaccctttgttagaagtttggaactttcagctgcaccccctcaacctcagagaagggagaaaggctggattgagttcaagcaccagtggccaatgatttaatcaatcatgtctacatagtggaagctcataaaaatccctaaatgatggggattggagagtttccaggtgggtgaacacactgaggtactgggaaggcagcatggaaactcggcacctcttcacctcccactacctcgccctacacatttcttccatttggctgttcctgagttgtatcccttataataaaccattaatagtaagtaaaatc

SEQ ID NO: 100897 - DNA, 397 bp, Homo sapiens
gggaggagaccagggaagctgggctagcagattctgaaacatgactcacgaactgggaccagagagcgtcaggggtctggggacaaatgtgcccttgacgtgggggccggtgactagagcgagaaaattcaggggagttgaatttgggcactggacaaaatgcacttggcacccagggccgtgggagggggtggggaatgctggaccaccgcgtcgggtggctcagcctggcagaaatcagtgcagggacctttaactccaaacgcagtcagctaaaggcgagaggcctgggaacacggacgtgacccagtgaatccagagaccaaccagatggtctccagaacaggaccctgggagctggaggtcaggacgggagcgtctgctcaagtgagcccgg

SEQ ID NO: 100898 - DNA, 310 bp, Homo sapiens
gcggccgcctactactactaaattcgcggccgcgtcgacaaattttatgtcaggcaaggtggctcacacctgtagtcccagcacttttgggaggttgaggcaggaggatcccttgagcctaggagtttgagaccagccctggcaacatagaccagcagctctacaaaaaataaagaaaattacctgggcatggtgggtggcacatgcacttgtagtcccaactagggaggctgagttgggaggactgtgtgatcctgggaggtcaaggctgcagtgatccatgatcacatgagactctctctcaaaaatt

SEQ ID NO: 100899 - DNA, 223 bp, Homo sapiens
ataataggatccacttttttgtaaaactatcaccaaaagcccctactaataaaatacgtgattctatgtgcctggatagagttagaagcatgagaaaaatatacaaggatgcatattaagttacatactaagaatgcagcatgtatgatttatagcgtagcatggactgctacagttagagaaggcaggtaagttgaaagagccaatgaaataagaaaaaggc

SEQ ID NO: 100900 - DNA, 703 bp, Homo sapiens
aagagcaatggaaatagactgacaaagaagttgaggtaagttgtgaaagcataattgacaaatatttggatatatgaagaatgaggaagagagagtagattaatcaaaattactgtgtgagaggatggtgatgccactggtaataggaagagaagatttagagggaagatttggacatagttgaagatgctggtagcacattgaagcattgtgtcttgcgcatatagctttacaaaatggccattgtgctggatattctttttgcccttcctgatctattttccatctttatctctcttgttctgtgttcctgggaggctgacaaataaagaactgcatactctcttttctggctttattcatggtgggtttggacagtgatagaaaagtgaggctgaaatatttgctccttctctttctcatatacttagcaagagattgtgagtggccacagctctgctccagtggccctcttatagctctaggtcttttctggcttctcgtaactgtctcctattgctagattctctagtcccaagaaggttcaaaccttgttgatttgccttaactgtgcccatacccttgtaaatagttccttttattaaaactcttcaataactgaatatactgtggtcatctcttcagtgaaattaaaaaaaaaaacttctttcacattttcttatgacttgatcttcccacacca

SEQ ID NO: 100901 - DNA, 398 bp, Homo sapiens
actgactgcaggtgattttttatttcctttttcctcctctaatttcctaatttttataacgagagtgttttactaattttttaaagcatcttttttgtgtatgaattaaggatggttacaataactaaggtggaaataaatgaagtttataactcagataatttagtcaaaatcaaattagtttgtagccataaacaatgactatcaaaggcccttatgcaaaaaaaaaaagtaagcttctgcagtccttaaattaagagggtttctcaagcctgtaatcccaatactttgggaggctgaaacaggaggattgcttgaagctagaagttcaagaccagcctaggtgacagtgtgcaacccagtctaaaaataaaaaataattttaaaaaattaccatt

SEQ ID NO: 100902 - DNA, 776 bp, Homo sapiens
gaggtgtgccttccaccagagacccagtcttgcaaggcagttattaaaaagtctcactttcgctgtgtccgtacctctaagtccattcttgggttggacacgtgagtgtgtttctcacaaacctgggggcctgtccgggatctctgtgcctgtgtggagtgggactccagctgagaggggagacgcgtcccacccgatttaggtggcctactctgtctgggcagtacaagctccccacaaaagccatagatcaactggagactgttactcaggagacactggaggtgacacagggagaaaagcaggcaccgtggcaacgaaggcaacctcttgcatcagccaaggttaaaaggacttctgactcaaactccacttctagagttcaggttcagcacttccagcccggcgacttggtgctgattaagacttgggaagaagacaagctccaccaaactgagaaggtccctaccaagcgctcctgaccactgagacagctgtgtgaacagtggaacggggatggaagaattgtctgaagaggatgagtgatcaccttccaggtggaggacttggaagagagagactaatgccaatagagctgcctgagctcatgacagagaatgattctaccccagtgacaagactttcaaagttccctattttgtttcatctgaaattccagaaaaactgaagaaatcaagatattaaagtgatattataaatgctatttccagagttcacaacataaaaatagacagtaaacttcattgttgtactag

SEQ ID NO: 100903 - DNA, 2251 bp, Homo sapiens
ttcccaattctctaaatgctttatcattttttcctgagatgcttctgagggatgctgacctcccactatggggaaaagggttgcttggaggacctggggtggcagccccccgaccagaagcaccctattttatagatagcagtctgaatggtagagagtcctgtgtgtgggttgttagaaggttggttcttcctgttattctctctggctttcctttcaacccacttattttcagaggcctctccccttagcatcctttaaaaggttttctgatgaatgtgtgaaagagttgattatttcaacagtattggttaagtcacaacgacgaagtgctgagaaggttatgggtaccaggaagaaacaaacagaagtcttaagattagaatgagaaccaaagagaatttaaccctgccatttttttttttttaacaccaagatcctaagtaattccaaatgccttagatatcaatgaaagctacacaccattgagatgggcaaaattctttctctacaaagggagtaatcaagtaaatacctgttctctttcaatggactgttgcctattgagcattgtggatgatgtgttttcagatttccaggtgaagttctgaccctacctgtttggccaaagacgtaaattgagaggaaaggccttggtcttcctgatcaaccagcatttaacgaacagtggcttaatgcagatcactcaagaggcagcatagcaatgtaaaaggaatataagtaggtgttggatgcctttttcctagaccaggaatggggaatatataacacctgtgccaccgctcttttaaggaggcattatgaatgagtgcagcattcctgtcctctgtgccaggatttggtcttagaatccatgtcagattggtgcttccagacatctattcccagtccatcagagtgaaatgaaggctatttgccatccctgccttagacagaggagtgaaagaattaagtgggtagacaccaaccaaaatgactttgaaagcagtgagctgattgagctccagttctgtggttaccagaaatactgagtgtctgtcatgtgcaagacaatgctaagaacagaatacagacataaataagtcacggcccatgaccttgaagagcttacggccttataaagaggttcactgtaattgtcttcaccagggcgtccttctcaaagatgcccacttttgtctggcacattggggctcggtggtctggtggtcccttcggtcttggccctatctgtcctttgtttttgtgatttactaacaatcatcacgaaccagttttgtttttcttttaaatttgaacatcacatcttgtgttttagttttttgctctatgatttttttctcactgcttttcagtcttctctgtacttcatttttgtgaaaaagtgaaaatcacatataatctttatttaaaaatgctcaccaagcactgcagactttggagttagggattcagcagcttgttccagtgaaaaggaggagtgaagctggggaagttagtatctaagaggggcaagctgattgcatgtgcatttatacctatgcctttaaaacattcccataaaaagtattaataaagaaatttccattccacactagtactgatgaaaaggtggttgattttgccttgtgataattatcaaaggatagtttttcatccttagattttattcacatgagagattttttttattttctctgttgacttaggaacacatcataaattcacaccaactgacacgttgctgacgtctgtacttgacataaccatttttattcatacaggaagcattaaatataaaagatggtcagttttgaagagcaaagggtgctgaaatgacttgtacggttggctggtgctttctcaaatggattgccatagttcattactagtaaagaaaaggaaaatgtgatttacgttgtcatttttcctattaaaaaaaacccttaagaatggggcacttgagctgtccctgcaatgttttcatatctagtagtcattttagggaaagtgataatctgtagaatgaatagttatgttttgatatgactgatactttctttgttaaaaggttgtattaagtcttcaatttcaagtctagcttaaaagtgtaaacattatgtgattcatttgaatacaagaatgcctatgaaatacccactataacagcattccttttgtgtttagaactatagaagaaaatgtcttcaaataaagtagttttcagtca

SEQ ID NO: 100904 - DNA, 523 bp, Homo sapiens
  misc_feature (25)..(25): n is a, c, g, or t
  misc_feature (32)..(32): n is a, c, g, or t
  misc_feature (50)..(50): n is a, c, g, or t
gggaaaactttttaattaaaccccnaataaanaggtggggaattttgaantaaacataaccatttttattcatacaggaagcattaaatataaaagatggtcagttttgaagagcaaagggtgctgaaatgacttgtacggttggctggtgctttctcaaatggattgccatagttcattactagtaaagaaaaggaaaatgtgatttacgttgtcatttttcctattaaaaaaaacccttaagaatggggcacttgagctgtccctgcaatgttttcatatctagtagtcattttagggaaagtgataatctgtagaatgaatagttatgttttgatatgactgatactttctttgttaaaaggttgtattaagtcttcaatttcaagtctagcttaaaagtgtaaacattatgtgattcatttgaatacaagaatgcctatgaaatacccactataacagcattccttttgtgtttagaactatagaagaaaatgtcttcaaataaagtagttttcagtca

SEQ ID NO: 100905 - DNA, 2197 bp, Homo sapiens
ttcccaattctctaaatgctttatcattttttcctgagatgcttctgagggatgctgacctcccactatggggaaaagggttgcttggaggacctggggtggcagccccccgaccagaagcaccctattttatagatagcagtctgaatggtagagagtcctgtgtgtgggttgttagaaggttggttcttcctgttattctctctggctttcctttcaacccacttattttcagaggcctctccccttagcatcctttaaaaggttttctgatgaatgtgtgaaagagttgattatttcaacagtattggttaagtcacaacgacgaagtgctgagaaggttatgggtaccaggaagaaacaaacagaagtcttaagattagaatgagaaccaaagagaatttaaccctgccatttttttttttttaacaccaagatcctaagtaattccaaatgccttagatatcaatgaaagctacacaccattgagatgggcggactgttgcctattgagcattgtggatgatgtgttttcagatttccaggtgaagttctgaccctacctgtttggccaaagacgtaaattgagaggaaaggccttggtcttcctgatcaaccagcatttaacgaacagtggcttaatgcagatcactcaagaggcagcatagcaatgtaaaaggaatataagtaggtgttggatgcctttttcctagaccaggaatggggaatatataacacctgtgccaccgctcttttaaggaggcattatgaatgagtgcagcattcctgtcctctgtgccaggatttggtcttagaatccatgtcagattggtgcttccagacatctattcccagtccatcagagtgaaatgaaggctatttgccatccctgccttagacagaggagtgaaagaattaagtgggtagacaccaaccaaaatgactttgaaagcagtgagctgattgagctccagttctgtggttaccagaaatactgagtgtctgtcatgtgcaagacaatgctaagaacagaatacagacataaataagtcacggcccatgaccttgaagagcttacggccttataaagaggttcactgtaattgtcttcaccagggcgtccttctcaaagatgcccacttttgtctggcacattggggctcggtggtctggtggtcccttcggtcttggccctatctgtcctttgtttttgtgatttactaacaatcatcacgaaccagttttgtttttcttttaaatttgaacatcacatcttgtgttttagttttttgctctatgatttttttctcactgcttttcagtcttctctgtacttcatttttgtgaaaaagtgaaaatcacatataatctttatttaaaaatgctcaccaagcactgcagactttggagttagggattcagcagcttgttccagtgaaaaggaggagtgaagctggggaagttagtatctaagaggggcaagctgattgcatgtgcatttatacctatgcctttaaaacattcccataaaaagtattaataaagaaatttccattccacactagtactgatgaaaaggtggttgattttgccttgtgataattatcaaaggatagtttttcatccttagattttattcacatgagagattttttttattttctctgttgacttaggaacacatcataaattcacaccaactgacacgttgctgacgtctgtacttgacataaccatttttattcatacaggaagcattaaatataaaagatggtcagttttgaagagcaaagggtgctgaaatgacttgtacggttggctggtgctttctcaaatggattgccatagttcattactagtaaagaaaaggaaaatgtgatttacgttgtcatttttcctattaaaaaaaacccttaagaatggggcacttgagctgtccctgcaatgttttcatatctagtagtcattttagggaaagtgataatctgtagaatgaatagttatgttttgatatgactgatactttctttgttaaaaggttgtattaagtcttcaatttcaagtctagcttaaaagtgtaaacattatgtgattcatttgaatacaagaatgcctatgaaatacccactataacagcattccttttgtgtttagaactatagaagaaaatgtcttcaaataaagtagttttcagtca

SEQ ID NO: 100906 - DNA, 405 bp, Homo sapiens
tctttttgtagagacaaggtctcgctgtgttgcccagattggtttcaaactcctgcctcagcctcccaaagtgctaggattacaggtgtgttccaccttgccctgccacattctcacttttagagtagtcttttggctgggggagagagtctcaacagagcatttgttagtatgcaaatatgtcactttgagagggaggatacatggttatcatagggatgagtttagtaagttacataagataactgagtttccatagttaaaaaaaaagagaaaagggatatggagacaccactataaacacctatcttgattgaggtgaggagccctagcctgtatggggcagcaggaggttcaccctgtctgttgggaaggaggaaactctaagacgcaggaaaattggca

SEQ ID NO: 100907 - DNA, 355 bp, Homo sapiens
acatcccaggtattaagcccagtacccgatacttatcttttctgtttctcttcctcctcccaccctccaccctcgaggaggtcccagtgtctgttgtttccttctttgtgttcataagttcttgtcatttagctcctatttataagtgagaacatgtggtatttggttttctattcctgcgttagtttaccaagcatgatagcctccagctccatccatgttcctgcaaaaggcatggtctcatagccacaattgttattgagcagaagtaaaaccatctactaaaaattatcactatctcttcaataataggagtgtctgaagaatttttggctgaatacaaccatggattaaa

SEQ ID NO: 100908 - DNA, 454 bp, Homo sapiens
aaatcctcctggggccttcggagatccttccatctggaccagtgcacagaattccctttacatcttttgggatacaccctaaagaagatccagtctttgttcaccttcacgagtttcttcaatgtgaaagctacaggaggctttgttcaaagaaactctgacccagaaacccaacatggaagcaggcagagcaggacacttttatcttcaggtggctgggggaaaggaaggcttcacaaggtgcacactaaaaaccatgggcctactgtgactgacgccatgctccacaggacagcagaacggctcaggagctgcctccagaatcatatggcaactagttcaacagaactgtgatagacttggaaatgcatgttttgaagagctgtcattcacagcagcttgaaaaagcccccactggccaaatctggaacaatctgagcggcaaaataaacaa

SEQ ID NO: 100909 - DNA, 189 bp, Homo sapiens
ccatttgcattctggttgcttccttttttgaaagaagggcagagctacctctctagtatgcagaggtgtgcagcctaaatgagaaggtattcaagaccctactagtgtctgacataataaatgtcaacttcattgacgcagttcttggtataaccaaaaaagcttgagatggccatgattatgtatgac

SEQ ID NO: 100910 - DNA, 1021 bp, Homo sapiens
  misc_feature (1012)..(1019): n is a, c, g, or t
gctgtggcctctcctagcgaggggacatgactcctgcagaagtcctggctcaccgtccagtctgcatgcagggccaggccaggtgtgcccatgtccagttccttcctgcctgagcctttacctgccaagagcctgcaacatggggttcccttgtcccttgactcttctctctcttccctcctagagaagatctgcatacttcctaacagaggcttggcccgcaccaaggtccccattttcctggggatccagggagggagccgctgcctggcatgtgtggagacagaagaggggccttccctacagctggaggatgtgaacattgaggaactgtacaaaggtggtgaagaggccacacgcttcaccttcttccagagcagctcaggctccgccttcaggcttgaggctgctgcctggcctggctggttcctgtgtggcccggcagagccccagcagccagtacagctcaccaaggagagtgagccctcagcccgtaccaagttttactttgaacagagctggtagggagacaggaaactgcgttttagccttgtgcccccaaaccaagctcatcctgctcagggtctatggtaggcagaataatgtcccccgaaatatgtccacatcctaatcccaagatctgtgcatatgttaccatacatgtccaaagaggttttgcaaatgtgattatgttaaggatcttgaaatgaggagacaatcctgggttatccttgtgggctcagtttaatcacaagaaggaggcaggaagggagagtcagagagagaatggaagataccatgcttctaattttgaagatggagtgaggggccttgagccaacaaatgcaggtgtttttagaaggtggaaaagccaagggaacggattctcctctagagtctccggaaggaacacagctcttgacacatggatttcagctcagtgacacccatttcagacttctgacctccacaactataaaataataaacttgtgttattgtaaacctctaannnnnnnnaa

SEQ ID NO: 100911 - DNA, 1376 bp, Homo sapiens
  misc_feature (307)..(307): n is a, c, g, or t
  misc_feature (493)..(493): n is a, c, g, or t
  misc_feature (1367)..(1374): n is a, c, g, or t
ggcagtgggactgggtttgagctgggcttatcctccaactgtgagggaggctacagcacactccaccccactctcagggctgggaattgttgtggctcagctatttgggggaatctgttttccagtttctcagaaccagcgcaagcacacacatcccaggctcacacccctggtggctggacttgctcccggatagcctcagtcagggagaggcagagctgcctggagcctgctgggctggtggaagccttggtggattctggcaggccaattatagacgaatggcctggggaacccgtgcagcccntggctgagtggttctaagccccagcacgtctgcctctggcttcacccagcctccttttctaactgcccttctctcctccccatcagtgaggaccagacaccactgattgcaggaatgtgttccctccccatggcaagatactacataattaaatatgcagaccagaaggctctatacacaagaganggccagctgctggtgggagatcctgttgcagacaactgctgtgcagagaagatctgcatacttcctaacagaggcttggcccgcaccaaggtccccattttcctggggatccagggagggagccgctgcctggcatgtgtggagacagaagaggggccttccctacagctggaggatgtgaacattgaggaactgtacaaaggtggtgaagaggccacacgcttcaccttcttccagagcagctcaggctccgccttcaggcttgaggctgctgcctggcctggctggttcctgtgtggcccggcagagccccagcagccagtacagctcaccaaggagagtgagccctcagcccgtaccaagttttactttgaacagagctggtagggagacaggaaactgcgttttagccttgtgcccccaaaccaagctcatcctgctcagggtctatggtaggcagaataatgtcccccgaaatatgtccacatcctaatcccaagatctgtgcatatgttaccatacatgtccaaagaggttttgcaaatgtgattatgttaaggatcttgaaatgaggagacaatcctgggttatccttgtgggctcagtttaatcacaagaaggaggcaggaagggagagtcagagagagaatggaagataccatgcttctaattttgaagatggagtgaggggccttgagccaacaaatgcaggtgtttttagaaggtggaaaagccaagggaacggattctcctctagagtctccggaaggaacacagctcttgacacatggatttcagctcagtgacacccatttcagacttctgacctccacaactataaaataataaacttgtgttattgtaaacctctaannnnnnnnaa

SEQ ID NO: 100912 - DNA, 649 bp, Homo sapiens
atgctggtagaggacagacagtgaacacatgcacggtgcagctgtcagcacctcatcagaacaatgagcacatcagagtcagacacagtgaagggactaaatgacatgaccccttagtgttcttccaaacccaagagtctgtgtcatctatgaacacaggagtctcccttaacttttttggtttttgcaatctgcttttatgtagttttatgaggaagttttcttttattcaagacctctgccaggtgggtggtgagagcagagtccagcaagcattccaatgtgctaaaggaaagagaagtgttgtattcctggaggccccaaggaccactggcccctaaagtcagagaggggaagggccatgccaatttcagctgtcaaatcaagtgacaaaacttctaagaacttcttaaggcaggtatagcatcatttccttgccatctcatcagtctcagggtggtgtgcctgatgcataactgcctctgatagggtaagtcctaccagggtttttgaaggacacagggtattagtagaatcatccctactcctgcttgtgccaagtcagcccaatttctgactgcttataaccaagctcagccgttcagacatgccaaagactaccacaaaatatttgcagatctcagtagga

SEQ ID NO: 100913 - DNA, 530 bp, Homo sapiens
caggaagacaaggaatgcacaaaaaccaataaatgcaagagctgtataccagaacacttgaataagagataatatctcactatgagaatttcagttcaaataaacaaaaatttaattgccctcagtaatgtaataagataaatttttaagagaatgaaatggaagtagtaggcctgagcactttgttttaaatgcacagatttgaatacacaccatttcgtagtaaatacttttgacgtaaattttacatacagcatcctcagattatggtgcaatgaaattggaaatgaataagaaaacaacaggttttcaaccaaatgaaaaagagaaacatactacaataaaactatactacttgaaagacataaaaaatccccatcaccaattatccagctcatgaggctagcatagcttaactcataattttgttcaactctacatgccaatttcaacaagaaaaaatagagcatatataatgtactggttaatcccaaaaggacctaaaaaagaacagagtaagatagacaaaa

SEQ ID NO: 100914 - DNA, 558 bp, Homo sapiens
tgagacagagtcttactctgtcacccaggctagagtgtgacgttgagatcttggctcactgcaacctctgcctcctgggttcaagcaattctcctgcctcagcctcccaagtagctgggactacaggtgtgctaccatgcccagctaatttttgtagttttagtagagacaggatttcattattttggccaggctggtctcaaactcctgacctcagatgatctgcccgcttcagcctcccaagtgctgggattacaggcataagccaccatgcccaggccagaatttgcccatttttaatgcatgttctccacctttcatagaaaaagccatatatcctactaagctatttatgaagaccacaggttctagcccatgacaagcttgttatcctttctaaacacacaacccccaaatctagtcagcaaacttgaaggtctagggtgatggtcatgaaaggaatcaaacaaaagaatcttggaggggtctctgcaaattcatcgactccattaaggaatattcaacaacacagaaacttaaatccaggtaatattaaag

SEQ ID NO: 100915 - DNA, 447 bp, Homo sapiens
ttaaccagatctaaaaaaaaccctctcaaatatgtaatctattattttcagaagccctaagagaaaggcaaataatctcttctctatagtaactgaggggaaaacagtttaccatatttgttctgaaataacaaaacccaaggaggaacaactctctctgaggtaagagggcatcacaggagggatttcaatccttcctagtactgggaggagaaagtgcccttttctccaagaggaaagaatctatttatcatcaaacaaacaatgtgggagagttcatagctgcacaagtgttttctgggcgaagtaaaatgaatcatggattaagctatttggaaaaaagtgtgaaaacagaggagttgataccaaattaaaacgacttttggaaatatcatgtacgtatggaacaagtgcaaagggaaccactgactcagcgtcagaaatgcc

SEQ ID NO: 100916 - DNA, 2376 bp, Homo sapiens
gcttaagttgacctctgggtccggaatcgcgggcaaagatggcggcggccaggtgttggaggcctttgctacgcggtccgaggctttcattgcacaccgcggctaatgccgccgccacggctacagaaacgacctgccaagacgtcgcggcgacccccgtcgcgcggtacccgccgattgtggcctccatgacagccgacagcaaagctgcacggctgcggcggatcgagcgctggcaggcgacggtgcacgctgcggagtcggtagacgagaagctgcgaatcctcaccaagatgcagtttatgaagtacatggtttacccgcagaccttcgcgctgaatgccgaccgctggtaccagtacttcaccaagaccgtgttcctgtcgggtctgccgccgcccccagcggagcccgagcccgagcccgaacccgaacctgaacctgcgctggacctcgcggcgctgcgtgcggtcgcctgcgactgcctgctgcaggagcacttctacctgcggcgcaggcggcgcgtgcaccgttacgaggagagcgaggtcatatctttgcccttcctggatcagctggtgtcaaccctcgtgggcctcctcagcccacacaacccggccctggccgctgccgccctcgattatagatgcccagttcatttttactgggtgcgtggtgaagaaattattcctcgtggtcatcgaagaggtcgaattgatgacttgcgataccagatagatgataaaccaaacaaccagattcgaatatccaagcaactcgcagagtttgtgccattggattattctgttcctatagaaatccccactataaaatgtaaaccagacaaacttccattattcaaacggcagtatgaaaaccacatatttgttggctcaaaaactgcagatccttgctgttacggtcacacccagtttcatctgttacctgacaaattaagaagggaaaggcttttgagacaaaactgtgctgatcagatagaagttgtttttagagctaatgctattgcaagcctttttgcttggactggagcacaagctatgtatcaaggattctggagtgaagcagatgttactcgaccttttgtctcccaggctgtgatcacagatggaaaatacttttcctttttctgctaccagctaaatactttggcactgactacacaagctgatcaaaataaccctcgtaaaaatatatgttggggtacacaaagtaagcctctttatgaaacaattgaggataatgatgtgaaaggttttaatgatgatgttctacttcagatagttcactttctactgaatagaccaaaagaagaaaaatcacagctgttggaaaactgaaaaagcatatttgattgagaactgtgggaatatttaaattttactgaaggaacaataatgatgagatttgtaactgtcaactattaaatacattgatttttgagacaaatatttcttatgtcaacctgttattagatctcttactctgctcaaattcatcactgaaagatttaattttagttaccttttgttgatttaaaaataattgcatttgtatattgctaactgataagacaaattgagttattgagctattaaatgcacattttaatataaatgcagaaatcccaaataaaatgctaacatactgaattcagtaattaaaagaacccactgcagctgggtgcaatggctcatgcctgtgatccacccacctcggcctcccaaagtgctgggattacaggtgtgagccactgcacctggcctatttacatcttatttcttagcaacgtttagagtttcttttatctccatgcatttcctgtgtatgcctacatttttgtgtaattggaaatggactttttctttccaattatatacttctttatagtttttaaaagtggctttatataggtgatactgatagctatatatttatcttgtaaaagaccaatttaagttgttcattagagccaataatttgtcagctgattctcatgaggtgtatataaccaatctgatttgcgttcttctgaaactgcttatcaaatagatggccattagcccctaaatggcaaaatccactggacagttttctgtattgtactcagtaaggtctgacatattttgcatgtttgaccgctccttcatttttaaaatagtttttttattgccttcagtgaaacatgctcttggttttcctcctatctcatttgctgttctgtcatatttctgtttgctgttcttcctctcacttttcttcaaatattggtgtacttttttttcttttctagactccatttttgtttaaccacactctccctagatgattttatcaaattccatggatttaaatata

SEQ ID NO: 100917 - DNA, 1887 bp, Homo sapiens
gccaaatggaagagcagtggtgatgaagagaaacgccacttaagagagtggggcgggccaggtttcctgttggctgttccaccacaaagctgtgtgaccatgtgtcacatggctgagtagtaacttctttttaccttaattttaaatttaattatagatgcccagttcatttttactgggtgcgtggtgaagaaattattcctcgtggtcatcgaagaggtcgaattgatgacttgcgataccagatagatgataaaccaaacaaccagattcgaatatccaagcaactcgcagagtttgtgccattggattattctgttcctatagaaatccccactataaaatgtaaaccagacaaacttccattattcaaacggcagtatgaaaaccacatatttgttggctcaaaaactgcagatccttgctgttacggtcacacccagtttcatctgttacctgacaaattaagaagggaaaggcttttgagacaaaactgtgctgatcagatagaagttgtttttagagctaatgctattgcaagcctttttgcttggactggagcacaagctatgtatcaaggattctggagtgaagcagatgttactcgaccttttgtctcccaggctgtgatcacagatggaaaatacttttcctttttctgctaccagctaaatactttggcactgactacacaagctgatcaaaataaccctcgtaaaaatatatgttggggtacacaaagtaagcctctttatgaaacaattgaggataatgatgtgaaaggttttaatgatgatgttctacttcagatagttcactttctactgaatagaccaaaagaagaaaaatcacagctgttggaaaactgaaaaagcatatttgattgagaactgtgggaatatttaaattttactgaaggaacaataatgatgagatttgtaactgtcaactattaaatacattgatttttgagacaaatatttcttatgtcaacctgttattagatctcttactctgctcaaattcatcactgaaagatttaattttagttaccttttgttgatttaaaaataattgcatttgtatattgctaactgataagacaaattgagttattgagctattaaatgcacattttaatataaatgcagaaatcccaaataaaatgctaacatactgaattcagtaattaaaagaacccactgcagctgggtgcaatggctcatgcctgtgatccacccacctcggcctcccaaagtgctgggattacaggtgtgagccactgcacctggcctatttacatcttatttcttagcaacgtttagagtttcttttatctccatgcatttcctgtgtatgcctacatttttgtgtaattggaaatggactttttctttccaattatatacttctttatagtttttaaaagtggctttatataggtgatactgatagctatatatttatcttgtaaaagaccaatttaagttgttcattagagccaataatttgtcagctgattctcatgaggtgtatataaccaatctgatttgcgttcttctgaaactgcttatcaaatagatggccattagcccctaaatggcaaaatccactggacagttttctgtattgtactcagtaaggtctgacatattttgcatgtttgaccgctccttcatttttaaaatagtttttttattgccttcagtgaaacatgctcttggttttcctcctatctcatttgctgttctgtcatatttctgtttgctgttcttcctctcacttttcttcaaatattggtgtacttttttttcttttctagactccatttttgtttaaccacactctccctagatgattttatcaaattccatggatttaaatata

SEQ ID NO: 100918 - DNA, 1900 bp, Homo sapiens
attttaaccttatactcaaaattgacttagatttatataatagaattgaatagaggaagtgggagtaggagtagatggaattagacaaagtaagaagtaactttcttgaagatggtagaatggcactgtttacttttgaaagataaagtacttctttttacaataaaataaattacatatgtcaacagtattactcatttgctatctccattaaagatgacataaaatacgtgtggagaaataaagttactacttggccttggtaattgggtaatgacatagtaccagatgtagaaagcatctgtgtagataaagcttgctgctcttagatgaagtaaataagactgatgttgttgaaaaagattaatcatgagattgaggatactagaagggaggaaaatattatttgtgcagaaataaaatatagggttagaatagagatgataaggaaactttgaggtcttcagggattttgttacataaagtatctaagttgtaggaggtatttgataccctctaatgtctaatgtgattgttttgtttgggtaagatatattctatgtgtaaatttcagcataactttcttctacaggattctggagtgaagcagatgttactcgaccttttgtctcccaggctgtgatcacagatggaaaatacttttcctttttctgctaccagctaaatactttggcactgactacacaagctgatcaaaataaccctcgtaaaaatatatgttggggtacacaaagtaagcctctttatgaaacaattgaggataatgatgtgaaaggttttaatgatgatgttctacttcagatagttcactttctactgaatagaccaaaagaagaaaaatcacagctgttggaaaactgaaaaagcatatttgattgagaactgtgggaatatttaaattttactgaaggaacaataatgatgagatttgtaactgtcaactattaaatacattgatttttgagacaaatatttcttatgtcaacctgttattagatctcttactctgctcaaattcatcactgaaagatttaattttagttaccttttgttgatttaaaaataattgcatttgtatattgctaactgataagacaaattgagttattgagctattaaatgcacattttaatataaatgcagaaatcccaaataaaatgctaacatactgaattcagtaattaaaagaacccactgcagctgggtgcaatggctcatgcctgtgatccacccacctcggcctcccaaagtgctgggattacaggtgtgagccactgcacctggcctatttacatcttatttcttagcaacgtttagagtttcttttatctccatgcatttcctgtgtatgcctacatttttgtgtaattggaaatggactttttctttccaattatatacttctttatagtttttaaaagtggctttatataggtgatactgatagctatatatttatcttgtaaaagaccaatttaagttgttcattagagccaataatttgtcagctgattctcatgaggtgtatataaccaatctgatttgcgttcttctgaaactgcttatcaaatagatggccattagcccctaaatggcaaaatccactggacagttttctgtattgtactcagtaaggtctgacatattttgcatgtttgaccgctccttcatttttaaaatagtttttttattgccttcagtgaaacatgctcttggttttcctcctatctcatttgctgttctgtcatatttctgtttgctgttcttcctctcacttttcttcaaatattggtgtacttttttttcttttctagactccatttttgtttaaccacactctccctagatgattttatcaaattccatggatttaaatata

SEQ ID NO: 100919 - DNA, 728 bp, Homo sapiens
gccatgttggttaggctggtctcgaactcctgacctcaggtgatccacccacctcggcctcccaaagtgctgggattacaggtgtgagccactgcacctggcctatttacatcttatttcttagcaacgtttagagtttcttttatctccatgcatttcctgtgtatgcctacatttttgtgtaattggaaatggactttttctttccaattatatacttctttatagtttttaaaagtggctttatataggtgatactgatagctatatatttatcttgtaaaagaccaatttaagttgttcattagagccaataatttgtcagctgattctcatgaggtgtatataaccaatctgatttgcgttcttctgaaactgcttatcaaatagatggccattagcccctaaatggcaaaatccactggacagttttctgtattgtactcagtaaggtctgacatattttgcatgtttgaccgctccttcatttttaaaatagtttttttattgccttcagtgaaacatgctcttggttttcctcctatctcatttgctgttctgtcatatttctgtttgctgttcttcctctcacttttcttcaaatattggtgtacttttttttcttttctagactccatttttgtttaaccacactctccctagatgattttatcaaattccatggatttaaatatatttgtaagcacattcaaaattagtttgatttc

SEQ ID NO: 100920 - DNA, 1465 bp, Homo sapiens
gcttaagttgacctctgggtccggaatcgcgggcaaagatggcggcggccaggtgttggaggcctttgctacgcggtccgaggctttcattgcacaccgcggctaatgccgccgccacggctacagaaacgacctgccaagacgtcgcggcgacccccgtcgcgcggtacccgccgattgtggcctccatgacagccgacagcaaagctgcacggctgcggcggatcgagcgctggcaggcgacggtgcacgctgcggagtcggtagacgagaagctgcgaatcctcaccaagatgcagtttatgaagtacatggtttacccgcagaccttcgcgctgaatgccgaccgctggtaccagtacttcaccaagaccgtgttcctgtcgggtctgccgccgcccccagcggagcccgagcccgagcccgaacccgaacctgaacctgcgctggacctcgcggcgctgcgtgcggtcgcctgcgactgcctgctgcaggagcacttctacctgcggcgcaggcggcgcgtgcaccgttacgaggagagcgaggtcatatctttgcccttcctggatcagctggtgtcaaccctcgtgggcctcctcagcccacacaacccggccctggccgctgccgccctcgattatagatgcccagttcatttttactgggtgcgtggtgaagaaattattcctcgtggtcatcgaagaggtcgaattgatgacttgcgataccagatagatgataaaccaaacaaccagattcgaatatccaagcaactcgcagagtttgtgccattggattattctgttcctatagaaatccccactataaaatgtaaaccagacaaacttccattattcaaacggcagtatgaaaaccacatatttgttggctcaaaaactgcagatccttgctgttacggtcacacccagtttcatctgttacctgacaaattaagaagggaaaggcttttgagacaaaactgtgctgatcagatagaagttgtttttagagctaatgctattgcaagcctttttgcttggactggagcacaagctatgtatcaaggattctggagtgaagcagatgttactcgaccttttgtctcccaggctgtgatcacagatggaaaatacttttcctttttctgctaccagctaaatactttggcactgactacacaagctgatcaaaataaccctcgtaaaaatatatgttggggtacacaaagtaagcctctttatgaaacaattgaggataatgatgtgaaaggttttaatgatgatgttctacttcagatagttcactttctactgaatagaccaaaagaagaaaaatcacagctgttggaaaactgaaaaagcatatttgattgagaactgtgggaatatttaaattttactgaaggaacaataatgatgagatttgtaactgtcaactattaaatacattgatttttgagaca

SEQ ID NO: 100921 - DNA, 2296 bp, Homo sapiens
gcttaagttgacctctgggtccggaatcgcgggcaaagatggcggcggccaggtgttggaggcctttgctacgcggtccgaggctttcattgcacaccgcggctaatgccgccgccacggctacagaaacgacctgccaagacgtcgcggcgacccccgtcgcgcggtacccgccgattgtggcctccatgacagccgacagcaaagctgcacggctgcggcggatcgagcgctggcaggcgacggtgcacgctgcggagtcggtagacgagaagctgcgaatcctcaccaagatgcagtttatgaagtacatggtttacccgcagaccttcgcgctgaatgccgaccgctggtaccagtacttcaccaagaccgtgttcctgtcgggtctgccgccgcccccagcggagcccgagcccgagcccgaacccgaacctgaacctgcgctggacctcgcggcgctgcgtgcggtcgcctgcgactgcctgctgcaggagcacttctacctgcggcgcaggcggcgcgtgcaccgttacgaggagagcgaggtcatatctttgcccttcctggatcagctggtgtcaaccctcgtgggcctcctcagcccacacaacccggccctggccgctgccgccctcgattatagatgcccagttcatttttactgggtgcgtggtgaagaaattattcctcgtggtcatcgaagaggtcgaattgatgacttgcgataccagatagatgataaaccaaacaaccagattcgaatatccaagcaactcgcagagtttgtgccattggattattctgttcctatagaaatccccactataaaatgtaaaccagacaaacttccattattcaaacggcagtatgaaaaccacatatttgttggctcaaaaactgcagatccttgctgttacggtcacacccagtttcatctgttacctgacaaattaagaagggaaaggcttttgagacaaaactgtgctgatcagatagaagttgtttttagagctaatgctattgcaagcctttttgcttggactggagcacaagctatgtatcaaggattctggagtgaagcagatgttactcgaccttttgtctcccaggctgtgatcacagatggaaaatacttttcctttttctgctaccagctaaatactttggcactgactacacaagctgatcaaaataaccctcgtaaaaatatatgttggggtacacaaagtaagcctctttatgaaacaattgaggataatgatgtgaaaggttttaatgatgatgttctacttcagatagttcactttctactgaatagaccaaaagaagaaaaatcacagctgttggaaaactgaaaaagcatatttgattgagaactgtgggaatatttaaattttactgaaggaacaataatgatgagatttgtaactgtcaactattaaatacattgatttttgagacaaatatttcttatgtcaacctgttattagatctcttactctgctcaaattcatcactgaaagatttaattttagttaccttttgttgatttaaaaataattgcatttgtatattgctaactgataagacaaattgagttattgagctattaaatgcacattttaatataaatgcagaaatcccaaataaaatgctaacatactgaattcagtaattaaaagaacccactgcagctggcctatttacatcttatttcttagcaacgtttagagtttcttttatctccatgcatttcctgtgtatgcctacatttttgtgtaattggaaatggactttttctttccaattatatacttctttatagtttttaaaagtggctttatataggtgatactgatagctatatatttatcttgtaaaagaccaatttaagttgttcattagagccaataatttgtcagctgattctcatgaggtgtatataaccaatctgatttgcgttcttctgaaactgcttatcaaatagatggccattagcccctaaatggcaaaatccactggacagttttctgtattgtactcagtaaggtctgacatattttgcatgtttgaccgctccttcatttttaaaatagtttttttattgccttcagtgaaacatgctcttggttttcctcctatctcatttgctgttctgtcatatttctgtttgctgttcttcctctcacttttcttcaaatattggtgtacttttttttcttttctagactccatttttgtttaaccacactctccctagatgattttatcaaattccatggatttaaatata

SEQ ID NO: 100922 - DNA, 413 bp, Homo sapiens
tcctggaactcctggactattctattccaagttgctacttcctgagagggtcactggatgtcccccttggagaaggaatcaccttggattaccatctttaaatcttaaagggatttttctcataggtattctacttaagtacagacaaataatttaatcatcccatagtgtatccaccatatttgtggcttgtaaatgttttaaaacttgggcataagtagctgataagttacaaaaaagatacaaatttcaataaggtaattttagttaaagtgacaggaaatgggggtgcattttgaatagaaaaacacagaactccaaaaacaagacaaaaaaccatgttatttccaaagagaacatctcagttgtgcagaaagaattaacatagcaggcctgattgagactgatatgct

SEQ ID NO: 100923 - DNA, 374 bp, Homo sapiens
atacaaaaaataaattagctgggggcgtggtggcatgcgcctgtagtcccagctactcgggaggctgaggcaggagaatggcatgaacccaagaggcggaggttgcagtgagctgagatcacaccactgcactctagcctggctacagagtgagactccatctcagaaaaacacacacacacacacacacacaaacagaaaagggtagaatcgccctgttgaagggaaagtggggggtctaggcacttggttatgctttataaacttcttctgctcctccccaagcaataggttctagatgcgagggttctaggtggagggaggccttagaacatgtgtgccctgaattcgttcaccttcccagagttcattcc

SEQ ID NO: 100924 - DNA, 4788 bp, Homo sapiens
tcctgtgtctccttataaaatggtggctagggaactggacatcattctcaaagctatgacgttcagcaaggtatgtgatggcttttaaggagcacgggaagatcacatcctgctgtattccgggttagtttgagccccataaatagcagcagagccggagctggagccggcgccagcggctggagcagcaagggagtcagggccagggccagagagccggagagaggagcccccgaccgagagcccaggtgagcccacccttcctccccagcccagccccagcccagcccagcttggcccagtctccataacaacatctcctggagcccgcagagagatcccagccctgcccaatcccttcaccaccacaagcccctgcctatctcggggacccccaagaactgggagacttgtggctggaaggcagagacccccctcccccagcccagaccctccctcacatatccagaaaggcacacactgtggggaggtagatacccagccagagaaaggtcccacttctgagggaggtacaggaactgtcacaccctcctggaaacggacacacgacatggggggacagacacggagggtggggcactcagacacaccaatgcacactcactcggggaagcatgacatgggatcagacagcctcaccctgagatctgtacagacacagatagatggactgaccggccatgaactctggccggcatacccctgcctgcttcagccgaggcttggtaccactgctgggggaaggtggcatgcgtgcatcccacgggcagcatggagggagccacgactccccaaaaatcctgtcgctaagagacggtgccagtgctgccaagaagtgtgaaaacaggggaggtggggagggatgtgaggcttgtcacagttagagctcctgccaggagcctgaaggagctttcagcagagccctggtcctgcctcccagcccaccaccactccttttccatcagctagccagaaggggaatgggggtagggagtggatagggatagccagcaggggactttccaacctgtctcctgcccactgcagactccacttctgagacccatcctcttcagaactccagaggcctctccaccccctgccccacccccttgccctagtttagctccctcgtgccaagactgagtgcagcgctggcacaacaccagtcgggaaatagcagaaggtgctgaggcggcagaaagtgtagatcaatcgatggcctaggagccaagactgccaggaacatccccaccccaatccttcagccctctccagccccatccacgcatacctaggccagcagcacagggcttctgagcaggagtgggaggctcaggtcctctgccctcccctgctcagaactctggtgaagctgaggaagcaggaggtccgtgaggccccagggtctagggaaggaggttaaggggtggggcccagggaccctagaggatagacccctctgctggcaggtgttccctttccagagtccaggccacctgctctgtccccacagtgacatgtcggaccctgagatgggatgggtgcctgagcccccaaccatgacgctgggggcctctcgggtggagctgcgggtgtcctgccatggcctcctggaccgggacacactcaccaaaccccacccctgcgtgctgctcaagctctactctgatgagcagtgggtggaggtagagcgcacagaggtgcttcgctcctgttccagccctgtcttctcccgggtgctggcccttgagtatttttttgaggagaagcagcccctgcagttccacgtgttcgatgccgaggacggagccaccagcccccgaaatgataccttcctcggctctacggagtgcaccttgggccagattgtgtcacaaaccaaggtcactaagccattattgctgaagaatgggaagactgcgggcaagtccaccatcacgatcgtggccgaggaggtatcaggcacaaacgactatgtgcaactcaccttcagagcctacaagctggacaacaaggatctgttcagcaagtctgaccctttcatggaaatctataagaccaacgaggaccaaagtgatcagctggtctggagaactgaggtggtgaagaacaacctgaaccccagctgggagccgttccgcctgtccctgcattccctatgcagctgtgatgttcaccgacctctcaagttcctggtgtatgactatgactccagtgggaagcatgacttcatcggcgagttcaccagcactttccaggagatgcaggaagggacggcaaaccctgggcaggaggtgccacaaataccccacccccagaatcccacccagatccctgggagaatcctgagggtgatgctgaagagaccaccataggtgataggaagtggagagggtggaaagcacctgggctcagctgaaggacggaaccatgggggtcttgctctgggaggctctgctggaagggagaaagaggggtcacctgatggacttgtgaccctgagcttgtggggtggggtctagatgcagtgggactgtatcaaccccaagtatcgggacaagaagaagaattacaagagctcagggacggtagtgctggcccagtgcacggtaaatttcacttcctgcttcaagccttgccccagcccctgcccctaccacactctcaggttcaacccttcccttgtttcaaagaccagtttctctgcttctgggaactggaaaccacccccaactgcaacccaaaaaactctggctcccccatgttccccacagaagccctacccaagctccctcctcaaaggaccaccccatcccctcgccttacccctctccctacctccaggtggagaaggtgcacaccttcctggattacatcatgggtggctgccagatcagcttcacggtaaagactcagagggagggcacacaggcaagagggaggggctgagtccatagtgaaaggaaggagcccagaatctccactgccccaacttgggctgctcatgagccttcgcattgtcagcttatgcacccccacatcattatgtggctacctgtagcctccccaccactcatcttagtcctccctacagatcccagctctggcctaggcaatctggtggctctcatggttgcagcatgaccttcttcccacccccacccaggtggccattgacttcactgcctccaatggggacccgaggagcagccagtccctgcactgcctcagtccccgacagcccaaccactacctgcaggccctgcgtgcagtgggaggcatctgccaggactatgacaggtaggagagagtggggcgggagggaacaggcagggaggccttgcccaacggattccacagctttttcttctccccagtgataagcggttcccagcttttggctttggggctcgaatcccccccaacttcgaggtaggctagatgcgagggaaagaaggagatggggggcgtgtcagtcaggcagaaaaggcaggccctcactgctcccgccttgccctcacaggtgtcccatgactttgctatcaactttgacccggaaaatcctgaatgtgaaggtaaaaggggagattttcacctgccccgcctccccgcagacacactccacacaggagcacagactccactccccagggcccagcttcctgtcccttccacccatcccaggcctgtctttatcagagatctcaggggtcatcgcctcctaccgtcgttgcctgccccagatccagctctacggccccaccaatgtggcccccatcatcaaccgtgtggctgagccggcccagcgggagcagagcaccggccaagccacgaagtactcggtgctgctggtgctcactgacggtgtggtgagcgacatggctgagactcgcactgctatcgtgcgtgcctcccgcctgcccatgtccatcatcatcgtaggcgtgggcaatgctgacttctctgacatgcggctgctggatggcgacgacggccccttgcgctgcccccgaggggtgcctgcagcccgagacattgtccagttcgtgcccttccgagacttcaaggatgtgagtcccccgggccccttccggctgaaggactcctcagcttctcatccccccaaatctgaccttcgtcttccaccatttgatgtcctgctaaggacgcgggagcccagctggccaccctgaagccccacttctccctcagatgaccctgcctcccctactcttcctctcacccctaaccacatcactgtccccaccctaggctgccccctctgcactcgccaagtgtgtcctggctgaggtgccacggcaggtggtggagtactacgccagccagggcatcagccctggggctcccaggccctgcacactggctacgactcccagccctagcccgtgactgcctccctccggaccgacactccctcagcctctcagtgagtcctggggcttccaaaggagtggacacagggggtgcaaagtggggcttggtagagcccaactaggctgggtgtagtgtagaagagagtgcttatgactctcccaccccctcccgtgcctgtcctgaccctcgtgactccagtgaccaatgcctccacctcttggaccaggtgtgccccctgggttctggacgtgagtggtgggtcctgctcctatctctccaaaccccatacccttcaatgctgtggcccctcagtgacttccttgggtgatcctgactttctagccattaataaagagaactgctcctagc

SEQ ID NO: 100925 - DNA, 3919 bp, Homo sapiens
  misc_feature (1213)..(1213): n is a, c, g, or t
tcctgtgtctccttataaaatggtggctagggaactggacatcattctcaaagctatgacgttcagcaaggtatgtgatggcttttaaggagcacgggaagatcacatcctgctgtattccgggttagtttgagccccataaatagcagcagagccggagctggagccggcgccagcggctggagcagcaagggagtcagggccagggccagagagccggagagaggagcccccgaccgagagcccagtgacatgtcggaccctgagatgggatgggtgcctgagcccccaaccatgacgctgggggcctctcgggtggagctgcgggtgtcctgccatggcctcctggaccgggacacactcaccaaaccccacccctgcgtgctgctcaagctctactctgatgagcagtgggtggaggtagagcgcacagaggtgcttcgctcctgttccagccctgtcttctcccgggtgctggcccttgagtatttttttgaggagaagcagcccctgcagttccacgtgttcgatgccgaggacggagccaccagcccccgaaatgataccttcctcggctctacggagtgcaccttgggccagattgtgtcacaaaccaaggtcactaagccattattgctgaagaatgggaagactgcgggcaagtccaccatcacggtaggcaagatcacctgtactcacccttggtccaggtattcaatgcccctgcatggacacctatggtgacatcatgcccaggaccacccccacctaagggaaaggggatggggtggcccttgtggtaaggttaggggagtcctgccacttgtatcccccttgcagatcgtggccgaggaggtatcaggcacaaacgactatgtgcaactcaccttcagagcctacaagctggacaacaaggttggaaccccagagtccaggcccccaactcccctgtcactcctaggcctcccactcaagacagatcccaggagcccaggcctgctctcttcccagtggagcccatcccccaccctccttgcagctctcaccaacctcaagggccctttctcctgtatcttcaggatctgttcagcaagtctgaccctttcatggaaatctataagaccaacgaggaccaaagtgatcagctggtctggagaactgaggttggtgcctggggctatggggatgaagggagggagagtaaagtaagaanacacagacaggagctgaccagccacctggtgcctctccaaggtggtgaagaacaacctgaaccccagctgggagccgttccgcctgtccctgcattccctatgcagctgtgatgttcaccgacctctcaagttcctggtgtatgactatgactccagtgggaagcatgacttcatcggcgagttcaccagcactttccaggagatgcaggaagggacggcaaaccctgggcaggaggtgccacaaataccccacccccagaatcccacccagatccctgggagaatcctgagggtgatgctgaagagaccaccataggtgataggaagtggagagggtggaaagcacctgggctcagctgaaggacggaaccatgggggtcttgctctgggaggctctgctggaagggagaaagaggggtcacctgatggacttgtgaccctgagcttgtggggtggggtctagatgcagtgggactgtatcaaccccaagtatcgggacaagaagaagaattacaagagctcagggacggtagtgctggcccagtgcacggtaaatttcacttcctgcttcaagccttgccccagcccctgcccctaccacactctcaggttcaacccttcccttgtttcaaagaccagtttctctgcttctgggaactggaaaccacccccaactgcaacccaaaaaactctggctcccccatgttccccacagaagccctacccaagctccctcctcaaaggaccaccccatcccctcgccttacccctctccctacctccaggtggagaaggtgcacaccttcctggattacatcatgggtggctgccagatcagcttcacggtaaagactcagagggagggcacacaggcaagagggaggggctgagtccatagtgaaaggaaggagcccagaatctccactgccccaacttgggctgctcatgagccttcgcattgtcagcttatgcacccccacatcattatgtggctacctgtagcctccccaccactcatcttagtcctccctacagatcccagctctggcctaggcaatctggtggctctcatggttgcagcatgaccttcttcccacccccacccaggtggccattgacttcactgcctccaatggggacccgaggagcagccagtccctgcactgcctcagtccccgacagcccaaccactacctgcaggccctgcgtgcagtgggaggcatctgccaggactatgacaggtaggagagagtggggcgggagggaacaggcagggaggccttgcccaacggattccacagctttttcttctccccagtgataagcggttcccagcttttggctttggggctcgaatcccccccaacttcgaggtaggctagatgcgagggaaagaaggagatggggggcgtgtcagtcaggcagaaaaggcaggccctcactgctcccgccttgccctcacaggtgtcccatgactttgctatcaactttgacccggaaaatcctgaatgtgaaggtaaaaggggagattttcacctgccccgcctccccgcagacacactccacacaggagcacagactccactccccagggcccagcttcctgtcccttccacccatcccaggcctgtctttatcagagatctcaggggtcatcgcctcctaccgtcgttgcctgccccagatccagctctacggccccaccaatgtggcccccatcatcaaccgtgtggctgagccggcccagcgggagcagagcaccggccaagccacgaagtactcggtgctgctggtgctcactgacggtgtggtgagcgacatggctgagactcgcactgctatcgtgcgtgcctcccgcctgcccatgtccatcatcatcgtaggcgtgggcaatgctgacttctctgacatgcggctgctggatggcgacgacggccccttgcgctgcccccgaggggtgcctgcagcccgagacattgtccagttcgtgcccttccgagacttcaaggatgtgagtcccccgggccccttccggctgaaggactcctcagcttctcatccccccaaatctgaccttcgtcttccaccatttgatgtcctgctaaggacgcgggagcccagctggccaccctgaagccccacttctccctcagatgaccctgcctcccctactcttcctctcacccctaaccacatcactgtccccaccctaggctgccccctctgcactcgccaagtgtgtcctggctgaggtgccacggcaggtggtggagtactacgccagccagggcatcagccctggggctcccaggccctgcacactggctacgactcccagccctagcccgtgactgcctccctccggaccgacactccctcagcctctcagtgagtcctggggcttccaaaggagtggacacagggggtgcaaagtggggcttggtagagcccaactaggctgggtgtagtgtagaagagagtgcttatgactctcccaccccctcccgtgcctgtcctgaccctcgtgactccagtgaccaatgcctccacctcttggaccaggtgtgccccctgggttctggacgtgagtggtgggtcctgctcctatctctccaaaccccatacccttcaatgctgtggcccctcagtgacttccttgggtgatcctgactttctagccattaataaagagaactgctcctagc

SEQ ID NO: 100926 - DNA, 3747 bp, Homo sapiens
tcctgtgtctccttataaaatggtggctagggaactggacatcattctcaaagctatgacgttcagcaaggtatgtgatggcttttaaggagcacgggaagatcacatcctgctgtattccgggttagtttgagccccataaatagcagcagagccggagctggagccggcgccagcggctggagcagcaagggagtcagggccagggccagagagccggagagaggagcccccgaccgagagcccaggtgagcccacccttcctccccagcccagccccagcccagcccagcttggcccagtctccataacaacatctcctggagcccgcagagagatcccagccctgcccaatcccttcaccaccacaagcccctgcctatctcggggacccccaagaactgggagacttgtggctggaaggcagagacccccctcccccagcccagaccctccctcacatatccagaaaggcacacactgtggggaggtagatacccagccagagaaaggtcccacttctgagggaggtacaggaactgtcacaccctcctggaaacggacacacgacatggggggacagacacggagggtggggcactcagacacaccaatgcacactcactcggggaagcatgacatgggatcagacagcctcaccctgagatctgtacagacacagatagatggactgaccggccatgaactctggccggcatacccctgcctgcttcagccgaggcttggtaccactgctgggggaaggtggcatgcgtgcatcccacgggcagcatggagggagccacgactccccaaaaatcctgtcgctaagagacggtgccagtgctgccaagaagtgtgaaaacaggggaggtggggagggatgtgaggcttgtcacagttagagctcctgccaggagcctgaaggagctttcagcagagccctggtcctgcctcccagcccaccaccactccttttccatcagctagccagaaggggaatgggggtagggagtggatagggatagccagcaggggactttccaacctgtctcctgcccactgcagactccacttctgagacccatcctcttcagaactccagaggcctctccaccccctgccccacccccttgccctagtttagctccctcgtgccaagactgagtgcagcgctggcacaacaccagtcgggaaatagcagaaggtgctgaggcggcagaaagtgtagatcaatcgatggcctaggagccaagactgccaggaacatccccaccccaatccttcagccctctccagccccatccacgcatacctaggccagcagcacagggcttctgagcaggagtgggaggctcaggtcctctgccctcccctgctcagaactctggtgaagctgaggaagcaggaggtccgtgaggccccagggtctagggaaggaggttaaggggtggggcccagggaccctagaggatagacccctctgctggcaggtgttccctttccagagtccaggccacctgctctgtccccacagtgacatgtcggaccctgagatgggatgggtgcctgagcccccaaccatgacgctgggggcctctcgggtggagctgcgggtgtcctgccatggcctcctggaccgggacacactcaccaaaccccacccctgcgtgctgctcaagctctactctgatgagcagtgggtggaggtagagcgcacagaggtgcttcgctcctgttccagccctgtcttctcccgggtgctggcccttgagtatttttttgaggagaagcagcccctgcagttccacgtgttcgatgccgaggacggagccaccagcccccgaaatgataccttcctcggctctacggagtgcaccttgggccagattgtgtcacaaaccaaggtcactaagccattattgctgaagaatgggaagactgcgggcaagtccaccatcacgatcgtggccgaggaggtatcaggcacaaacgactatgtgcaactcaccttcagagcctacaagctggacaacaaggatctgttcagcaagtctgaccctttcatggaaatctataagaccaacgaggaccaaagtgatcagctggtctggagaactgaggtggtgaagaacaacctgaaccccagctgggagccgttccgcctgtccctgcattccctatgcagctgtgatgttcaccgacctctcaagttcctggtgtatgactatgactccagtgggaagcatgacttcatcggcgagttcaccagcactttccaggagatgcaggaagggacggcaaaccctgggcaggagatgcagtgggactgtatcaaccccaagtatcgggacaagaagaagaattacaagagctcagggacggtagtgctggcccagtgcacggtggagaaggtgcacaccttcctggattacatcatgggtggctgccagatcagcttcacggtaaagactcagagggagggcacacaggcaagagggaggggctgagtccatagtgaaaggaaggagcccagaatctccactgccccaacttgggctgctcatgagccttcgcattgtcagcttatgcacccccacatcattatgtggctacctgtagcctccccaccactcatcttagtcctccctacagatcccagctctggcctaggcaatctggtggctctcatggttgcagcatgaccttcttcccacccccacccaggtggccattgacttcactgcctccaatggggacccgaggagcagccagtccctgcactgcctcagtccccgacagcccaaccactacctgcaggccctgcgtgcagtgggaggcatctgccaggactatgacagtgataagcggttcccagcttttggctttggggctcgaatcccccccaacttcgaggtgtcccatgactttgctatcaactttgacccggaaaatcctgaatgtgaagagatctcaggggtcatcgcctcctaccgtcgttgcctgccccagatccagctctacggccccaccaatgtggcccccatcatcaaccgtgtggctgagccggcccagcgggagcagagcaccggccaagccacgaagtactcggtgctgctggtgctcactgacggtgtggtgagcgacatggctgagactcgcactgctatcgtgcgtgcctcccgcctgcccatgtccatcatcatcgtaggcgtgggcaatgctgacttctctgacatgcggctgctggatggcgacgacggccccttgcgctgcccccgaggggtgcctgcagcccgagacattgtccagttcgtgcccttccgagacttcaaggatgctgccccctctgcactcgccaagtgtgtcctggctgaggtgccacggcaggtggtggagtactacgccagccagggcatcagccctggggctcccaggccctgcacactggctacgactcccagccctagcccgtgactgcctccctccggaccgacactccctcagcctctcagtgcctgtcctgaccctcgtgactccagtgaccaatgcctccacctcttggaccaggtgtgccccctgggttctggacgtgagtggtgggtcctgctcctatctctccaaaccccatacccttcaatgctgtggcccctcagtgacttccttgggtgatcctgactttctagccattaataaagagaactgctcctagcacctcagcctctaaaaaaaaaaactcagatgccc

SEQ ID NO: 100927 - DNA, 3713 bp, Homo sapiens
tcctgtgtctccttataaaatggtggctagggaactggacatcattctcaaagctatgacgttcagcaaggtatgtgatggcttttaaggagcacgggaagatcacatcctgctgtattccgggttagtttgagccccataaatagcagcagagccggagctggagccggcgccagcggctggagcagcaagggagtcagggccagggccagagagccggagagaggagcccccgaccgagagcccaggtgagcccacccttcctccccagcccagccccagcccagcccagcttggcccagtctccataacaacatctcctggagcccgcagagagatcccagccctgcccaatcccttcaccaccacaagcccctgcctatctcggggacccccaagaactgggagacttgtggctggaaggcagagacccccctcccccagcccagaccctccctcacatatccagaaaggcacacactgtggggaggtagatacccagccagagaaaggtcccacttctgagggaggtacaggaactgtcacaccctcctggaaacggacacacgacatggggggacagacacggagggtggggcactcagacacaccaatgcacactcactcggggaagcatgacatgggatcagacagcctcaccctgagatctgtacagacacagatagatggactgaccggccatgaactctggccggcatacccctgcctgcttcagccgaggcttggtaccactgctgggggaaggtggcatgcgtgcatcccacgggcagcatggagggagccacgactccccaaaaatcctgtcgctaagagacggtgccagtgctgccaagaagtgtgaaaacaggggaggtggggagggatgtgaggcttgtcacagttagagctcctgccaggagcctgaaggagctttcagcagagccctggtcctgcctcccagcccaccaccactccttttccatcagctagccagaaggggaatgggggtagggagtggatagggatagccagcaggggactttccaacctgtctcctgcccactgcagactccacttctgagacccatcctcttcagaactccagaggcctctccaccccctgccccacccccttgccctagtttagctccctcgtgccaagactgagtgcagcgctggcacaacaccagtcgggaaatagcagaaggtgctgaggcggcagaaagtgtagatcaatcgatggcctaggagccaagactgccaggaacatccccaccccaatccttcagccctctccagccccatccacgcatacctaggccagcagcacagggcttctgagcaggagtgggaggctcaggtcctctgccctcccctgctcagaactctggtgaagctgaggaagcaggaggtccgtgaggccccagggtctagggaaggaggttaaggggtggggcccagggaccctagaggatagacccctctgctggcaggtgttccctttccagagtccaggccacctgctctgtccccacagtgacatgtcggaccctgagatgggatgggtgcctgagcccccaaccatgacgctgggggcctctcgggtggagctgcgggtgtcctgccatggcctcctggaccgggacacactcaccaaaccccacccctgcgtgctgctcaagctctactctgatgagcagtgggtggaggtagagcgcacagaggtgcttcgctcctgttccagccctgtcttctcccgggtgctggcccttgagtatttttttgaggagaagcagcccctgcagttccacgtgttcgatgccgaggacggagccaccagcccccgaaatgataccttcctcggctctacggagtgcaccttgggccagattgtgtcacaaaccaaggtcactaagccattattgctgaagaatgggaagactgcgggcaagtccaccatcacgatcgtggccgaggaggtatcaggcacaaacgactatgtgcaactcaccttcagagcctacaagctggacaacaaggatctgttcagcaagtctgaccctttcatggaaatctataagaccaacgaggaccaaagtgatcagctggtctggagaactgaggtggtgaagaacaacctgaaccccagctgggagccgttccgcctgtccctgcattccctatgcagctgtgatgttcaccgacctctcaagttcctggtgtatgactatgactccagtgggaagcatgacttcatcggcgagttcaccagcactttccaggagatgcaggaagggacggcaaaccctgggcaggagatgcagtgggactgtatcaaccccaagtatcgggacaagaagaagaattacaagagctcagggacggtagtgctggcccagtgcacggtggagaaggtgcacaccttcctggattacatcatgggtggctgccagatcagcttcacggtaaagactcagagggagggcacacaggcaagagggaggggctgagtccatagtgaaaggaaggagcccagaatctccactgccccaacttgggctgctcatgagccttcgcattgtcagcttatgcacccccacatcattatgtggctacctgtagcctccccaccactcatcttagtcctccctacagatcccagctctggcctaggcaatctggtggctctcatggttgcagcatgaccttcttcccacccccacccaggtggccattgacttcactgcctccaatggggacccgaggagcagccagtccctgcactgcctcagtccccgacagcccaaccactacctgcaggccctgcgtgcagtgggaggcatctgccaggactatgacagtgataagcggttcccagcttttggctttggggctcgaatcccccccaacttcgaggtgtcccatgactttgctatcaactttgacccggaaaatcctgaatgtgaagagatctcaggggtcatcgcctcctaccgtcgttgcctgccccagatccagctctacggccccaccaatgtggcccccatcatcaaccgtgtggctgagccggcccagcgggagcagagcaccggccaagccacgaagtactcggtgctgctggtgctcactgacggtgtggtgagcgacatggctgagactcgcactgctatcgtgcgtgcctcccgcctgcccatgtccatcatcatcgtaggcgtgggcaatgctgacttctctgacatgcggctgctggatggcgacgacggccccttgcgctgcccccgaggggtgcctgcagcccgagacattgtccagttcgtgcccttccgagacttcaaggatgctgccccctctgcactcgccaagtgtgtcctggctgaggtgccacggcaggtggtggagtactacgccagccagggcatcagccctggggctcccaggccctgcacactggctacgactcccagccctagcccgtgactgcctccctccggaccgacactccctcagcctctcagtgcctgtcctgaccctcgtgactccagtgaccaatgcctccacctcttggaccaggtgtgccccctgggttctggacgtgagtggtgggtcctgctcctatctctccaaaccccatacccttcaatgctgtggcccctcagtgacttccttgggtgatcctgactttctagccattaataaagagaactgctcctagc

SEQ ID NO: 100928 - DNA, 4766 bp, Homo sapiens
  misc_feature (2502)..(2502): n is a, c, g, or t
tcctgtgtctccttataaaatggtggctagggaactggacatcattctcaaagctatgacgttcagcaaggtatgtgatggcttttaaggagcacgggaagatcacatcctgctgtattccgggttagtttgagccccataaatagcagcagagccggagctggagccggcgccagcggctggagcagcaagggagtcagggccagggccagagagccggagagaggagcccccgaccgagagcccaggtgagcccacccttcctccccagcccagccccagcccagcccagcttggcccagtctccataacaacatctcctggagcccgcagagagatcccagccctgcccaatcccttcaccaccacaagcccctgcctatctcggggacccccaagaactgggagacttgtggctggaaggcagagacccccctcccccagcccagaccctccctcacatatccagaaaggcacacactgtggggaggtagatacccagccagagaaaggtcccacttctgagggaggtacaggaactgtcacaccctcctggaaacggacacacgacatggggggacagacacggagggtggggcactcagacacaccaatgcacactcactcggggaagcatgacatgggatcagacagcctcaccctgagatctgtacagacacagatagatggactgaccggccatgaactctggccggcatacccctgcctgcttcagccgaggcttggtaccactgctgggggaaggtggcatgcgtgcatcccacgggcagcatggagggagccacgactccccaaaaatcctgtcgctaagagacggtgccagtgctgccaagaagtgtgaaaacaggggaggtggggagggatgtgaggcttgtcacagttagagctcctgccaggagcctgaaggagctttcagcagagccctggtcctgcctcccagcccaccaccactccttttccatcagctagccagaaggggaatgggggtagggagtggatagggatagccagcaggggactttccaacctgtctcctgcccactgcagactccacttctgagacccatcctcttcagaactccagaggcctctccaccccctgccccacccccttgccctagtttagctccctcgtgccaagactgagtgcagcgctggcacaacaccagtcgggaaatagcagaaggtgctgaggcggcagaaagtgtagatcaatcgatggcctaggagccaagactgccaggaacatccccaccccaatccttcagccctctccagccccatccacgcatacctaggccagcagcacagggcttctgagcaggagtgggaggctcaggtcctctgccctcccctgctcagaactctggtgaagctgaggaagcaggaggtccgtgaggccccagggtctagggaaggaggttaaggggtggggcccagggaccctagaggatagacccctctgctggcaggtgttccctttccagagtccaggccacctgctctgtccccacagtgacatgtcggaccctgagatgggatgggtgcctgagcccccaaccatgacgctgggggcctctcgggtggagctgcgggtgtcctgccatggcctcctggaccgggacacactcaccaaaccccacccctgcgtgctgctcaagctctactctgatgagcagtgggtggaggtagagcgcacagaggtgcttcgctcctgttccagccctgtcttctcccgggtgctggcccttgagtatttttttgaggagaagcagcccctgcagttccacgtgttcgatgccgaggacggagccaccagcccccgaaatgataccttcctcggctctacggagtgcaccttgggccagattgtgtcacaaaccaaggtcactaagccattattgctgaagaatgggaagactgcgggcaagtccaccatcacggtaggcaagatcacctgtactcacccttggtccaggtattcaatgcccctgcatggacacctatggtgacatcatgcccaggaccacccccacctaagggaaaggggatggggtggcccttgtggtaaggttaggggagtcctgccacttgtatcccccttgcagatcgtggccgaggaggtatcaggcacaaacgactatgtgcaactcaccttcagagcctacaagctggacaacaaggttggaaccccagagtccaggcccccaactcccctgtcactcctaggcctcccactcaagacagatcccaggagcccaggcctgctctcttcccagtggagcccatcccccaccctccttgcagctctcaccaacctcaagggccctttctcctgtatcttcaggatctgttcagcaagtctgaccctttcatggaaatctataagaccaacgaggaccaaagtgatcagctggtctggagaactgaggttggtgcctggggctatggggatgaagggagggagagtaaagtaagaanacacagacaggagctgaccagccacctggtgcctctccaaggtggtgaagaacaacctgaaccccagctgggagccgttccgcctgtccctgcattccctatgcagctgtgatgttcaccgacctctcaagttcctggtgtatgactatgactccagtgggaagcatgacttcatcggcgagttcaccagcactttccaggagatgcaggaagggacggcaaaccctgggcaggaggtgccacaaataccccacccccagaatcccacccagatccctgggagaatcctgagggtgatgctgaagagaccaccataggtgataggaagtggagagggtggaaagcacctgggctcagctgaaggacggaaccatgggggtcttgctctgggaggctctgctggaagggagaaagaggggtcacctgatggacttgtgaccctgagcttgtggggtggggtctagatgcagtgggactgtatcaaccccaagtatcgggacaagaagaagaattacaagagctcagggacggtagtgctggcccagtgcacggtaaatttcacttcctgcttcaagccttgccccagcccctgcccctaccacactctcaggttcaacccttcccttgtttcaaagaccagtttctctgcttctgggaactggaaaccacccccaactgcaacccaaaaaactctggctcccccatgttccccacagaagccctacccaagctccctcctcaaaggaccaccccatcccctcgccttacccctctccctacctccaggtggagaaggtgcacaccttcctggattacatcatgggtggctgccagatcagcttcacggtggccattgacttcactgcctccaatggggacccgaggagcagccagtccctgcactgcctcagtccccgacagcccaaccactacctgcaggccctgcgtgcagtgggaggcatctgccaggactatgacaggtaggagagagtggggcgggagggaacaggcagggaggccttgcccaacggattccacagctttttcttctccccagtgataagcggttcccagcttttggctttggggctcgaatcccccccaacttcgaggtgtcccatgactttgctatcaactttgacccggaaaatcctgaatgtgaaggtaaaaggggagattttcacctgccccgcctccccgcagacacactccacacaggagcacagactccactccccagggcccagcttcctgtcccttccacccatcccaggcctgtctttatcaggtgaggcttccagggccgaggcccagcatctgcacccaactctccctgccaagggaccatccaactctcccactgcttaatgaaggaactcgaggggagggcagtcctcagacctggaagcatttccttgctttaaggagtgtcaggagggggccctgctcatttctgccagcttcacaacttctcttcactcacagagatctcaggggtcatcgcctcctaccgtcgttgcctgccccagatccagctctacggccccaccaatgtggcccccatcatcaaccgtgtggctgagccggcccagcgggagcagagcaccggccaagccacgaagtactcggtgctgctggtgctcactgacggtgtggtgagcgacatggctgagactcgcactgctatcgtgcgtgcctcccgcctgcccatgtccatcatcatcgtaggcgtgggcaatgctgacttctctgacatgcggctgctggatggcgacgacggccccttgcgctgcccccgaggggtgcctgcagcccgagacattgtccagttcgtgcccttccgagacttcaaggatgctgccccctctgcactcgccaagtgtgtcctggctgaggtgccacggcaggtggtggagtactacgccagccagggcatcagccctggggctcccaggccctgcacactggctacgactcccagccctagcccgtgactgcctccctccggaccgacactccctcagcctctcagtgcctgtcctgaccctcgtgactccagtgaccaatgcctccacctcttggaccaggtgtgccccctgggttctggacgtgagtggtgggtcctgctcctatctctccaaaccccatacccttcaatgctgtggcccctcagtgacttccttgggtgatcctgactttctagccattaataaagagaactgctcctagcacctcagcctctaaaaaaaaaaactcagatgccc

SEQ ID NO: 100929 - DNA, 3754 bp, Homo sapiens
  misc_feature (1048)..(1048): n is a, c, g, or t
tcctgtgtctccttataaaatggtggctagggaactggacatcattctcaaagctatgacgttcagcaaggtatgtgatggcttttaaggagcacgggaagatcacatcctgctgtattccgggttagtttgagccccataaatagcagcagagccggagctggagccggcgccagcggctggagcagcaagggagtcagggccagggccagagagccggagagaggagcccccgaccgagagcccagtgacatgtcggaccctgagatgggatgggtgcctgagcccccaaccatgacgctgggggcctctcgggtggagctgcgggtgtcctgccatggcctcctggaccgggacacactcaccaaaccccacccctgcgtgctgctcaagctctactctgatgagcagtgggtggaggtagagcgcacagaggtgcttcgctcctgttccagccctgtcttctcccgggtgctggcccttgagtatttttttgaggagaagcagcccctgcagttccacgtgttcgatgccgaggacggagccaccagcccccgaaatgataccttcctcggctctacggagtgcaccttgggccagattgtgtcacaaaccaaggtcactaagccattattgctgaagaatgggaagactgcgggcaagtccaccatcacgatcgtggccgaggaggtatcaggcacaaacgactatgtgcaactcaccttcagagcctacaagctggacaacaaggttggaaccccagagtccaggcccccaactcccctgtcactcctaggcctcccactcaagacagatcccaggagcccaggcctgctctcttcccagtggagcccatcccccaccctccttgcagctctcaccaacctcaagggccctttctcctgtatcttcaggatctgttcagcaagtctgaccctttcatggaaatctataagaccaacgaggaccaaagtgatcagctggtctggagaactgaggttggtgcctggggctatggggatgaagggagggagagtaaagtaagaanacacagacaggagctgaccagccacctggtgcctctccaaggtggtgaagaacaacctgaaccccagctgggagccgttccgcctgtccctgcattccctatgcagctgtgatgttcaccgacctctcaagttcctggtgtatgactatgactccagtgggaagcatgacttcatcggcgagttcaccagcactttccaggagatgcaggaagggacggcaaaccctgggcaggaggtgccacaaataccccacccccagaatcccacccagatccctgggagaatcctgagggtgatgctgaagagaccaccataggtgataggaagtggagagggtggaaagcacctgggctcagctgaaggacggaaccatgggggtcttgctctgggaggctctgctggaagggagaaagaggggtcacctgatggacttgtgaccctgagcttgtggggtggggtctagatgcagtgggactgtatcaaccccaagtatcgggacaagaagaagaattacaagagctcagggacggtagtgctggcccagtgcacggtaaatttcacttcctgcttcaagccttgccccagcccctgcccctaccacactctcaggttcaacccttcccttgtttcaaagaccagtttctctgcttctgggaactggaaaccacccccaactgcaacccaaaaaactctggctcccccatgttccccacagaagccctacccaagctccctcctcaaaggaccaccccatcccctcgccttacccctctccctacctccaggtggagaaggtgcacaccttcctggattacatcatgggtggctgccagatcagcttcacggtaaagactcagagggagggcacacaggcaagagggaggggctgagtccatagtgaaaggaaggagcccagaatctccactgccccaacttgggctgctcatgagccttcgcattgtcagcttatgcacccccacatcattatgtggctacctgtagcctccccaccactcatcttagtcctccctacagatcccagctctggcctaggcaatctggtggctctcatggttgcagcatgaccttcttcccacccccacccaggtggccattgacttcactgcctccaatggggacccgaggagcagccagtccctgcactgcctcagtccccgacagcccaaccactacctgcaggccctgcgtgcagtgggaggcatctgccaggactatgacaggtaggagagagtggggcgggagggaacaggcagggaggccttgcccaacggattccacagctttttcttctccccagtgataagcggttcccagcttttggctttggggctcgaatcccccccaacttcgaggtaggctagatgcgagggaaagaaggagatggggggcgtgtcagtcaggcagaaaaggcaggccctcactgctcccgccttgccctcacaggtgtcccatgactttgctatcaactttgacccggaaaatcctgaatgtgaaggtaaaaggggagattttcacctgccccgcctccccgcagacacactccacacaggagcacagactccactccccagggcccagcttcctgtcccttccacccatcccaggcctgtctttatcagagatctcaggggtcatcgcctcctaccgtcgttgcctgccccagatccagctctacggccccaccaatgtggcccccatcatcaaccgtgtggctgagccggcccagcgggagcagagcaccggccaagccacgaagtactcggtgctgctggtgctcactgacggtgtggtgagcgacatggctgagactcgcactgctatcgtgcgtgcctcccgcctgcccatgtccatcatcatcgtaggcgtgggcaatgctgacttctctgacatgcggctgctggatggcgacgacggccccttgcgctgcccccgaggggtgcctgcagcccgagacattgtccagttcgtgcccttccgagacttcaaggatgtgagtcccccgggccccttccggctgaaggactcctcagcttctcatccccccaaatctgaccttcgtcttccaccatttgatgtcctgctaaggacgcgggagcccagctggccaccctgaagccccacttctccctcagatgaccctgcctcccctactcttcctctcacccctaaccacatcactgtccccaccctaggctgccccctctgcactcgccaagtgtgtcctggctgaggtgccacggcaggtggtggagtactacgccagccagggcatcagccctggggctcccaggccctgcacactggctacgactcccagccctagcccgtgactgcctccctccggaccgacactccctcagcctctcagtgagtcctggggcttccaaaggagtggacacagggggtgcaaagtggggcttggtagagcccaactaggctgggtgtagtgtagaagagagtgcttatgactctcccaccccctcccgtgcctgtcctgaccctcgtgactccagtgaccaatgcctccacctcttggaccaggtgtgccccctgggttctggacgtgagtggtgggtcctgctcctatctctccaaaccccatacccttcaatgctgtggcccctcagtgacttccttgggtgatcctgactttctagccattaataaagagaactgctcctagc

SEQ ID NO: 100930 - DNA, 4068 bp, Homo sapiens
tcctgtgtctccttataaaatggtggctagggaactggacatcattctcaaagctatgacgttcagcaaggtatgtgatggcttttaaggagcacgggaagatcacatcctgctgtattccgggttagtttgagccccataaatagcagcagagccggagctggagccggcgccagcggctggagcagcaagggagtcagggccagggccagagagccggagagaggagcccccgaccgagagcccaggtgagcccacccttcctccccagcccagccccagcccagcccagcttggcccagtctccataacaacatctcctggagcccgcagagagatcccagccctgcccaatcccttcaccaccacaagcccctgcctatctcggggacccccaagaactgggagacttgtggctggaaggcagagacccccctcccccagcccagaccctccctcacatatccagaaaggcacacactgtggggaggtagatacccagccagagaaaggtcccacttctgagggaggtacaggaactgtcacaccctcctggaaacggacacacgacatggggggacagacacggagggtggggcactcagacacaccaatgcacactcactcggggaagcatgacatgggatcagacagcctcaccctgagatctgtacagacacagatagatggactgaccggccatgaactctggccggcatacccctgcctgcttcagccgaggcttggtaccactgctgggggaaggtggcatgcgtgcatcccacgggcagcatggagggagccacgactccccaaaaatcctgtcgctaagagacggtgccagtgctgccaagaagtgtgaaaacaggggaggtggggagggatgtgaggcttgtcacagttagagctcctgccaggagcctgaaggagctttcagcagagccctggtcctgcctcccagcccaccaccactccttttccatcagctagccagaaggggaatgggggtagggagtggatagggatagccagcaggggactttccaacctgtctcctgcccactgcagactccacttctgagacccatcctcttcagaactccagaggcctctccaccccctgccccacccccttgccctagtttagctccctcgtgccaagactgagtgcagcgctggcacaacaccagtcgggaaatagcagaaggtgctgaggcggcagaaagtgtagatcaatcgatggcctaggagccaagactgccaggaacatccccaccccaatccttcagccctctccagccccatccacgcatacctaggccagcagcacagggcttctgagcaggagtgggaggctcaggtcctctgccctcccctgctcagaactctggtgaagctgaggaagcaggaggtccgtgaggccccagggtctagggaaggaggttaaggggtggggcccagggaccctagaggatagacccctctgctggcaggtgttccctttccagagtccaggccacctgctctgtccccacagtgacatgtcggaccctgagatgggatgggtgcctgagcccccaaccatgacgctgggggcctctcgggtggagctgcgggtgtcctgccatggcctcctggaccgggacacactcaccaaaccccacccctgcgtgctgctcaagctctactctgatgagcagtgggtggaggtagagcgcacagaggtgcttcgctcctgttccagccctgtcttctcccgggtgctggcccttgagtatttttttgaggagaagcagcccctgcagttccacgtgttcgatgccgaggacggagccaccagcccccgaaatgataccttcctcggctctacggagtgcaccttgggccagattgtgtcacaaaccaaggtcactaagccattattgctgaagaatgggaagactgcgggcaagtccaccatcacgatcgtggccgaggaggtatcaggcacaaacgactatgtgcaactcaccttcagagcctacaagctggacaacaaggatctgttcagcaagtctgaccctttcatggaaatctataagaccaacgaggaccaaagtgatcagctggtctggagaactgaggtggtgaagaacaacctgaaccccagctgggagccgttccgcctgtccctgcattccctatgcagctgtgatgttcaccgacctctcaagttcctggtgtatgactatgactccagtgggaagcatgacttcatcggcgagttcaccagcactttccaggagatgcaggaagggacggcaaaccctgggcaggagatgcagtgggactgtatcaaccccaagtatcgggacaagaagaagaattacaagagctcagggacggtagtgctggcccagtgcacggtggagaaggtgcacaccttcctggattacatcatgggtggctgccagatcagcttcacggtaaagactcagagggagggcacacaggcaagagggaggggctgagtccatagtgaaaggaaggagcccagaatctccactgccccaacttgggctgctcatgagccttcgcattgtcagcttatgcacccccacatcattatgtggctacctgtagcctccccaccactcatcttagtcctccctacagatcccagctctggcctaggcaatctggtggctctcatggttgcagcatgaccttcttcccacccccacccaggtggccattgacttcactgcctccaatggggacccgaggagcagccagtccctgcactgcctcagtccccgacagcccaaccactacctgcaggccctgcgtgcagtgggaggcatctgccaggactatgacagtgataagcggttcccagcttttggctttggggctcgaatcccccccaacttcgaggtgtcccatgactttgctatcaactttgacccggaaaatcctgaatgtgaaggtaaaaggggagattttcacctgccccgcctccccgcagacacactccacacaggagcacagactccactccccagggcccagcttcctgtcccttccacccatcccaggcctgtctttatcaggtgaggcttccagggccgaggcccagcatctgcacccaactctccctgccaagggaccatccaactctcccactgcttaatgaaggaactcgaggggagggcagtcctcagacctggaagcatttccttgctttaaggagtgtcaggagggggccctgctcatttctgccagcttcacaacttctcttcactcacagagatctcaggggtcatcgcctcctaccgtcgttgcctgccccagatccagctctacggccccaccaatgtggcccccatcatcaaccgtgtggctgagccggcccagcgggagcagagcaccggccaagccacgaagtactcggtgctgctggtgctcactgacggtgtggtgagcgacatggctgagactcgcactgctatcgtgcgtgcctcccgcctgcccatgtccatcatcatcgtaggcgtgggcaatgctgacttctctgacatgcggctgctggatggcgacgacggccccttgcgctgcccccgaggggtgcctgcagcccgagacattgtccagttcgtgcccttccgagacttcaaggatgctgccccctctgcactcgccaagtgtgtcctggctgaggtgccacggcaggtggtggagtactacgccagccagggcatcagccctggggctcccaggccctgcacactggctacgactcccagccctagcccgtgactgcctccctccggaccgacactccctcagcctctcagtgcctgtcctgaccctcgtgactccagtgaccaatgcctccacctcttggaccaggtgtgccccctgggttctggacgtgagtggtgggtcctgctcctatctctccaaaccccatacccttcaatgctgtggcccctcagtgacttccttgggtgatcctgactttctagccattaataaagagaactgctcctagcacctcagcctctaaaaaaaaaaactcagatgccc

SEQ ID NO: 100931 - DNA, 290 bp, Homo sapiens
aataaaaaggcattttcatagtacattctctcaaaaagttggtttttcactatctacaatggactggcttccagcaaaaatctctgtgctttgatctaatggtttgctttttagaataggtgaaacctaaactacttaatttccttcgataaacacaaaacctaccatttgtttagccagcaccttcccctgcccccagtaagtaagtaaaaatgcataaattgccctttctggtgagactattggaatttttttatgctaaggtccttacaatctctgaatttgtaagc

SEQ ID NO: 100932 - DNA, 369 bp, Homo sapiens
agcctctcctccttatgagctatgtgatgctgggcagttcacttggtaggcctcagtttcctcatctgtgaagtgggcatcgtatcagggcctcccccacagcaaggccgtgcatgtcacatgctgagctcagagtctagtccaggtgaacagtcgtttgagtgtttgtgagggaacaagtgagagacccagagaccaggacacagagagaaatacagggagatcgggctaggtgcggtggctcacgcctgtaatcccagcactctgggaggccgaggcgggtggatcacctgaggttagtagttcgagaccagcctcgccgatatggtgaaacccccatctctactaaaaatacaaaaattagctggg

SEQ ID NO: 100933 - DNA, 694 bp, Homo sapiens
ggggaggaagatctgagaggcagaatccacaccacttaggaaccaactgggtaggatgtagcaggagagtgggaggaaagaggctgggatggcttccaggacccagggagggaacacaaaaggggaagcagcagggagtgagcaggagaggaacatcccgaccctgtgaactgccaaatgctgtgtcacattctggtccgcaggtgtccatggccagtgtggcgtttagcaaaacatctgagtgggagacgtagattttcccgcatcaggtgtgagtgttgcgggacgctatggctttgaaggtgatagcctcgggggagcaagtgtgagaagagcagaggctgcacgtggagacccagggaatgcgaaagtctaggggaagtggacaggaggagagcagagcagcaggaaacaggcaggaggggggtcacagaagccaagtcagcgtgggtttccaggggaaagtggtctgcagtgtggaaggccatagagaagtgaggtacagactgaaaaggtgaccagacttggcaactagggggtgattggcaacttctacacaaatcgttctcatgaagtgctgcagatgagtttgaggcgtgtcattacccacgccctcagcagccaaacgaaaatagcctgggtggctcccagcatgggtgcccatgcatgctgctttgccttggtggaagaccaa

SEQ ID NO: 100934 - DNA, 211 bp, Homo sapiens
tcttatgtgcattaagttgtaaggattaaaggctttgccaaatttttcccatttgtagggttgctttcaagtataaattttcttatgtttagttagggctgaggaccaggaaaaggcattggcacattcttcccatttgtagggttttaaaccagtaagaattaccttatgtttagtaaagcttgaagacaggttaaaagatttgccacat

SEQ ID NO: 100935 - DNA, 677 bp, Homo sapiens
ggtgtcgtggctggcacctgtgttccaacaacttgagagactgaggtggcaggaggattgcttgagcctaggagttaggggctgcagtgagctgtgatcgtgacaccgcactccagtctgggcaacacagcaagaccttgtgtcaaaaaaatttttttaattaaatataaaagagtttcatgacattcagagaccatccaaagaacctgtgggttccggccaggcacagtggctcacgcctgtaatcccagcgctttgggaggccatagcaggtggatcgcttgaggtcaggagtttaagagcagcctggccaacatggtgaaaccgcatctctactaaaaatacaaaaaattagacggggccaggtgccatggctcatgcctgtaatcccagcactttgggaggccaaggagggtggatcacgagatcaggagatcgagaccatcctggctaacaccccatctctgctaaaaatacaaaaagtagccaggcatggttgcgggcacctgtattcccagctactcaggaggctgaggcaggagaatggcgtgaacccaggaggcggcacttgcagtgagccaagatcataccatttgcactgtagcctgggctacaagagtgagactccgtctcaaaaaaaaaaaaaaatagctgggtgtggtggcacgcacctgtag

SEQ ID NO: 100936 - DNA, 720 bp, Homo sapiens
gataaatctcagttggtcatagtgtaaaattcttttaagggctgctgaatttaatttcctagtattttgttggggatttttgtatctataatgcattcataggggacatttggctatagttttcttgtattgtctgtctagctttggtatcagggtaatgttggcttcatagaatgactcagaaagggttctgtttctcaactttttggaggagttcgagaaggattagtgttaattcatttctaaacgtttggtagaattcaccagcgaagtcatcagttcctgggcttttctttgttaggagagttttggttgctgattcaatcagaattgaatatcattactttttatagatctattcagatttattctttgttcttgagtcaactttgttggtttgtatgtttctaggaatttgtctgtttcatctaggttatccaattttttgacatatagctcttatacgaattctcttacaatcctttttattcctataaatcagtagtagtgtttttcatttctgattttagtagttgagtattctttttccttaatctagttaaagctttgtcaactttgttgatctcttcaaagaactaattttttgtttcattgattctattgtttttctattctctatttcatttatttttgctctaatccttattatttccttcctctttatggcttcaaactcaattgaacataaagtattaagaa

SEQ ID NO: 100937 - DNA, 182 bp, Homo sapiens
tcccagcacttcccagctgtgtgacgtgggctggacgatacttaccctggcggccttcagcttcctcatctacatatgtttatagggttagtgatgacgaagtaagataataagataacagagagagagctctttggtaataggcatatgaaaaatgcaatcatgtttatattctaagcccc

SEQ ID NO: 100938 - DNA, 138 bp, Homo sapiens
ccacatgctgggtgcagaggatgcagaaggggatgaacctggcttccttccctgaagactctccccagctgaggatggaagctctcagggtttgttggatgggaaggagcaaatccctctcgagcccgtttaaataag

SEQ ID NO: 100939 - DNA, 839 bp, Homo sapiens
  misc_feature (610)..(610): n is a, c, g, or t
  misc_feature (619)..(619): n is a, c, g, or t
  misc_feature (624)..(624): n is a, c, g, or t
  misc_feature (640)..(640): n is a, c, g, or t
  misc_feature (644)..(645): n is a, c, g, or t
  misc_feature (648)..(648): n is a, c, g, or t
  misc_feature (651)..(651): n is a, c, g, or t
  misc_feature (654)..(654): n is a, c, g, or t
  misc_feature (658)..(658): n is a, c, g, or t
  misc_feature (669)..(669): n is a, c, g, or t
  misc_feature (671)..(671): n is a, c, g, or t
  misc_feature (675)..(676): n is a, c, g, or t
  misc_feature (683)..(683): n is a, c, g, or t
  misc_feature (691)..(691): n is a, c, g, or t
  misc_feature (696)..(697): n is a, c, g, or t
  misc_feature (700)..(700): n is a, c, g, or t
  misc_feature (707)..(708): n is a, c, g, or t
  misc_feature (717)..(717): n is a, c, g, or t
  misc_feature (724)..(725): n is a, c, g, or t
gaaaaatacagatctcaacctctaacccacaaaagaaagagagagctttaactgaactgactctcttattgaaccaccgctaccagggggagacatgacaagctttacgtgttgaaaatacaaagagcctgaccctacaggaatctttctttctggcctttttcatcttttagggtacatgtgcacaacgtgcaggtcatcattctcagcaaactatcacaaggacaaaaaaccaaacaccgcgtgttctcactcataggtggaaattgaacaatgagaacacatggtcacaggaaggtgagctggttttaaagaaatggagcctgcaggtaagggtgaagctaaagaaggctcaggaacaaagtaaatgtctgcagaagtttctctagctgtagaaccaagctcacataattccagtaatgagaagatccagaagcatttgaaagtattcatgtcaatgaacagccaaagtagagaaaagatgtatacagccaacatcttcatgccccaggagcccaagtttggagatctttgtttcattctcaaaggacagctttacttatccttccaatgatcactgccaagttctctttagccatgcaaatggttnctcttgacnattgnccctgaacacttgaanggannggnttnctncccnttaaaatgaangncctnntaaacancaaaagcncaagnnagntaaaacnngatacaggngcaaatnnattataagatctactaccgcttgcgcaaagcccagcttttaaagactagacgggaagggtggtattgtccctaagaaacaaacacgggcaaacgaacttgcccaaccatctgaa

SEQ ID NO: 100940 - DNA, 764 bp, Homo sapiens
tggggtttcaccatgttggccaggatgagcattgatctcttgacctcgtgatccccctgcctcgacctcccaaagtgttgggattacaggcgtgagccgctgtgggctgtgtggggggaaccggctaggtcctcaaagtatggtttctactggatgcatatcagttttgcaccatcagaaagtcaaaaagtcattaagttgagccatcatacgttggggactctctgtggtataaggtaatggtccagcctcattcttttgcatgtgaatatccagtttctccagcaccatttgttgaaccctcacatttttctagtgctcttctgttgaaatggtgctctgcaaacagtccctccacccatctcagctgcccaaacgaaaagcttaccaagggtcatccttggttcctgtccttccctcgtagtcttgcatcctgtcagtcgtccgtcagcaaattctgttgatttggcctcctagataaagtgtaatcccctttccactgccagcaccctgatcgaacaaccattgcttttacctggactgtgtcacagcctcctaacgggtcttcctgcttccacccttttcccctctctgatctgttttccacattgtagccagaatagttaaaatagaaatcaaaatagaactaaactcctcccatggcctacaaagcctgtgtgatccggcccctccacggctgagtcgtctcagtgtgctttagtcacgaggatcttgctggtttcactgagcactaagctcatcct

SEQ ID NO: 100941 - DNA, 412 bp, Homo sapiens
cacatttcacaagactaacatatctaaagtacaaatctgtttatacctcctctactcaaaatcttttaacagctctgttaactatcaaaaaagcctcagaacctggactgcaggcatttagggtaaagataaataagatgctaatttatataaaaaggaggtgaggtaaaggtatgctacagtgtcactggtaaaatataaagcgaaaactatctagaagattgcttctacttgaggaactttggacttggagttaattggtagctaggttttcaatttggctgttcctctgccttgtgtgtgattctatatgtgctatgacctccctgggctttagtgtcttactgtgtgatacgaagatggtagtgcctgttgtgtatatggtgatgtgtcagacttggcttctggtctc

SEQ ID NO: 100942 - DNA, 441 bp, Homo sapiens
ctgttgggagttttttgtttgtttcgattttttttctttgcagttaattgctatggttcgaacctgagttaacccaaatatttctgccgactttataactgtacagttttgtatattaaacgtttttgaagttattaatttaaagaaagatcatttagtttattcatttagtaactgatgtataataaacgctattttcattaagagttgctttttcaactattttattcaaattgcctattgcagttgccaacaattatttattttcaataaattctgcattgtgtttaaaaggaaattctttcacagataagttggatgtcaaaaagaaaacaattcgctgtaatgtttgatgtgaagttttagtcaaggggtttatattgacgcaatattttattgttgtaaaagattaaaaaggtttaaataaaacatttttccaaa

SEQ ID NO: 100943 - DNA, 376 bp, Homo sapiens
gtaatacctgatactccagagttcatccagactagattgggtcactggcctacttatcacaatgggtggatctgaagctgactgttagattgtcaaaaacatctccatgtccattgtcgttgtcacagactcccttttcaaggatgtttgtgaacaactttagaagaaagtcatagtacctccctccatagcaaaagcaggcatgcttactgtccagaatgataataaagataatgtctttctttggaaccaagggcaggcttgtttactgcccattataaaaaatatttgatgtccctacattcagggtcgtttgctgcaatacaatcaattgcatgtacaggtgtcatgtcaccttgagggaactggggatcag

SEQ ID NO: 100944 - DNA, 483 bp, Homo sapiens
gtggtacctactgatgccagcctggcagcaccccaggagggcagggcaagcagtcagtgccatacaagcttgctcacagaggccacctcacgggtgtccacaggcaatcctcaggcaaccctgggcagtaagggcaactattatttatgccttcaattactaattcctgattgtaagagacacatactcattatagaaaaactaggccaagcacaatggctcacgcttctaatcccagcacttgggaagccaaggcaggaggattgcttgaggccaagaatttaagaccagcctgggcaacatagcaagatcccgtctctatagaaaaactgaaaattagctgggcatggtgccatatgcctgcactcccagctactcaagaggctgagataggaggatcccttgagcccaggagttggaggctgcagtgagctgtgatcacatcattgcacttcagcctgggtgacagagcaagaccctgtc

SEQ ID NO: 100945 - DNA, 737 bp, Homo sapiens
cattttttttactgatgattttgtatttgacaaactctgctacatgaagacttcttatctagtaaggaaagtaactctcagtgagtttattattttcctttcacttgtatgtcagtgctgtatggtaggatgcattgtttttcctcagaattgtgttttctgtaatgatctctgctttcgatgatgttggtgttatgtttttcaaattagataaacacttgtattttcttctgatacttttatggaatgtattttagtttatgatatgaggtcctttttattccgtgtagtgaccaatattatgctaattatagtctttaggtttaagggacagccgagctgtgtctgcctctgccacaccgtcagtgcacacatgacaatgaggcatctgtagggagcagactctcttttgccccttagcagctggatttcgctgatgacactaagatatttgggttctctgccttatgcttcatttgagctgtggccaaaatagccatcaaggttctgctgacctgcatcagccacacaaggctagtcctcactagcatcatctaagtagaaagattagtgggacatactgccaagagacaatgtttaagcactaaatagaacacttctcttaagtcacactactgtttagtgtgaaagaattctcatggtgcttgccccctcccaaggctgactgccctgtccctttccaatcagttaaggccaaggctcagggtcagaacatg

SEQ ID NO: 100946 - DNA, 669 bp, Homo sapiens
aaataactctgtaacacacttatgcactttccctttaagaaaagattccagccctgtttttcagatggtcattcagtgatacaaacctgtaggactgagataaattgctcctggaaacattttcctcttggaaaatcacagatgagactaaatgagacattttatatatatagtagcaaacagtcttaggtacatttcattttgaaagtcccatctgtcttgtaacccaaacaggttttgacactgcagagtgattgcagtacttcaggacatgcgaaacactaggaatgttcaggacaggatgccaaagaacttcatacatttttatcatttggatatttttaaaaaagcaaaaatataattaaaactctagttgtatctcttgatctgtgtgaccactgtattttgcaacatatagcttgaataccccagccctgcatttaaatacaactgcagtttttacaacaaaagagaaccagtaagtctttttccaggattaggattttaattgatatcattatagctaaaaagtttgaacatgatgggaataatgactggtgtttttcagcaagttattattcattctacatctttctctcagctatgtgcccaagtccacagtgtctgtaatatttaaattaataatgcaaatttaactattgccattaa

SEQ ID NO: 100947 - DNA, 422 bp, Homo sapiens
gggaggatggagctgtgtcataggagaagggaggatggagctatgccagaggagaagggaggatggagctgtgtcagaggagaagggaggatggagctatgacacaggagaagggaggatggagctatgtcagaggagaagggaggatggagctgtgtcataggagaagggaggatggagctatgtcagaggagaagggaggatggagctgtgtcataggagaagggaggatggagctatgccagaggagaagggaggacgtcataggaggagggaggatggaactatgtcagaggaaaagggaggttgggactgtgctataggaaaatggagggggaactatgtcatagtacaacggaagtagatctatgttatagacacgttgccatacttaggctcagtgcagtcgctcacacctgtaa

SEQ ID NO: 100948 - DNA, 376 bp, Homo sapiens
gttaagaaataatagatttcaagggaggcagggcaacatgttgcgaagctatggtgcattgttacaaaatggcctcaagtgaatcctgcctctttgcattcacacccttccacatggactctgagggtagtcttctgagggactctgactaaagtgacattctactgatgtgcaggagttccaagtacaggcttcaagagagctcatagcttgtttttgctcttagaaaccaactgctatataaagaagtccaaactatcctgcttgaaagagagacaacatggaagacgagagaaaccatgtggaaagaggccatgtgtatgagaacaaaagctttccagctgaggcaccagacatgtgagtgaagccacagtag

SEQ ID NO: 100949 - DNA, 627 bp, Homo sapiens
tgtgtgtgtgagaactgaacagtttgaatgttgtaatgtggtgactctgaaaatcagattctccacctcctcagtgattgcttttttgaggcttgcagtcatccatttgtataatgacttttctaaaccagttttgcaaagtctgtattccttgttgtgtgtggtcactgaagtttctgtcttactatctctggacagctatgacttgatagagatttagtataatgtctggatccccatccccctcaataaagggaaaaaaacaagaaaggttgcagcctaaggggacagaaacaaaagcaagaatctgtgctgtttccccaggctactgccagaactgagcaaaatgcacaatcctaaattgttgagggcaaggttcccgctgccagccctgttactaggcagctgctctaggaggtggtcctgtgcccgcctctggggatgctgaggagtagggaatagtagctggtttgcatgctgtgctctcttctcccttcatcaactactgccctgggtgtttaatgtctgattaggttctaaggttcagaatagttgattctgatgtatttttcagcttaatggttttggtggaaggactaaccctgggagctttctactctgccattt

SEQ ID NO: 100950 - DNA, 318 bp, Homo sapiens
agattccagactggctattgtgtgacacaacatacaggatatatctgaatagtgctcagaagagtttgaaaatgcaaatgatattaaaataaagatgaaaaagagaaagctggtcagaacttgtggacataacccttctggatctgttgcctgattaaaaaatagttgatattctcgaatgaattaaaacaagatttagagactgagcatggtagctcattcttgtaatccaagcactttgggagggcaaggcaagagaattgcttgcggccaggagtttgagaccagcttggccaacagtgagaccaggttgctagg

SEQ ID NO: 100951 - DNA, 480 bp, Homo sapiens
atatgaaaatgtattgtatatgagtggagtctagagcacagctctaagcctccttattcgagccgagctgggccagccaggcaaccttctaggtaacgaccacatctacaacgttatcgtcacagcccatgcatttgtaataatcttcttcatagtaatacccatcataatcggaggctttggcaactgactagttcccctaataatcggtgccctatgagtgggaggtattgtgtctctcatatagttagaagcagaagagtctacattctgttttttaactaaggaaatattctgtgcatatttcctcttagcacattagatatgtatcattcttctttaaggctgtgtaatagttttttcatatagtgttaatcctctaaatcttctaaatattttattcatggcttgctttttattagcttaataattattctttcttttaattttttttccagttttgccatggtcaacatttgt

SEQ ID NO: 100952 - DNA, 787 bp, Homo sapiens
gttatttattatcagaagttcctgttttggcattttggaaatcatcttgactagtctggcaagagttcaaaatgctttgtgttgcatatggatcatctacactactcggaataattagtacaaaagacacaaaagttgtcttgtcaaaattagtgacaggacagcagtctcctccaaccccaactttaagtagtctactttaaaggattttaagaattgttaatgactgaacctcaaggtaatgttagtatctgagatgcaggttttgttgttagcttataaaaatttaatttacttatttgtgttcagagataacacagagccactgtttctgtattctgtgtttttaaagtttaagcaaagtgttgagaggcatttcagttcaagcatggagtgttgaaaataaattccagagcatccctggtacaaacagactgaatatgttaatggtaaccttcacttcctgtccctgctgtttctccattgtgggccactaatgcctttcctttttgtagatttcatagccattcttggcctccctgaatttctctgcttttccatgggcctttaggaagaatgagctggcccgttttcctcgttcctggacactgcctatctgggcacactgatttgtatgagtcaacctgctattcttatattttctatattccaagacaggttttacttgattgatttacaagtttttacatccacctagagagtcagaatctcctttggaaggtaactgcagtccagaacattagactctaagggcatatacttccaa

SEQ ID NO: 100953 - DNA, 800 bp, Homo sapiens
tttagtagagacggggtttcaccgtgttagccaggatggtctcgatctcctgaccttgtgatccgcccgcctcggcctcccaaagtgctgggattacaggcatgagccaccgcgcccagccccaactattatttttttaaatgatcttataaaacacaccagtatgattgatcctctgctttttaaaataattttactcatctagaaggaatctccacattgctttttaagactaagctctgctattgtgattaaaataaaattttattttctaagatggatgtatgcacatttccaaagaactggtattacataaagcgcatctgtgtggttgctcaaatcttaagtacctttacaaaaaggagaagattcattatgtaggagaggttgtactgctgagttgcctatggttctgagttaattgcacccacagtcactgcactgtgttgaaaaatcaccaatttaattagcagatttcctagacagtgactagactgaccttttatatgttaagctttgtaaacacatttaagccgtgatggaatcgaagtgctagctcagatttattgaaataaatatagctcttgctgttggcaacaggaattatgagaagcagtcttcataagaagaattacatttttatatgtctgttaagaaattaaaaaaaatttttttaaccataagatcttagtaagtgttctcgctttggcagatggattaaccttgttcttttggagccagatcaatatctagtttatctctagagcagtggacagtctaactatgttttgattatatta

SEQ ID NO: 100954 - DNA, 381 bp, Homo sapiens
tccctcctgctttcccaaataactagattctcactttcctaaatacttcagaagacacaggatgttattcatatgaagaggtgaggatgccctgtctttggccagaggttaagcgttgtataacaagtaggaggattgaaagaacatacatctctagtggggatgttcttggccctcttttaatactcttcatccagcatgctggcagtcagccttacatatctcttggcaaggaactggaagatgcttccctggagaagctggtccaagagaaacgcctacagatactaacatttgaaaatactccaatgagatggtcaggacctggccagatttacaacaacaatctgagacctaaacccacttatctcagaaactaat

SEQ ID NO: 100955 - DNA, 374 bp, Homo sapiens
aactgaagtgtagtctgacggccatgaattctcataagtccctagtcgtgtgaactttcccttattttcctcaataaatgtgtatttgtatatatgtttgtgtatgtttgcttttttcgttccctcagacaactgagaaatactttgtacttcgctatccagtatttatatgtcttacagcaccttttctccttgtatgttagttttttcttcagtatccttaattttaaagctgtacttctcttttctactcagttgtctttcctatcatttaaagccatgagattgtttgcttttccttctcagtgcatccatcccccatacaaagactcttttattttcttatttatggaagtttcttgccgtcacatttt

SEQ ID NO: 100956 - DNA, 422 bp, Homo sapiens
ttctagattatcaagcctttcttggatgctaggcttttagaataagcagtcagggttgatattctgaccactacaccatctcctcatgttctggcatatgaaatggatgtttctgatttactgggacatggaatttaaaagagctggatttcaagggttttgtgttgttttatgagtaggtagcttaaaaaattatacaggaatggcattttgcccctaccttgattctttcacttcttaacttaggatgtagttttctgaatcttgtagggggaaactattcttaaaggaaacaaattcctgagtagattagccctagtacattcatctaccacaggctagtttttatgtccaggtctaaaggttactgatcccagaggatcaaccactcattggttaatttcattgtatcccctcctttg

SEQ ID NO: 100957 - DNA, 480 bp, Homo sapiens
aatcacttttagaatctgaaaatagttgtaatgctctctctttcaagagttacatatacatagtgtttacatataatttcagagtttcccagatgtccatcaggccatttctttttttctttttttttttttttgagaaggaatctcactctgttgcccaggctggagtgccgtggctcgatcttggctcactacaacctctgcctcctggttcaagtgattctcctgcctcagcctcctgagtagctgggattacaggtgcacatcaccacacctggctaatttttgtatttttagtaaagatggggtttcaccatattggccaggctggtctcgaactcctgacctcaagtgatccgcccaccttgaccttccaatatgctgggattacaggtgtgagacactgcgccccacctcatcaggccatttctaagctccagattaagaacctttgattagagacaggaacgtgttaattgc

SEQ ID NO: 100958 - DNA, 710 bp, Homo sapiens
catacttcaatatagtgaaagatacacatgacccacagctaacatcatattgattaggaaaagctgaaagactttcctttaagaactggttcaagacaaggatgcccacttctacctaccaccccctctgttccacatagtgctggaagtcatagccggagcagtcagaacatagaaataaaaggtggccaagctcggtggctcacacctgtaatcgcagcactttgggagaccaaggtaggcggatcacttgagccaagtagttcaagaccagcctgggcaatgtggggagacccctttctccacaagaaatatagaaattagccaggtgtggtggtgtgtgcctatagtcccaggtattcaggaggctgaggcaggaggatggattgagcccaggaggtccaggctgcagtgagccatgatcacaccactacactccagcctgggtgacagagcagggaccctgtctctaagaaaaaaaatagaagaaagaaaggaaggaaggaaaggaggaagggaggaaggggcatccatatcataaagagaatgttagttgtctcccttttcaggttatgtgaccatatgtagaaaaaaaacaaagagttcaccaaaaactcataaacctgataaattcagtaaagttggagaatacaaagtttgtgtacaaaagttagtatcatttctgtacaccagtaacaaactgggtaata

SEQ ID NO: 100959 - DNA, 381 bp, Homo sapiens
aagcctgagtgcccgcttcctccaaatgaggggtggggaaggggtggagaggagggggaaatggagcccacaggactccttcctacaaccttcctagactctcctccgcttggctccgccgtcagtcccaccactcaccctccctccctgcacaggctgtgggggtgcgggcagtggggtccacttggccactcactaaccggccctcacgcactcacactcacacccacactcacacactctccctccgtagctgcgcgcacttcgcccactctccggaccctgcactagcggccccggccgggagggcacgaggactgcgcagccggacccccgcaggtccccaagccaggggtcccgtccatccgcccgcccccgcgg

SEQ ID NO: 100960 - DNA, 886 bp, Homo sapiens
agctagaaaaccggcggcttgatcggcttttaggtagccccggaaaggtcgggaggaggaggggcaaaggccgcgctcctcagctgggaaggaggtggtctcaagcagcctccagtcccgggctcaacaccgccaacccggcaagggtgaggcagcgttcagggatgcaaggggcagagcggtagcggcacctgtgcacccctcccacctctgcctcagtttaccatgtacggcctcatttctctccgggctgccctgagagaaaaatgttctccagccgagatttgcttgaattggaaattcaagtgatccatggacacatcctccttgacagcccccagaagactgtaggctggttacatccccctagttagaaaaggaaaaggattcgaggagaagggaaggatgcagctttgccttttcccagctttggggcatcaagaaactgttactgggcggagttggggccagggggccagtgggtgctctgagagtgtaaagaccaaactctggtgggacctggctccattgcggagcctcaaaagctccaacatggtggaggaagttggcagtaccttctctagatctttctttccatccttagaagagtataagcccaagccgtggagtgaacaaccccaaagctaccctacgctgaactcctctctttggtcctgccactactggtgaaaccactgaccctttctgggcctgtttccttacctgtcctgaggagatgctgacctttggctccagagagactgtgagaactcagtgagggggtcctgcactccgagggtcctgcaccctgggagcccttaggtctgtttggagagaaaacagttcctccaggcaagaggggagaagtgtccccaggaggttgggg

SEQ ID NO: 100961 - DNA, 711 bp, Homo sapiens
cgggctggcatttatttgtcgaacacatacagtgtttctatccccagagggagcccttctcatgggttgtcacgagaacccattgcggacaacctttatggttttcattcatacagatgtgggctgcagcggcagagaagccctttcagtctttcattcagcacctcctgtgtccagtgagcacctgctgtgtggcaggcactgtctgtcctagctgctgtggacggagccatgagcacctgctgtgtggcaggcactgtctgtcctaggtgctgtggacggagccatgagcacctgctgtgtggcaggcactgtctgtcctaggtgctgtggacggagccattaacaatcccaaaattcctgcccctgccgggcccctggtctgggtcgtgtgactgtccaaggtctcctgatggcgaaggagccaagctggacttctgtgccctacctgcgtgccaccgaatgccaggattcgggatcatcatcctctgcggcggctctggcctgtcttcacgtggccgtcctctgtgggtgcctccctggtgcctcgtgtgtctggctctccttgtcttacaaagacactgtcatgctggatgagggcccatcacagtacctcgttttaacttaatcacctctttaaagaccttatctccaaatacagtcacattctgaggagcaggggttaggctttcagcatatgaatttggaggg

SEQ ID NO: 100962 - DNA, 500 bp, Homo sapiens
gtatctaaacaagatccacatactacatttggttatcttgtttatatatcttaaaaatcactctattattgtagattctgagtcatttgttcagtggaatgttctgttgtctgtatttgctttcttatgttgttcaacttctctcccctatgtttaattgggggttaattaaacatggagggctgaatagatttagattctatggtctgatgaatctacttaataggttggctatatgcttcatatttcatcacatcaaaaggcactatcactaggttcaggtaatgacagcctgtctttcactggaaagtttcccatcaacctttccatgcaatggtgccaatcattgatgatttttgcctgaaataattttattattggttgtaatatagggtatttccttttcttattctatatgagcaaattgctttctgtaaaaataaataacctttggatgacaaagcctggggaaacaaaaataaaaaagattaaaaaataaa

SEQ ID NO: 100963 - DNA, 507 bp, Homo sapiens
atcttttcttgataaattcacccacactagttatcaaatccaaacatcacagaagtaagttagcatcaattatttaccaagcgagacaaaggtttgtcatttttttcctatcttttccttcagccctcttcatccccattagttttttaatacttctttaatctcagaagcagtcattcctagtttatgtcaaagtcaggactttggaatttggagcactatctttaccactttctgtaactatctccagttttaggctaaaactacagggcattactcttttttttgttttgttttttgttgttttgagacagtcttgctctgtcgcccaggctggagtgcagtggtacaatcttggctcactataaggaggtcattccatttaatatataatcacttattttatgatttgtttgacatattaaattatcaaatataagtattttcttaatatacctcttctctgattttgttgatatagacttaataataaaatcttttaaaagt

SEQ ID NO: 100964 - DNA, 795 bp, Homo sapiens
atttttttagttgcttctttttgcttcaaatttcttctattgtgcgcatttttgttcagctcaaccattgtagtgattttatttctagtcatgtattttgtagagataacattcactgaagattgcagtattacttttgtagtcattacaaatgacatatgtaatatatgtattttttaatcctgtgaaaggtaagttaaaatttcttaatttatactataaaaagtgacctgtcctcaccgttgtactgtgttgatgtagaccagaggaacactgcctgtagcatataagcattttatgtatttgactatgcttccttttttcaaaaaatttttttaatccatgttgcaacttgtgttagtctgtttttgcatctctataaaggaatacctgatattgagtaatttataaagaaaagaggtttaattggctcacaattctgcaaactgtacaggaagtgtggtgcagacatctgcttctagtaattgtctcaggaaacttctaatcatgggcagaaggtgaagggcgagtaggtgcatcacatggcaagagctgagcgagagcatgaagggggagatccagactttattattattattattgttattactattttgtagaaacggggttttgccatgttgtccaagctagtctcaatctcctgagctcaggcaagtcgcctgtctcagcctcccaaagtgctgggattacaggcgtgagccaccatgcccgtccccagactctcttaaataaccagatctcctgtgaactaactgagtgggaactcactcatca

SEQ ID NO: 100965 - DNA, 792 bp, Homo sapiens
ggaaaaaagattgagaagagattcttggaaggcttcatctctgaggttagtcatcactgtaatcctagagagcttctggtaactgattgtttctgggtaattcactgtattccataaccacttgggttttctgctgtgtgtaaagtggagacagaaggcaacttgctttcctcttgagtatttctggtaattcattgccaagccatccatggcagaaagttccctcagcagaatagatgcagccattccagagatggaatctgtcctcaacaatagcctgatcaatcttagtggataattcccttataaatagaaatgattctttatggccagcataatgcagaaattggataataaaaatgtttaaacccctttgaaggtcagggtatgatgttagggaagagtagcctctgtgctctgtctaatatactcaggttccaaaaagatgcagtagagatccacagtgtttactcctgggcagaattcttatttgaatttctgtctccattcttacttttataagctgagttggacagccaaacagggaactttaagggtaataaatattaccttttccccttaagcctgggacctggagcaagctcttagcagcctgttctctgggcctttcctcttagtacctagaagtacacagcaccccaaagcccccatgcgcctggcctgggaagctaatttttaatggaggaactctacaagtttaatgctgtgattcttaacttattttaggtcagagaatcctttgaaaatctgatgcaagtattagcttccaca

SEQ ID NO: 100966 - DNA, 858 bp, Homo sapiens
acgaagcattgccagagagctagtgtgatcctttggtagtgtcactacattcagatttctcatggtgctagaattcttgtgtgggtccttctcatctggagatgctagcacttctaatttgtgtaattatttttgtttgggtaggattttttctttttctttccttttctataatattattgttatttttttcttctttccctttccctcctccctaggggtgtggctgtagagcatgctgggtagggtcttttggctttgcttctgtagccctaatgcacttctgccagcaggttttatattgggtgtgtggtttgacctacaagccagtagatggcgccatgggtaagagctggctgttgccagtgctgctggctgtgtacttgatccttgtttattgggaggagctctctcctgccccaggcaaagggctgatttcctgagtacacattaatctgagctccctcagccctaggggtagggggattgggggcacaagatgggtggagccagatagggaagattcccccagtgttgtcctgctcccagtccaggtttgggacaatgccggcagcgtttccctgtgtctttcccccacaaagtctccaagtctctcctcaaatgagctccaaggcttgggagaaacaatctcttcctctgcccgggttgcgtggatctccagtggaaaggtgagacagagggatgctgtctgcctctctcacttactgaggcttcactcacttctatcagtcgaatgctgtcctgagggctgcttgcctgcaatgtcctccgcaagatctgggatgtccttcataattccggggaattgccatttcctttcttgaattaaagctcaca

SEQ ID NO: 100967 - DNA, 403 bp, Homo sapiens
ctctggcaccaggggtttcctgagctgaccaagccagagattgcgggcagcaagacaaaggtgagatgaaacctgcgacaagatgcaaccgtcaggaaagtgggcttgaaaactgtccccttctgggaaacctcagaatggggatccccagaatggaaactcccccctgaaaggggcacacctacctcagtggtgtaagcacattgctgcttcctgacatcttacctcttgtaaacaaacagtcttttttcccaccccatgcctttggacaaatcctcattccctgatcccaaaccctagaagccagatttggagatctagaatttagaggccaggcgcggtggctcacgcctgtaatcccagcactttgggaggccgaggcgggcagatcacgaggtcagga

SEQ ID NO: 100968 - DNA, 352 bp, Homo sapiens
ctttgctccatgtattcagccaacctgaaagactggcaggacaggagcatttgactttaggaggcacagatgtggtgtgcttgggtgtgtggtgggggtggctagttctccagcagggaggccagtctggggagtggtcttcatttgaaatagaaaagctgctgagctcttgcttgtgagggacacacatgtggtctttattgacttcctcaactggtagaggcatagatttcatcggtgactttgctaaaatcagcttctgcatccgtgagatccagggggcaagggaaaggagctattcatcttaagagggaaaccttgccagtgagcagaggtaaagggaggtcatttt

SEQ ID NO: 100969 - DNA, 417 bp, Homo sapiens
gagacttgctctgtcacccaggctggagtgcagtggcgcgatcttggttcactgcaacctccgcctcccaggtgtgagtgattctcctgcctcagcctcacgagtagctgggattgcaggcacctgccattatgcccggctaatttttgtgttttcagtagagacggggtttcaccatgttggtcaggctggtctcaaactcctaacctcaagtaatccgcctacctcagcctcccaaagtgctggaactacaggtatgagccaccgctcctggagcttatgaaggcttcttgctagaaaagtcaaatctcttcaagcttctagaatcaaattccattttcagataacacaagagaccagaggaacatgttatatgacacctggggatgtaatcagcaaaatccagactggggaact

SEQ ID NO: 100970 - DNA, 1190 bp, Homo sapiens
gcgggcttagaacgccaccgacttgaggaagcccagtacatttcaagttggtcgcggcttgggctccgctttggggaggggcagcaggtttattcactggatctctgaatacccaggccccctccaccatggccagccggggtgggggccggggtcgtggccggggccagttgaccttcaacgtggaggccgtgggcattgggaaaggggatgctttgcccccacccaccctgcagccttctccactcttccctcccttggagttccgcccagtacctttgccctcaggcgaggaaggggaatatgtcctggcactgaagcaagagctacgaggagccatgaggcagctcccctacttcatccggccagctgtccccaagagagatgtggagcgttattcagacaaatatcagatgtcaggtccgattgacaatgccatcgattggaaccctgattggcggcgtctaccccgggagctaaagatccgagtgcggaagctacagaaggaacggattacaattctgctccccaagaggccccctaagaccacagaagataaggaggaaacaatacagaaactagagaccctggagaagaaggaagaagaagtaacttcagaggaggatgaggagaaagaagaagaagaagagaaggaagaggaggaagaagaagagtatgatgaagaagaacatgaagaggaaactgattacatcatgtcatattttgacaatggagaggactttggtggtgacagtgatgacaatatggacgaggctatatactgaagaaggactctggaccctcgtgtctttctttaggatacagagagtaactgtacctattatttgtttcttcagacaagcaaatcatttggtcagagttcatataatctgtctgttccctggagatgggaatagaggatgatgacagtttattttctacacttcccctccttccacatttgtatcacctttgctatcttggggaaagtgcaaaggacaaacatctcaattgtatgaagggagaaaggagaattgaaagaagaactggggttgttagagctgagatgactgtacacatacccctgcccaatttatatagctctttgtggagataattaggggtgggagcagtttgaaggagtaagcctggttttatacttttaaataaagtgtttttatctgtctctc

SEQ ID NO: 100971 - DNA, 1231 bp, Homo sapiens
agacttctgaacacatttatttgatatgtcaagtggagagaggagtgatttagggtttctccccacttctacctgtgggggtgttcataagctcagacagacagaagagcagcttagagcccatgacccaccccctgggaaaatgagacaatctgttgtagttgttggaggaacagggtgggaataaaaagcaggaagttgagaagtgaagttgagagcagtaaagacagcagcagaactgaggctgggggttgctgcaggaacccccaagaagagtgaaaaagatatcctgaaaagtggttggggttagaagcagggtgtgaataaggagccaggcctggagaaagaagcaagacctgcagaatgggctgggatgtccacggagagagtgtgcaaaatcatgataggctgtgtttcagggcatacatggaaagcaagggattgcttctgcaggagggcaaagacatcggagactgcccataagtaagggttccctactgcttctgaacaaatgcaagagagtttgggaccctagccctgtgtgtttattgatatgctgtgcctgtaggtacacaagtaatcccatatgcatgtgaaatgaccagggcatgaatacatgtgtgtatatacccagtaaatagagtacttattctttcttgctaataagagtactgtgcttatggacacatgtttaaccatgtgtgggtgcactgtgcacccatgagcacatgcaagagatccctttgttcgtggtgtgtgtgtgagctggttctcccacctatcccattaaggtcctaatccccaccctccttggctcctctcactcctctcagcgccctggctccccaggcccacctagactctggaagccccccagcaggcggatctgctcagtctgcatggagtggcgtctcaccaatttgcgcttggtcctgggagagcctggcgccccggcataaggaggggcaggcaacgaaggactcaggcgagtcagggcaaaggtgtccaggggtgtccagctccactggctccatgcggctcagtttctgcctcagccctgaagggggaccagactcctgagcttctggtgctgtgtttcggcgagagagaggacccccgctagtcactttctccgcccatgggggcgggtcctcagggccttcggtgctgtgacgtcgggaaagacggggtcgaccggtcagggtcaggccattgaattcggcagtcaagc

SEQ ID NO: 100972 - DNA, 2362 bp, Homo sapiens
agacttctgaacacatttatttgatatgtcaagtggagagaggagtgatttagggtttctccccacttctacctgtgggggtgttcataagctcagacagacagaagagcagcttagagcccatgacccaccccctgggaaaatgagacaatctgttgtagttgttggaggaacagggtgggaataaaaagcaggaagttgagaagtgaagttgagagcagtaaagacagcagcagaactgaggctgggggttgctgcaggaacccccaagaagagtgaaaaagatatcctgaaaagtggttggggttagaagcagggtgtgaataaggagccaggcctggagaaagaagcaagacctgcagaatgggctgggatgtccacggagagagtgtgcaaaatcatgataggctgtgtttcagggcatacatggaaagcaagggattgcttctgcaggagggcaaagacatcggagactgcccataagtaagggttccctactgcttctgaacaaatgcaagagagtttgggaccctagccctgtgtgtttattgatatgctgtgcctgtaggtacacaagtaatcccatatgcatgtgaaatgaccagggcatgaatacatgtgtgtatatacccagtaaatagagtacttattctttcttgctaataagagtactgtgcttatggacacatgtttaaccatgtgtgggtgcactgtgcacccatgagcacatgcaagagatccctttgttcgtggtgtgtgtgtgagctggttctcccacctatcccattaaggtcctaatccccaccctccttggctcctctcactcctctcagcgccctggctccccaggcccacctagactctggaagccccccagcaggcggatctgctcagtctgcatggagtggcgtctcaccaatttgcgcttggtcctgggagagcctggcgccccggcataaggaggggcaggcaacgaaggcgcccgacctccgggttgtgggcgaatgtcagggatgggagggtggggactgacgttgagagggggtaggaaacccggccgcgtttgcgagatgtggtccaggagcaacgtccccgagcccctccgctccagcagccccggactccgcctccttccgcttagcggagatactgcccctggcagactctcctgggactggcgcggagagggagccgagccggctggagggagggtcaacggggaggcgctgtatcggcggcgctccagggacaggcggctggtttattcactggatctctgaatacccaggccccctccaccatggccagccggggtgggggccggggtcgtggccggggccagttgaccttcaacgtggaggccgtgggcattgggaaaggggatgctttgcccccacccaccctgcagccttctccactcttccctcccttggagttccgcccagtacctttgccctcaggcgaggaaggggaatatgtcctggcactgaagcaagagctacgaggagccatgaggcagctcccctacttcatccggccagctgtccccaagagagatgtggagcgttattcagacaaatatcagatgtcaggtccgattgacaatgccatcgattggaaccctgattggcggcgtctaccccgggagctaaagatccgagtgcggaagctacagaaggaacggattacaattctgctccccaagaggccccctaagaccacagaagataaggaggaaacaatacagaaactagagaccctggagaagaaggaagaagaagtaacttcagaggaggatgaggagaaagaagaagaagaagagaaggaagaggaggaagaagaagagtatgatgaagaagaacatgaagaggaaactgattacatcatgtcatattttgacaatggagaggactttggtggtgacagtgatgacaatatggacgaggctatatactgaagaaggactctggaccctcgtgtctttctttaggatacagagagtaactgtacctattatttgtttcttcagacaagcaaatcatttggtcagagttcatataatctgtctgttccctggagatgggaatagaggatgatgacagtttattttctacacttcccctccttccacatttgtatcacctttgctatcttggggaaagtgcaaaggacaaacatctcaattgtatgaagggagaaaggagaattgaaagaagaactggggttgttagagctgagatgactgtacacatacccctgcccaatttatatagctctttgtggagataattaggggtgggagcagtttgaaggagtaagcctggttttatacttttaaataaagtgtttttatctgtctctc

SEQ ID NO: 100973 - DNA, 1185 bp, Homo sapiens
gcgggcttagaacgccaccgacttgaggaagcccagtacatttcaagttggtcgcggcttgggctccgctttggggaggggcagcaggtttattcactggatctctgaatacccaggccccctccaccatggccagccggggtgggggccggggtcgtggccggggccagttgaccttcaacgtggaggccgtgggcattgggaaaggggatgctttgcccccacccaccctgcagccttctccactcttccctcccttggagttccgcccagtacctttgccctcaggcgaggaaggggaatatgtcctggcactgaagcaagagctacgaggagccatgaggcagctcccctacttcatccggccagctgtccccaagagagatgtggagcgttattcagacaaatatcagatgtcaggtccgattgacaatgccatcgattggaaccctgattggcggcgtctaccccgggagctaaagatccgagtgcggaagctacagaaggaacggattacaattctgctccccaagaggccccctaagaccacagaagataaggaggaaacaatacagaaactagagaccctggagaagaaggaagaagaagtaacttcagaggaggatgaggagaaagaagaagaagaagagaaggaagaggaggaagaagaagagtatgatgaagaagaacatgaagaggaaactgattacatcatgtcatattttgacaatggagaggactttggtggtgacagtgatgacaatatggacgaggctatatactgaagaaggactctggaccctcgtgtctttctttaggatacagagagtaactgtacctattatttgtttcttcagacaagcaaatcatttggtcagagttcatataatctgtctgttccctggagatgggaatagaggatgatgacagtttattttctacacttcccctccttccacatttgtatcacctttgctatcttggggaaagtgcaaaggacaaacatctcaattgtatgaagggagaaaggagaattgaaagaagaactggggttgttagagctgagatgactgtacacatacccctgcccaatttatatagctctttgtggagataattaggggtgggagcagtttgaaggagtaagctgttatcgggtccgcgtatttagtagtagtagcgccc

SEQ ID NO: 100974 - DNA, 1122 bp, Homo sapiens
gcgggcttagaacgccaccgacttgaggaagcccagtacatttcaagttggtcgcggcttgggctccgctttggggaggggcagcaggtttattcactggatctctgaatacccaggccccctccaccatggccagccggggtgggggccggggtcgtggccggggccagttgaccttcaacgtggaggccgtgggcattgggaaaggggatgctttgcccccacccaccctgcagccttctccactcttccctattggcggcgtctaccccgggagctaaagatccgagtgcggaagctacagaaggaacggattacaattctgctccccaagaggccccctaagaccacagaagataaggaggaaacaatacagaaactagaggtgaggaggaagtgtgcatagagacctcctgagccctggatccattccctctctcttggcccatgtgtgcctcaatttttcccttctgtgaactgaacctgagtttctattcctattcatccccacatgagaccctggagaagaaggaagaagaagtaacttcagaggaggatgaggagaaagaagaagaagaagagaaggaagaggaggaagaagaagagtatgatgaagaagaacatgaagaggaaactgattacatcatgtcatattttgacaatggagaggactttggtggtgacagtgatgacaatatggacgaggctatatactgaagaaggactctggaccctcgtgtctttctttaggatacagagagtaactgtacctattatttgtttcttcagacaagcaaatcatttggtcagagttcatataatctgtctgttccctggagatgggaatagaggatgatgacagtttattttctacacttcccctccttccacatttgtatcacctttgctatcttggggaaagtgcaaaggacaaacatctcaattgtatgaagggagaaaggagaattgaaagaagaactggggttgttagagctgagatgactgtacacatacccctgcccaatttatatagctctttgtggagataattaggggtgggagcagtttgaaggagtaagcctggttttatacttttaaataaagtgtttttatctgtctctc

SEQ ID NO: 100975 - DNA, 366 bp, Homo sapiens
tactactactaaattcgcggccgcgtcgaccagacaagcaaatcatttggtcagagttcatataatctgtctgttccctggagatgggaatagaggatgatgacagtttattttctacacttcccctccttccacatttgtatcacctttgctatcttggggaaagtgcaaaggacaaacatctcaattgtatgaagggagaaaggagaattgaaagaagaactggggttgttagagctgagatgactgtacacatacccctgcccaatttatatagctctttgtggagataattaggggtgggagcagtttgaaggagtaagcctggttttatacttttaaataaagtgtttttatctgtctctc

SEQ ID NO: 100976 - DNA, 1768 bp, Homo sapiens
agacttctgaacacatttatttgatatgtcaagtggagagaggagtgatttagggtttctccccacttctacctgtgggggtgttcataagctcagacagacagaagagcagcttagagcccatgacccaccccctgggaaaatgagacaatctgttgtagttgttggaggaacagggtgggaataaaaagcaggaagttgagaagtgaagttgagagcagtaaagacagcagcagaactgaggctgggggttgctgcaggaacccccaagaagagtgaaaaagatatcctgaaaagtggttggggttagaagcagggtgtgaataaggagccaggcctggagaaagaagcaagacctgcagaatgggctgggatgtccacggagagagtgtgcaaaatcatgataggctgtgtttcagggcatacatggaaagcaagggattgcttctgcaggagggcaaagacatcggagactgcccataagtaagggttccctactgcttctgaacaaatgcaagagagtttgggaccctagccctgtgtgtttattgatatgctgtgcctgtaggtacacaagtaatcccatatgcatgtgaaatgaccagggcatgaatacatgtgtgtatatacccagtaaatagagtacttattctttcttgctaataagagtactgtgcttatggacacatgtttaaccatgtgtgggtgcactgtgcacccatgagcacatgcaagagatccctttgttcgtggtgtgtgtgtgagctggttctcccacctatcccattaaggtcctaatccccaccctccttggctcctctcactcctctcagcgccctggctccccaggcccacctagactctggaagccccccagcaggcggatctgctcagtctgcatggagtggcgtctcaccaatttgcgcttggtcctgggagagcctggcgccccggcataaggaggggcaggcaacgaaggcgcccgacctccgggttgtgggcgaatgtcagggatgggagggtggggactgacgttgagagggggtaggaaacccggccgcgtttgcgagatgtggtccaggagcaacgtccccgagcccctccgctccagcagccccggactccgcctccttccgcttagcggagatactgcccctggcagactctcctgggactggcgcggagagggagccgagccggctggagggagggtcaacggggaggcgctgtatcggcggcgctccagggacaggcggctggtttattcactggatctctgaatacccaggccccctccaccatggccagccggggtgggggccggggtcgtggccggggccagttgaccttcaacgtggaggccgtgggcattgggaaaggggatgctttgcccccacccaccctgcagccttctccactcttccctcccttggagttccgcccagtacctttgccctcaggcgaggaaggggaatatgtcctggcactgaagcaagagctacgaggagccatgaggcagctcccctacttcatccggccagctgtccccaagagaggtcagttggaatgctagcagacaaacatctcaattgtatgaagggagaaaggagaattgaaagaagaactggggttgttagagctgagatgactgtacacatacccctgcccaatttatatagctctttgtggagataattaggggtgggagcagtttgaaggagtaagcctggttttatacttttaaataaagtgtttttatctgtctctc

SEQ ID NO: 100977 - DNA, 418 bp, Homo sapiens
agactctcatgtgcccctggctgactgtacatgattctgaattcctcctggaccatcataaaaccatcctcgctttggccctctctctatactcccaatgcacagggatgttttgcaggcaaagaagtgtccacctttacttctccccagctttcaaaataatatgttactccctcgattgtcatttggccctctgctcagtgggagtgttagactaaattgggaggaggggtcttcctaaatttgtactagcattttctccctgaactgaccactgcccctgcctctttagcccttggagttccgcccagtacctttgccctcaggcgaggaaggggaatatgtcctggcactgaagcaagagctacgaggagccatgaggcagctcccctacttcatccggccagctgtccccaag

SEQ ID NO: 100978 - DNA, 1512 bp, Homo sapiens
agacttctgaacacatttatttgatatgtcaagtggagagaggagtgatttagggtttctccccacttctacctgtgggggtgttcataagctcagacagacagaagagcagcttagagcccatgacccaccccctgggaaaatgagacaatctgttgtagttgttggaggaacagggtgggaataaaaagcaggaagttgagaagtgaagttgagagcagtaaagacagcagcagaactgaggctgggggttgctgcaggaacccccaagaagagtgaaaaagatatcctgaaaagtggttggggttagaagcagggtgtgaataaggagccaggcctggagaaagaagcaagacctgcagaatgggctgggatgtccacggagagagtgtgcaaaatcatgataggctgtgtttcagggcatacatggaaagcaagggattgcttctgcaggagggcaaagacatcggagactgcccataagtaagggttccctactgcttctgaacaaatgcaagagagtttgggaccctagccctgtgtgtttattgatatgctgtgcctgtaggtacacaagtaatcccatatgcatgtgaaatgaccagggcatgaatacatgtgtgtatatacccagtaaatagagtacttattctttcttgctaataagagtactgtgcttatggacacatgtttaaccatgtgtgggtgcactgtgcacccatgagcacatgcaagagatccctttgttcgtggtgtgtgtgtgagctggttctcccacctatcccattaaggtcctaatccccaccctccttggctcctctcactcctctcagcgccctggctccccaggcccacctagactctggaagccccccagcaggcggatctgctcagtctgcatggagtggcgtctcaccaatttgcgcttggtcctgggagagcctggcgccccggcataaggaggggcaggcaacgaaggcgcccgacctccgggttgtgggcgaatgtcagggatgggagggtggggactgacgttgagagggggtaggaaacccggccgcgtttgcgagatgtggtccaggagcaacgtccccgagcccctccgctccagcagccccggactccgcctccttccgcttagcggagatactgcccctggcagactctcctgggactggcgcggagagggagccgagccggctggagggagggtcaacggggaggcgctgtatcggcggcgctccagggacaggcggctggactcaggcgagtcagggcaaaggtgtccaggggtgtccagctccactggctccatgcggctcagtttctgcctcagccctgaagggggaccagactcctgagcttctggtgctgtgtttcggcgagagagaggacccccgctagtcactttctccgcccatgggggcgggtcctcagggccttcggtgctgtgacgtcgggaaagacggggtcgaccggtcagggtcaggccattgaattcggcagtcaagc

SEQ ID NO: 100979 - DNA, 1127 bp, Homo sapiens
tatcaagtgcggcggctgattcggccgaggcttgggacccagtacatttcaagttggtcgcggcttgggctccgctttggggaggggcagcaggtttattcactggatctctgaatacccaggccccctccaccatggccagccggggtgggggccggggtcgtggccggggccagttgaccttcaacgtggaggccgtgggcattgggaaaggggatgctttgcccccacccaccctgcagccttctccactcttccctcccttggagttccgcccagtacctttgccctcaggcgaggaaggggaatatgtcctggcactgaagcaagagctacgaggagccatgaggcagctcccctacttcatccggccagctgtccccaagagagattggcggcgtctaccccgggagctaaagatccgagtgcggaagctacagaaggaacggattacaattctgctccccaagaggccccctaagaccacagaagataaggaggaaacaatacagaaactagagaccctggagaagaaggaagaagaagtaacttcagaggaggatgaggagaaagaagaagaagaagagaaggaagaggaggaagaagaagagtatgatgaagaagaacatgaagaggaaactgattacatcatgtcatattttgacaatggagaggactttggtggtgacagtgatgacaatatggacgaggctatatactgaagaaggactctggaccctcgtgtctttctttaggatacagagagtaactgtacctattatttgtttcttcagacaagcaaatcatttggtcagagttcatataatctgtctgttccctggagatgggaatagaggatgatgacagtttattttctacacttcccctccttccacatttgtatcacctttgctatcttggggaaagtgcaaaggacaaacatctcaattgtatgaagggagaaaggagaattgaaagaagaactggggttgttagagctgagatgactgtacacatacccctgcccaatttatatagctctttgtggagataattaggggtgggagcagtttgaaggagtaagcctggttttatacttttaaataaagtgtttttatctgtctctc

SEQ ID NO: 100980 - DNA, 418 bp, Homo sapiens
gctgggattataggcatgagccaccgtgcccagcctggctcaggttttaatggcacagagcagccaagattgatttgctgcttgtgctctgtgtgcacggtgtacgcctccgggaaaaaccaaagggcaaaaaccaagtcttcaccaaccaagctggtggaggctctgctccacatccttctcatccacagactcaggctgatggagactctatcacctggaacatcatcagttaccaccacaggggggaagggaacgtggaatcagatgagtctgatgtcaaatcctgactttgctgtttaaagcaagggacatgcctgacctgctgggtccatagttactgcttagctccgagagtattgattttccccctgtccaatgtcttcaaccctattcattgtgtattcaaccaggattt

SEQ ID NO: 100981 - DNA, 602 bp, Homo sapiens
gctcggtaccctcataggttcgcagcacagtcgggacagaattcgatggattcctttagttggagtccgcgtagtcagcacagacagcagtggaaaggacgctctgggtcctgttatttgctagggagggtaaagggagactatttcaaagctactgttcctagtccagctttaagtttcggtaagaaacatgctgttttgtttcatgatttcgttaattatggaaatttggcattgagggattattttattgagggtagaagagattccagaatcatcatctgtgatgatggtgtcctttagggctcttggagcagccagaccatgtttccaagagaaacctggtgatattgccagcagaccccctgccatcccccccagttgtcctggggctgaatgggcaaatctgtccaaacagctagtaaccggctgtgagggagagggtcagaagcacttagcgttggcctctgattgctgtcctctcttgtcctcttcccactccaatgatgaaaatgattttctctaaatgcctgggtaaggatgctttcaaggagctcacttggcctgcttgcctgcgaacctatgagagatcctctagatcg

SEQ ID NO: 100982 - DNA, 2408 bp, Homo sapiens
  misc_feature (17)..(17): n is a, c, g, or t
  misc_feature (22)..(22): n is a, c, g, or t
  misc_feature (25)..(25): n is a, c, g, or t
  misc_feature (34)..(35): n is a, c, g, or t
  misc_feature (37)..(37): n is a, c, g, or t
  misc_feature (43)..(43): n is a, c, g, or t
  misc_feature (82)..(82): n is a, c, g, or t
  misc_feature (86)..(86): n is a, c, g, or t
  misc_feature (91)..(91): n is a, c, g, or t
  misc_feature (116)..(116): n is a, c, g, or t
tggttgggctccctaanggccnaantccccccgnncntggtancccttgaggatgtagcctgtgtccttcatcccggaaggnagtnggaancgtttgggaccctgcctcagagggnccctcctatagagatgtgatgcctggagaattacgggaatgtgttcctcactggatcgtgagaccaggactgaaaatgatcaagaaatttctgaagacacaagatcacatggggtcctactgggaagatttcaaaaggatatttctcagggtctcaagtttaaagaagcctatgaacgagaagtcagtctgaaaaggccgctggggaactcccctggagaaagactgaacaggaaaatgccagattttggtcaagtgacagttgaggagaagctaacccccaggggagagagaagcgagaaatataatgattttgggaacagcttcactgtgaattccaaccttatctcacatcagagactccccgtgggagacagaccccataagtgtgatgaatgtagcaagagctttaatcgaacttcagaccttattcaacatcagagaatccacactggggaaaagccctatgaatgtaatgagtgtgggaaggccttcagccagagctcacaccttattcagcatcagagaatccacactggggaaaaaccttatgaatgtagtgattgtgggaaaaccttcagctgtagctctgccctcattctgcatcggaggatccacacgggggagaaaccctatgaatgtaatgagtgtgggaagaccttcagctggagctccaccctcacccaccatcagagaatccacactggtgagaaaccctacgcctgcaatgaatgtgggaaggccttcagcaggagctcaacccttattcaccatcagagaatccacactggagaaaaaccctatgaatgtaatgaatgtgggaaagccttcagccagagctcacacctctatcagcaccagagaatccacactggagagaagccctacgaatgtatggaatgtggaggaaagtttacctacagttcaggccttattcagcatcaaagaatccacaccggggagaacccctatgaatgtagtgagtgtgggaaagccttcaggtacagctcggctcttgttcgccatcagagaattcacactggagagaagcctttgaatgggatcggcatgagcaaaagctccctcagagttacgaccgagttaaatatcagagagtccacgtgaaagagccacacacccattttcctcactttccctgagtctcaagagctcttgccttaccctataaatctcaacagcttaggatgtgtccctttcaactcagacttttcattttagagaatggggcagatggggcaaatcgttgaattttcccagaaatcacaccagccttagaaagcgtcaaggcaagtggatggcgtgctgggaatagaaagcagctctgggaccagttaccccatttaggaaaggagtttgcactaaactgtttttctcacagcagaggaacctttccaaggtggggatggaagcacagtcgggacagaattcgatggattcctttagttggagtccgcgtagtcagcacagacagcagtggaaaggacgctctgggtcctgttatttgctagggagggtaaagggagactatttcaaagctactgttcctagtccagctttaagtttcggtaagaaacatgctgttttgtttcatgatttcgttaattatggaaatttggcattgagggattattttattgagggtagaagagattccagaatcatcatctgtgatgatggtgtcctttagggctcttggagcagccagaccatgtttccaagagaaacctggtgatattgccagcagaccccctgccatcccccccagttgtcctggggctgaatgggcaaatctgtccaaacagctagtaaccggctgtgagggagagggtcagaagcacttagcgttggcctctgattgctgtcctctcttgtcctcttcccactccaatgatgaaaatgattttctctaaatgcctgggtaaggatgctttcaaggagctcacttggcctgcttgccctgccctctcacctctgacacccagccccaggagccagaccactcctgcctccacctctgactcttcagcagctgaagattaatgcagagaaagagcaaagcccaaaagggagaaaaaaaaaacaaaaaaacaaaaaaacgaagcccagagaaggcaggctgtgcctgagcctggtagcagagctcgttgctgggtgaggatggcactccccgagttttcccaaccgacgggatgaccttccattgtgttttcccaaccctgctcatcctgtagcataaatgaagtgcactattaaacagaatagtttttcagaa

SEQ ID NO: 100983 - DNA, 1878 bp, Homo sapiens
aagacagctcgtaccggtcgactctaagaatccacactggggaaaagccctatgaatgtaatgagtgtgggaaggccttcagccagagctcacaccttattcagcatcagagaatccacactggggaaaaaccttatgaatgtagtgattgtgggaaaaccttcagctgtagctctgccctcattctgcatcggaggatccacacgggggagaaaccctatgaatgtaatgagtgtgggaagaccttcagctggagctccaccctcacccaccatcagagaatccacactggtgagaaaccctacgcctgcaatgaatgtgggaaggccttcagcaggagctcaacccttattcaccatcagagaatccacactggagaaaaaccctatgaatgtaatgaatgtgggaaagccttcagccagagctcacacctctatcagcaccagagaatccacactggagagaagccctacgaatgtatggaatgtggaggaaagtttacctacagttcaggccttattcagcatcaaagaatccacaccggggagaacccctatgaatgtagtgagtgtgggaaagccttcaggtacagctcggctcttgttcgccatcagagaattcacactggagagaagcctttgaatgggatcggcatgagcaaaagctccctcagagttacgaccgagttaaatatcagagagtccacgtgaaagagccacacacccattttcctcactttccctgagtctcaagagctcttgccttaccctataaatctcaacagcttaggatgtgtccctttcaactcagacttttcattttagagaatggggcagatggggcaaatcgttgaattttcccagaaatcacaccagccttagaaagcgtcaaggcaagtggatggcgtgctgggaatagaaagcagctctgggaccagttaccccatttaggaaaggagtttgcactaaactgtttttctcacagcagaggaacctttccaaggtggggatggaagcacagtcgggacagaattcgatggattcctttagttggagtccgcgtagtcagcacagacagcagtggaaaggacgctctgggtcctgttatttgctagggagggtaaagggagactatttcaaagctactgttcctagtccagctttaagtttcggtaagaaacatgctgttttgtttcatgatttcgttaattatggaaatttggcattgagggattattttattgagggtagaagagattccagaatcatcatctgtgatgatggtgtcctttagggctcttggagcagccagaccatgtttccaagagaaacctggtgatattgccagcagaccccctgccatcccccccagttgtcctggggctgaatgggcaaatctgtccaaacagctagtaaccggctgtgagggagagggtcagaagcacttagcgttggcctctgattgctgtcctctcttgtcctcttcccactccaatgatgaaaatgattttctctaaatgcctgggtaaggatgctttcaaggagctcacttggcctgcttgccctgccctctcacctctgacacccagccccaggagccagaccactcctgcctccacctctgactcttcagcagctgaagattaatgcagagaaagagcaaagcccaaaagggagaaaaaaaaaacaaaaaaacaaaaaaacgaagcccagagaaggcaggctgtgcctgagcctggtagcagagctcgttgctgggtgaggatggcactccccgagttttcccaaccgacgggatgaccttccattgtgttttcccaaccctgctcatcctgtagcataaatgaagtgcactattaaacagaatagtttttcagaa

SEQ ID NO: 100984 - DNA, 2238 bp, Homo sapiens
  misc_feature (17)..(17): n is a, c, g, or t
  misc_feature (22)..(22): n is a, c, g, or t
  misc_feature (25)..(25): n is a, c, g, or t
  misc_feature (34)..(35): n is a, c, g, or t
  misc_feature (37)..(37): n is a, c, g, or t
  misc_feature (43)..(43): n is a, c, g, or t
  misc_feature (82)..(82): n is a, c, g, or t
  misc_feature (86)..(86): n is a, c, g, or t
  misc_feature (91)..(91): n is a, c, g, or t
  misc_feature (116)..(116): n is a, c, g, or t
tggttgggctccctaanggccnaantccccccgnncntggtancccttgaggatgtagcctgtgtccttcatcccggaaggnagtnggaancgtttgggaccctgcctcagagggnccctcctatagagatgtgatgcctggagaattacgggaatgtgttcctcactggatcgtgagaccaggactgaaaatgatcaagaaatttctgaagacacaagatcacatggggtcctactgggaagatttcaaaaggatatttctcagggtctcaagtttaaagaagcctatgaacgagaagtcagtctgaaaaggccgctggggaactcccctggagaaagactgaacaggaaaatgccagattttggtcaagtgacagttgaggagaagctaacccccaggggagagagaagcgagaaatataatgattttgggaacagcttcactgtgaattccaaccttatctcacatcagagactccccgtgggagacagaccccataagtgtgatgaatgtagcaagagctttaatcgaacttcagaccttattcaacatcagagaatccacactggggaaaagccctatgaatgtaatgagtgtgggaaggccttcagccagagctcacaccttattcagcatcagagaatccacactggggaaaaaccttatgaatgtagtgattgtgggaaaaccttcagctgtagctctgccctcattctgcatcggaggatccacacgggggagaaaccctatgaatgtaatgagtgtgggaagaccttcagctggagctccaccctcacccaccatcagagaatccacactggtgagaaaccctacgcctgcaatgaatgtgggaaggccttcagcaggagctcaacccttattcaccatcagagaatccacactggagaacccctatgaatgtagtgagtgtgggaaagccttcaggtacagctcggctcttgttcgccatcagagaattcacactggagagaagcctttgaatgggatcggcatgagcaaaagctccctcagagttacgaccgagttaaatatcagagagtccacgtgaaagagccacacacccattttcctcactttccctgagtctcaagagctcttgccttaccctataaatctcaacagcttaggatgtgtccctttcaactcagacttttcattttagagaatggggcagatggggcaaatcgttgaattttcccagaaatcacaccagccttagaaagcgtcaaggcaagtggatggcgtgctgggaatagaaagcagctctgggaccagttaccccatttaggaaaggagtttgcactaaactgtttttctcacagcagaggaacctttccaaggtggggatggaagcacagtcgggacagaattcgatggattcctttagttggagtccgcgtagtcagcacagacagcagtggaaaggacgctctgggtcctgttatttgctagggagggtaaagggagactatttcaaagctactgttcctagtccagctttaagtttcggtaagaaacatgctgttttgtttcatgatttcgttaattatggaaatttggcattgagggattattttattgagggtagaagagattccagaatcatcatctgtgatgatggtgtcctttagggctcttggagcagccagaccatgtttccaagagaaacctggtgatattgccagcagaccccctgccatcccccccagttgtcctggggctgaatgggcaaatctgtccaaacagctagtaaccggctgtgagggagagggtcagaagcacttagcgttggcctctgattgctgtcctctcttgtcctcttcccactccaatgatgaaaatgattttctctaaatgcctgggtaaggatgctttcaaggagctcacttggcctgcttgccctgccctctcacctctgacacccagccccaggagccagaccactcctgcctccacctctgactcttcagcagctgaagattaatgcagagaaagagcaaagcccaaaagggagaaaaaaaaaacaaaaaaacaaaaaaacgaagcccagagaaggcaggctgtgcctgagcctggtagcagagctcgttgctgggtgaggatggcactccccgagttttcccaaccgacgggatgaccttccattgtgttttcccaaccctgctcatcctgtagcataaatgaagtgcactattaaacagaatagtttttcagaa

SEQ ID NO: 100985 - DNA, 2994 bp, Homo sapiens
  misc_feature (17)..(17): n is a, c, g, or t
  misc_feature (22)..(22): n is a, c, g, or t
  misc_feature (25)..(25): n is a, c, g, or t
  misc_feature (34)..(35): n is a, c, g, or t
  misc_feature (37)..(37): n is a, c, g, or t
  misc_feature (43)..(43): n is a, c, g, or t
  misc_feature (82)..(82): n is a, c, g, or t
  misc_feature (86)..(86): n is a, c, g, or t
  misc_feature (91)..(91): n is a, c, g, or t
  misc_feature (116)..(116): n is a, c, g, or t
  misc_feature (2441)..(2441): n is a, c, g, or t
tggttgggctccctaanggccnaantccccccgnncntggtancccttgaggatgtagcctgtgtccttcatcccggaaggnagtnggaancgtttgggaccctgcctcagagggnccctcctatagagatgtgatgcctggagaattacgggaatgtgttcctcactggatcgtgagaccaggactgaaaatgatcaagaaatttctgaagacacaagatcacatggggtcctactgggaagatttcaaaaggatatttctcagggtctcaagtttaaagaagcctatgaacgagaagtcagtctgaaaaggccgctggggaactcccctggagaaagactgaacaggaaaatgccagattttggtcaagtgacagttgaggagaagctaacccccaggggagagagaagcgagaaatataatgattttgggaacagcttcactgtgaattccaaccttatctcacatcagagactccccgtgggagacagaccccataagtgtgatgaatgtagcaagagctttaatcgaacttcagaccttattcaacatcagagaatccacactggggaaaagccctatgaatgtaatgagtgtgggaaggccttcagccagagctcacaccttattcagcatcagagaatccacactggggaaaaaccttatgaatgtagtgattgtgggaaaaccttcagctgtagctctgccctcattctgcatcggaggatccacacgggggagaaaccctatgaatgtaatgagtgtgggaagaccttcagctggagctccaccctcacccaccatcagagaatccacactggtgagaaaccctacgcctgcaatgaatgtgggaaggccttcagcaggagctcaacccttattcaccatcagagaatccacactggagaaaaaccctatgaatgtaatgaatgtgggaaagccttcagccagagctcacacctctatcagcaccagagaatccacactggagagaagccctacgaatgtatggaatgtggaggaaagtttacctacagttcaggccttattcagcatcaaagaatccacaccggggagaacccctatgaatgtagtgagtgtgggaaagccttcaggtacagctcggctcttgttcgccatcagagaattcacactggagagaagcctttgaatgggatcggcatgagcaaaagctccctcagagttacgaccgagttaaatatcagagagtccacgtgaaagagccacacacccattttcctcactttccctgagtctcaagagctcttgccttaccctataaatctcaacagcttaggatgtgtccctttcaactcagacttttcattttagagaatggggcagatggggcaaatcgttgaattttcccagaaatcacaccagccttagaaagcgtcaaggcaagtggatggcgtgctgggaatagaaagcagctctgggaccagttaccccatttaggaaaggagtttgcactaaactgtttttctcacagcagaggaacctttccaaggtggggatggaagcacagtcgggacagaattcgatggattcctttagttggagtccgcgtagtcagcacagacagcagtggaaaggacgctctgggtcctgttatttgctagggagggtaaagggagactatttcaaagctactgttcctagtccagctttaagtttcggtaagaaacatgctgttttgtttcatgatttcgttaattatggaaatttggcattgagggattattttattgagggtagaagagattccagaatcatcatctgtgatgatggtgtcctttagggctcttggagcagccagaccatgtttccaagagaaacctggtgatattgccagcagaccccctgccatcccccccagttgtcctggggctgaatgggcaaatctgtccaaacagctagtaaccggctgtgagggagagggtcagaagcacttagcgttggcctctgattgctgtcctctcttgtcctcttcccactccaatgatgaaaatgattttctctaaatgcctgggtaaggatgctttcaaggagctcacttggcctgcttgccctgccctctcacctctgacacccagccccaggagccagaccactcctgcctccacctctgactcttcagcagctgaagattaatgcagagaaagagcaaagcccaaaagggagaaaaaaaaaacaaaaaaacaaaaaaacgaagcccagagaaggcaggctgtgcctgagcctggtagcagagctcgttgctgggtgaggatggcactccccgagttttcccaaccgacgggatgaccttccattgtgttttcccaaccctgctcatcctgtagcataaatgaagtgcactattaaacagaatagtttttcagaaaaaaaaaaaaaaaaaaaaaaaaaaaaaaaaaanaaaaaaaaaaaaaaaaaaaaaaaaaaaaaaaaaaaaaaaaaaaaaggggggggggcctaaaccccctcccgggggggcagcgccaacaattatagccagccaccgcccccgcttctttttttgaaaaaaagagggcgggcccccactaataggcgagccgcgcgtactattattattacacgcaagcacgcgagcgcgcccgcggctggtttaaacaaacacgacgtagtcggagagaaaagacaacacctcgggctacgtggaggagaatcttattgtgagagaagagacagcccgcccacccattaatccgggggcggggaggagcagaaactatatgtggagcgagacacaaccactctccccacgagagagataatttatattaccgcgccgccacgcgaggcaggaacatatattaaaaattggagaagatggttcaattacgtttgtgtgtaaacaccaccacgcccggttattattctcgcgcgtggcagaagaaatttttggccacagaggaagttatttttagacaaaattatttcccccgggg

SEQ ID NO: 100986 - DNA, 666 bp, Homo sapiens
ctcgtgccgaattcggcacgagattttattgagggtagaagagattccagaatcatcatctgtgatgatggtgtcctttagggctcttggagcagccagaccatgtttccaagagaaacctggtgatattgccagcagaccccctgccatcccccccagttgtcctggggctgaatgggcaaatctgtccaaacagctagtaaccggctgtgagggagagggtcagaagcacttagcgttggcctctgattgctgtcctctcttgtcctcttcccactccaatgatgaaaatgattttctctaaatgcctgggtaaggatgctttcaaggagctcacttggcctgcttgccctgccctctcacctctgacacccagccccaggagccagaccactcctgcctccacctctgactcttcagcagctgaagattaatgcagagaaagagcaaagcccaaaagggagaaaaaaaaaacaaaaaaacaaaaaaacgaagcccagagaaggcaggctgtgcctgagcctggtagcagagctcgttgctgggtgaggatggcactccccgagttttcccaaccgacgggatgaccttccattgtgttttcccaaccctgctcatcctgtagcataaatgaagtgcactattaaacagaatagtttttcagaa

SEQ ID NO: 100987 - DNA, 222 bp, Homo sapiens
cacaggtgtggggttgctgacaatgtcttgcactgtggcccaagatacatcagttatccctcatgcacaggggatctcagtgaagctccagggatgtgaggtaccggagttcttgggccccagggcaggatgcagcccgctgggggttggactctgaaaatggtgccttgctgtagctacttaggaattaggaggtgtgtgggacccattgtgaactcctct

SEQ ID NO: 100988 - DNA, 448 bp, Homo sapiens
tttccagttttggcgagtagtactgctgtctgcctaactactcaagatacactatctgtaaactattcttggttattcctttccttcatgcctcttatgcaatagctattccccttggttttactatctaaactagtccttttctcgccattcatttctgttatcctactgtcttctaggccactaccttttatttggacaactgctataatctctcagctttttttctttcctctcttacccttctcaggtttattttttataaaaaatgaatggtctttaacagtgctattatggatctcctctgtttaaattctcccattgtcgcctgttaaaagaattcatactgcttaccaggccctacaagcctctcagtgatgtagcttctgcttaaatttccaaactctaattgctactctcagcatagctcccttgatcctttaacaaa

SEQ ID NO: 100989 - DNA, 1037 bp, Homo sapiens
gtgtgagccaccgtgtccagcctaattgctgaattatttctaagagagaatacaaattaagtatttttaaaaaggataagtgatccttgctttgaaagcaatggaaccactagaaggttttaaacagggaagacaatcaagtgtgtgctttaaagtaataccagaagcaccctggattctagtgaagtgatggaggtggtaagagtagatggagacgactagtagattgctacgaagtagtctgattagtgatttgggctgggttgggttgggttgggggagcaatatggaagtggagatgaagaagagttaatggaattgagtatttaggcattggaagtgacacaactaggtgatagattgatgtctgggtgaaaaggaggtaggagagagcatttttaaggcagactcctaggtttctgccttgagcacaactgaatagatggaaatgtggagatgacacgtaatgtggtgtagagatattgtatgctgagtttgagatgcttttgaaacagctagtcaaagatgctgcaaaggaaatcatgcaaatctgggcatgagaataggaacccagtaaatgagttgaccccactttagggggaatctaggacctagtgtaacctgtggtacatagtacacaattaattcttgtgtaattatttatcacagaaaatcaactcatattttgtatttaattatctttaatgtaggaattagtggtttccttttaatattatgaaagtgacatggcccggcgtgggggctcacacctgtaatcccagcactttgggaggctgaggtgggcggatcacgaggtcaggatatcaagaccatcctggcgaacacggtgaaaccccatctctactaaaagtacaaaaaaattagccgggcgtggtggcgggcgcctgtagtcccagctacttgggaggctgaggcaggagaatggcatgaacccgggaggcagagcttgcagtgagccgagattgcgccactgcactccaacctgggtgacagagagagactccgtcttaaaaaaa

SEQ ID NO: 100990 - DNA, 327 bp, Homo sapiens
gccattgcactccagcctgggcaattgagccagattctgtctcaaataaataaataaatgtggagaaaaaagtagaaggatgtatgataagaggcactgaagacccaactgctttgaaccattttatattaaaagtagtaacaataggcaaggtgcagtggctcatgcctgtgatttcagcactgtgagaggctgagttgggcaggctgcttgagcccaggagtttgagaccagccaatgcaacatggcaaaaccccatctctagtacaaaaattagatgggagtggtggagtgcacctgtagtcccagtcactcaggaggctaagg

SEQ ID NO: 100991 - DNA, 308 bp, Homo sapiens
actttctggtgttacatggaacctactctatcacttgtcaagcatgtactaccactagattccttgattaggtcaacgtcagacatgaattttattaactcatatagtgaaatttggtttccaggaggcttttcctagatgcgtgatccaagacaagttatttaacctctgaaacttagttttctcatctgtgaattagggaaaatagagcctaatttatagtactgtgaggattagagataatatttgtaaagcacttatcattctggcatgtagtcacaactcaaatcatcacaatgataatacta

SEQ ID NO: 100992 - DNA, 347 bp, Homo sapiens
agacaagttggcccaggccctgtgctttcccttgacagggatcctgccccttctcactgaatggtcacctctgctcaggtagtttgcccctttcctgccacctctgacctccagaggctatatgctatatgtatatgctaactgctctgtacacatcaagggagtgtgcttcctatctttttttttaaaaaataggtaaaagtattcatatagttcaaaaataaaaaatatataaaaaggtttaaattgagaattatgccccacccactacagtaactaattttataaatctcttgtgtatccttatagagtttctataggagaatataaacaaatactttttcttg

SEQ ID NO: 100993 - DNA, 227 bp, Homo sapiens
ttcttttacttccccatttgccctagcccaattgccagtacaatgttaaacagaagtggggatccttgtctggtccctgatcttagagggaagacatccagtcttttaccattaagtgtgatgttggctgtgggtttttcctagatatcaggttgaattcctctttattcctagtttgtagaatgtgtatgttttaaaaaaaatcataaagggtattggctctggtc

SEQ ID NO: 100994 - DNA, 276 bp, Homo sapiens
gggcggtctcctcctcctcctccaacccatttaatcaccatggtaactgttgtgggcgctgcttccaggataaggagactgaagcatttataatagcttggaagaagggtcagtggaaaaccaacactgccctagaaagtagacatttgaaccatgccctaggaagtagacatttgaaggggcaagggttcctagggaagcaaagactacgagtcttaattcttcacaagtgaaaatgtctctaagttggaaaacagaaattggctatgctccatc

SEQ ID NO: 100995 - DNA, 290 bp, Homo sapiens
tgagaagtcccattcatcctgcagcttccaggcctgggcgtgccccccttgttctcgggacaaagctcattgttccagctggagaagagctccgctgaggattgcctgcgtttggtttccgttctctcgctttgtgtaactttccagtgccttaagagttcctctttagcccttagggtgctgacgtaagtgtggtaaaacgtagatcctaaatgggctcctcttaaatggtgattcttcttccctttagacagtcaccggcatgctgctaggggaaggatatctgcaga

SEQ ID NO: 100996 - DNA, 648 bp, Homo sapiens
tgtgacacctgggctttcactgtgcccctcccactgcctaggtcctgatgcccatcacagccctttctgctgcggcctgggaccttcccctcccggtgctgcagggagctccgcactcacgcatttaggtcactaatgtgcagcgctggggagtgccctctgagcacccgagaaattactttggttatggaactgacaattgtttccttccttctactccttccttctgtttggctgacatttccctctcaaaccctctgacacagggttccatcaggagcaccgcacccctccacaaccctctgccacggaaggtgtgcgaatgccccatctcctcctcacaaccctgtggacccatggttaggccgtttctttaagtgaagaaactaagtctcataaaggctcggtcttgctggggtctcacagtcctcgcaggagctaggatctggactagggtccttgagctagtcgctcaccctctctgagcctcactttcctcccaggtaaaacgcatgtcacaatacaatggggaccaaatccttaggcgggacacaaagggacaggggcctgggaggccttttgagaagctctgagcagagctaggcgtgccccgatccggcttgaggagcccagctcctgttcctcccc

SEQ ID NO: 100997 - DNA, 131 bp, Homo sapiens
gtattggcagcaacatctaaaccacggtgatttcacatggacaagacagaaacacagtggttatgagtgcggttttttcatggggtcaagctgcttgggcttgaaactttactcccaacgaagttatttga

SEQ ID NO: 100998 - DNA, 108 bp, Homo sapiens
ggaacaaggacatatgaatggagtttctgcctcaaggagttttaaagttcagaataagaagtatgcttaataggccgggcacggtggctcacgcctgtaatcccagca

SEQ ID NO: 100999 - DNA, 561 bp, Homo sapiens
  misc_feature (50)..(50): n is a, c, g, or t
ggggccagcagcaggcctgcctttcggatagcaaataatagaaagaaatnccataattatgtcatataaaagatgcggccagaacactgcacgtggcacggcctgtgatccaaaatgcgtgcaggcatcgtcgttaacttttcttcagtcctctgaggaagtagaataccatttcgatttgttttaaactgtgagctcgtctctcttcaggaaggaaattgatcaaagaagcaaacactcctggatattttgtctgcttgattttcagcaatttactcctaattaattattctgactaggaaaaaaatggtacctctccaggatgccagtgtttagaattgacatttcaaatagctggttggacaaattggagaaattttctgatttctgtcatttgttaaatttgcttttaagtatccctcagggagctgtattcattccaagtgcggggaattaaagttgaatctccatgcaattgaattagcctgagccacagggatgggctgcagaagcctgctgaagcttacagggagattttacttaaagctaaagcttatttca

SEQ ID NO: 101000 - DNA, 425 bp, Homo sapiens
tcacttagaaaatcttctcaattcaatgtttatataaaaactttatttagattttattataactattttactttaaaatatatttagattctaattatttgtttttaaaagctacgccctaaatttcagtggttcacagaattttttttgttatagcactgcagctataaccttacacaagtaatttaactgtaatttttgaaactaaatggtttatcaattttttatccgtaaaattggggggataataatccatatattgatcaaaattaaatgagttaatacaaaactttaaatggttcctggactcttgcaagctctccgtatacccttattttactttatctttttactgctttttctcatcacttattacagcccatggcaaatacaatgcactcaataaatattgcttggtttgaata

SEQ ID NO: 101001 - DNA, 277 bp, Homo sapiens
atctgatgggaataatattctgaggatgccaaatattttgtcctcctcaatatcctggttcctagttgtccctcagttcctaggttaacagtctcacctgtctcacctgcaggcttaatgggggtctttcgtaatgtagaaaggatacccttttctttgtaaaggctgagcctgagggcttacaattccctggagaaggagagtaagacatacgggaactccctctgggagaagagggatatgccaggccaagagagggttggaaggagaagagaga

SEQ ID NO: 101002 - DNA, 489 bp, Homo sapiens
tagagggtcttattctggctccattactaatactctgtatggcattgggaaggtggatttacttctaaaaggcctgagttttatctttaaaattgatatttgccctacgtcagaagaccgttatgcagatcaaaattaaatagtatatgtggaaactttgaagagtttgtacaaatatttgatgtacaaataagaatttgcacaacttcaaagataatggatcttccaagagttgtacaaagagagctgcacaaatataagatgtcatctgtgtggaaatgggtcagtagaggcaggtgacctggtaagggttagattggggaacaaaagaagggatagaaagagagaggatggtgccatgaaaggagaacagaatgaggagagtgagcacccccagggcagcagttgtattcagtcagttcagcaaatacatacaagcatgtcctccattccaggcactgttctcgaagcttgggatgtatccatgaa

SEQ ID NO: 101003 - DNA, 110 bp, Homo sapiens
gtcatcctaattgtatttaaaaggggaatatatgtgcttgtgtgtgtaataacctacaatgttaaatcttctgatggtgtggcatttattttaatccctttcaccatttt

SEQ ID NO: 101004 - DNA, 695 bp, Homo sapiens
gtgtgtgtgtgtgtgtgtgtgtgtgtataggtgtatgggtaggtgagggattgtattcctttattggccacagaactaattatagcaaccttaatggcttaaagcaacagagtgggagaaaatataacaagaactcagagccgtaatatataaagagctcctacaaatcaataagatcaacaaccaaataaaaatatggacaaaaactatcaataggcaagtcccaaaataaaaatagttaataaatacaggaaaatatgcaccaacctatcaacaataattacagtagctactaatatttgttaacttcattctttgtgctagatatatcttaatctttatgacaacactgtaaggtaggtactattattgtacccatcttaaagacagaaaaactgaagcacagagcagttatttacccaaggtttaataactagtaacctgtgaactgtatcactcaatgaaatataaacttaaaacaataacattattttttacatatcagaatggtaaaaacgtttaaacatgatccccaggattcaaatgggcccttacacattcctggtaggaggtatgttgatttaacagttaaaatacacagactctttgagaaattcttctcagaacctcttcgcctgagacacatttgcacaaagacgcacatacaaggatgttcccgtatcgttgtaataata

SEQ ID NO: 101005 - DNA, 290 bp, Homo sapiens
aggtgatgaggacgtcactagcactagtgggtagaggcaagaatgctgctaaacatcctacaatgcacaggacggccccacaataaagaataattcagcccaaaataacacagccaaggctgagaatgggatccatctactggttctttaagctcaacagcacccgggcgatgaggcttcacttactcaagccaaccctcccaccaggaaaagccctcctagacacctggccatctagttccccgcagaagactcctttcttttctttttcttttttttttttttttgag

SEQ ID NO: 101006 - DNA, 246 bp, Homo sapiens
cattggtgtgttggaggggtagctgggaagtgagcagtgatggagcagaatgagcagaaggagggcatgagtccagaggggtcacaggccctgggagcatcctggggacatggattttattctgaagctgttggagagctttgagatgaaggagagtcatgattctatgcattaaggacaattctagttactgtgaggaaaacagggtttagggagacaagagtggaagctgagagactggttagg

SEQ ID NO: 101007 - DNA, 380 bp, Homo sapiens
tcctatcgagatgtacattcaaggtacatcagaactctcatttcttccccttcctttcctaaaccttctctcttcctttccccctttgccattcacctttactatcacctcccacctccattatcacctccccattgccacacaacctctccctgtagagaggcaggaggtccttcgaagctttgccccatgcgtcagatggcacctgaggcatataacctagggtgggctgcctttcaggatccgtcatcaaagggagtcaaacatagtcaagataccatctaccctgtacagctttcttgagacttgggggcctgggtcaaagagatttgtctgtcccttgctgcccatctttaagtaataaaccgacttcacataac

SEQ ID NO: 101008 - DNA, 905 bp, Homo sapiens
cctcctgagtaactgggactacaggcgcgtgccaccatgcccggctactttttgtattttttagtagagatggggtttcattatgttggccaggctggtcttgaactcctggcctcgtgatctgcccgcctcagcctcacaaagtgctgggattatacgtgtgagccaccgcgcctggcctatcgggggagttttcaataggccctaagggagtcaagtctgggtttctgagacaaagaaaaggttggaggggtcctggtgttcctggcctagatcaggcttgggctgcagccatgaaggtgctgtgatcaggggcagtggaggctgctggccccaaagggacacactctactgggcgtggttggggtttggtgacacaggcattgagaagtgacagcagatagtgcaaagtgtgcatgggtataacttctggagaagttcaggtaacatctatgcgaaggcacagattcttggtgttaacgagcatgcatattggcctgccatgtgattatatttgtatcatcaactcgcactcctggagttgggaatcatgtctttttacttaacacaggtaaggagccctgctcagggtgggaaacacagataatacttaacacgttttgggaaggagtaaagaagtgaaggccaggcgtggtagctcacgcctgtaatcccagcactttgggaggcagaggtgagcggatcacctgaggtccggagttcgagcccagcctgaccaacatggagaaaccccgtctctactaaaaatacaaaattagcagggcgtggtggtgcatgcttgtaatcccagctactcaggaggctgaggcaggagaatcgcttgaacctgggaggtggagattgcagtgagccgagattgtgccattgtctgggcaacaagagca

SEQ ID NO: 101009 - DNA, 295 bp, Homo sapiens
tcaaagatgggtggataaacaatgtgttccatccatatgatggaatattactcagccataaaaaggaagcaagcactggtccacactgcagtagggatgagccttgagtacgtgatgctgagtaagagaagccagacccaaaaggccacatagtgtgaattgcattgatatgaaatgcccagaacaggcaaatccataaagatggaagctgaaggaggacaaatggggagtggttgctaatgggtacaaatttttgggggaatcaaacatttgagagctagatagaggtgatggt

SEQ ID NO: 101010 - DNA, 373 bp, Homo sapiens
ggtctggggagctggaggggctctagtgagggttctgggagggtctggggttagtgtgggggggagcacaggatatacaggtgctaggaaagagcatggagtgacctgcagtgtgggagtcaggctgggtgtgcaggtggaggaacctggggtgttaggatctcagagtgtcaggtgctggtggaggtcctgggtagtatagaggggtaagggtgttaggatagaaactgggaaaaggtctgtgtcagaccaggtacaggagaagcttggtgagatatgggttcaggatcctggggtctggcatatctggctgaatatctgaagccagggccagcccaggtgggcccaggggaaacaaggccctaacttgcac

SEQ ID NO: 101011 - DNA, 327 bp, Homo sapiens
agagtaatttttccagaattttcctaggtgaagagagagcgtagcatctggagcttacgttgccagagtttgaattgagggcaaatcatttttctttttggtgcttcagaattctcagtgggaatgaacatgttagtaccaattttataaggttgatgtagagttaagtgactgagtacatgtaaagctcttgaaacagtttctgggtaaataatgttagctgctattagtttatacgatcattaatgttgtaatacacatctgaacacacctaccaaaagttcttcatttctgtggtaacctaccaaataaaatttaaactgctta

SEQ ID NO: 101012 - DNA, 177 bp, Homo sapiens
aacttcctcacagaatcaccccaaagacaaagcaactttattctttttgttttgtttttgttttttaacccaacagggtttactgtttcccagtaagtgcagtggcaagatcatggctcactgcagactagactcagatgatcttcccacctcagcctcccgagtagcagctgagac

SEQ ID NO: 101013 - DNA, 266 bp, Homo sapiens
tgcttcatcagaggcgctactgtgtgaggaggaaccttcccatgcacagaaggccacatgcatgttcacagctcaacacccagtcacatcgcagcacacacacccacagtcacacagagccacgccaatcactgagtcacacaggcctgctcactgtgcatataaagatgctcatgcactggtatggctgtgttcacactcacacatcacagtcatgaagacaaagcacaatcacccccttacattcactcacacactcccccatc

SEQ ID NO: 101014 - DNA, 283 bp, Homo sapiens
agaggacctgtgtgtccacaggttggctttgacatgacatgtcatgacacgagatgacacaaagcagcagctgagtgcccactgtgcagtagtgaatgtcctgtcaacagagggcgtttactgaagatttgaggatggaggaggagctgaggcttgcatcataggaaggcaacagcttcagaacctgactctattctcagagtaccctcctacttgcctgcaccctcccaggggaccttccctgggggtcactatactggtccagcctctgtccatcatgcta

SEQ ID NO: 101015 - DNA, 435 bp, Homo sapiens
agggtggagcccagataggggagtgacgctgaagtgaggggagagtgggcagtcctgggtgtcgtggggtggggacttggttactagggtgaccaactgccccactttgtcccggacagaggggtttcccaggatgcaggactttcagtgctaaaaccagaacagttggtcaccctatctgtcaccaaacacctcggccgccgccagcctcgagagggcagggatgtttgcctgtcttgttccttgcggtattttcagcacctggaacagggcctggccctcagcgggcgctcggcaaaggtctgtggcatgaatgaaggcaccaggcactggctggcctcatcctaccccaggggtaggggcaggatggagtggcagaagcccactgtctccttctgtggtagggaaaggggttcatggcgggcgcagtggctc

SEQ ID NO: 101016 - DNA, 900 bp, Homo sapiens
cccagaggctgccaaattgtcatctgagccggaccgggtttcggcggccgcgctttatagtcgctggagcctggtgacctattccagggctacaagactgcctcggcaaacagcccaaggatgttcggttatctcgccttgagggttcgcgcgtcacgtgccccccccgtcccccgcttgtttttcagtttaaaagtggggcccgtgtctgcaggactctaggagctgcgggcccacccattcactgatgttaccctctcctgtcatttctcctttgtgaagggcactgaaaatcttgagttttcttgggaaagagaagacatcaaacaggcatatgaggtagaggataataaagaatattacctccttttcaagtaccttgatttttttgaagttttctcgaagttggtttaccagtttcacaataacacagagcaactagaagatcaaaattccttgtatgagggaagagtatctgtggaccaggctgaaatttctgaggggactctatcacttttactaagaaatgtggatttcatggatgaagctatctacaagtgctcagccatcacaccagatggaagaggtgaaagtacaattaagctaatagtagaagactctgaaatgccccaggtgcaatttgacaggattgatgatgaggatgtggccacatgcatctcaaaggactagtacctcacgcccattgtgacatggctggaccggacagagagggacctgagcaaccacagcatcgtggaaatcctggaggagcagatgaatggcttctacagggtgttctccatcctgaaataccctgtcaagttaaatgagaaatatctctgccacataacagagacagatgtgaacaaccagctcttcagaatcatccacaagtatcca

SEQ ID NO: 101017 - DNA, 335 bp, Homo sapiens
ggaactcagaggccggtgctggcgcgggtcctccgtatgctgaatgccagtcccctgggcccatttttctttctctatactttgtctctgtgtcttttcttttccaagtctctcgttccgcctaacaagaaacacccacaagtgtggaggggcaacccatcccttcattatgtgagacactggaaacaagttatattttcctaattccataaatgtctgtcagaagagagacttttctgctgagagttggggcaatgctgtgggtgggcacggtggtgctaggtgtatagataaaatgtccactaatgcaggatagtttatgtgtaatgtggagg

SEQ ID NO: 101018 - DNA, 246 bp, Homo sapiens
ttatctgattaaactgtagagtttataattatataaattttttttagcacatagaacagtcattctctatagcaaaagtactagcttttgtgccctttgcattggattgagttatagagctaaaccacagcaaactcatttgttccactcttaggttgcaagtatcacttaactgtgcttacttatctcatcttcaatatttacaaattttaactcacatttgtttcagtaaagcaacccaaagta

SEQ ID NO: 101019 - DNA, 304 bp, Homo sapiens
agtaatcaaaagcactagtttttaatttaaaggttgtttaaagcatacagaatatccatttcatacaactgtattagtttatcagtgagtaacaaggccagagataaatacatttaatccagacaatgcaatgccaacatttcatcaggacaattaactattggagttttaatctccactgtgtcctctaatccatcctgttaagaattgctaaataacaacaacaacaaaagggtcagaaaaaaaaaagaaggcaaggaggtataaaagtacagatgatacaaaggacagagattatgccata

SEQ ID NO: 101020 - DNA, 653 bp, Homo sapiens
caaaatttttagaggctgaatgccagctgttggcttaatccatatgttttcatgaaaccattgtgttcatctgttttctcccgggtgaagggttagttgttggattcagctttatatatttggaaataagaaatcaagtgagggactgtaggaaaacgtagagcagctcctggttttgcgaggttgttagaggccagccggcacagaaatgttcgtattcttcccaggagctaagatattcatcatgagctctttgagccaggtttccatcatctgtgaaatacagaaatgatgcttactgtgttctagctccccttaaggattaaaccatttaacagatctcactgatgcagaaatttcttcttcacattttaatatctctgaaatcggaatatacttttcattgaataatgtttgaaaattgttggatttttttcccccatatttgaacatcactgagattgggctgagtcttaaaatcattggtgtctgacttcatgaaataaggtaattatgggagccgcattggtcttaggtgtatactaaatgttagtaacctttttccgtaataactaagaaaaaaatgttgatacaaacatcactatgtgaaagaaaggctcacaggtgtgagaagaacagggaggctgggttct

SEQ ID NO: 101021 - DNA, 984 bp, Homo sapiens
ggggaggagaggaggaggtatttggtgacactcgccatcaggactttgcagctctcttgccagatagcagctgaattgaagagctaaaatacaaacaagagagcaataacgatctttgcgtggataatagctaaacctgaatagaagcttccagggccctaatacacagccaaggaaagctaacagtcatgattcaataaaggtgccttgtaaggcatgtgccagacagaaaggagacaccatatctgtgtaatctacagacactgctttaaacatcacataattaagtccttcccatggtggtggctacttgaagctttatcattagcttgtaagatttcatctctgggtttcaccgatggttctgagaatgaacattttcaaaccagaggcacctgctaatccaggagacatactcaccacgcctattctcgtcctccagtgaaagaagctctatgttaaatgactgaagggaaacagaagggaatatgtaacaaaatatatacaggagcagccccggggtggctttccatgctgagtgttctattacattaatcctggcacacaaaaaatgcgacagccacatggatatcaatatgcctgcattgtttgtcttccatcggccctctctgtacacaggcatgcattccctcgagcaagatcagcgtgagaagtgattccttcacctggcacgaactgaatagcaaaagaaaaccgaaggcagaattccgggagtgtccaaggtggtgttttgtcgtaaaagcatgttgtgccccaaccccggagattttgaggttggtgtgaacgccgaacctacgggcttattccggaacaatagctgctgtgcggcattttgaatgaacacggtcccccttaaatattcggggggggggcgaaacaaagatttggctctagacttcggcaaaagacgctcgcttgcgagaaagcacatgacagcgacacattttgtgaggacaacaccag

SEQ ID NO: 101022 - DNA, 255 bp, Homo sapiens
gtcagggaaaagcaaaaccatgatgagatactcactagaatggctaaaattaaaaataccgacaatagccagttcagccgaggataccaggaattctggcgttcaagggtgctggtaggaacgtgaaatgactgccactctgtaaaacagtttggcaatttctcatgaaattaaacacatactaaccatatgacctagtgacccattcctaggtctttagccaagtgtagtaggctaaaaaatgggcctccaaaa

SEQ ID NO: 101023 - DNA, 448 bp, Homo sapiens
gggcataccaggagtggccagaatgcctgggcttaatgaaattcttagtgatccagaggttcttacagccatgcaggatccagaagttatggtggccttccaggatgtggctcagaacccagcaaatatatcaaaataccagagcaacccaaaggttatgaatcttatcagtaaattgtgagccaaatttggaggtcaagcataatgcccttctgataaataaagcccttgctgaaggaaaagcaaccaagatcaccttacagatgtcacaataatacaaaccagtgtacctctgaccttctcatcaaaagatctggggtgctttgaagataattcctacccctctccctcaaatgcagctgaaacattttacagtggtttgccattagggtattcattcagataatgttttcctactaggaattacaaacttcaaacaccttttaaa

SEQ ID NO: 101024 - DNA, 301 bp, Homo sapiens
agtaccgtaaccatacaaaaacacccttatcatttagggcatagggctagtacaagaccttagtttctaggagctgaccaagggccagtctaacccagctgaccaagcaggcctgtctgagaatgtgcatcatttgagcaactcaggcctgctgggttaactgcttacaccattttccttcccctcctctcccttgccttcgccactcttaacctggaaaaagcactaatttgtcctccatatctgtagttttgtcatttggaaaggttgtagaaatcctagagtatgtgaccttttaaga

SEQ ID NO: 101025 - DNA, 393 bp, Homo sapiens
ttcccaaagtggttgtaacattttacactcctactaacagtgcatgggaagccagtttctctatatcctctccaacatttggtgctgtcaatcttttaaaattttagccatttttgtggttgtatagtgttatctcattgcagttttaatttgccgatccctgaatgtgtgtaggtgtgtatatgtattatataatatatatattattctttcacttattttgaagtaatttcaaagtttccagaataatatcaagaactcctgtactcccttcgccagattctccaattgtaacgttttattgcatatgctccattgcccattctctctctacttatagctgcattagtgtttttctgaacctttagagatgaaggtgaaaaaagatgcgat

SEQ ID NO: 101026 - DNA, 995 bp, Homo sapiens
  misc_feature (371)..(371): n is a, c, g, or t
  misc_feature (752)..(752): n is a, c, g, or t
  misc_feature (755)..(755): n is a, c, g, or t
  misc_feature (757)..(757): n is a, c, g, or t
  misc_feature (762)..(762): n is a, c, g, or t
  misc_feature (773)..(773): n is a, c, g, or t
  misc_feature (778)..(778): n is a, c, g, or t
  misc_feature (794)..(796): n is a, c, g, or t
  misc_feature (799)..(799): n is a, c, g, or t
  misc_feature (809)..(809): n is a, c, g, or t
  misc_feature (818)..(818): n is a, c, g, or t
  misc_feature (820)..(820): n is a, c, g, or t
  misc_feature (952)..(952): n is a, c, g, or t
agcggacggtgtcggggagtgtttacttcgcctccacttctgttcctccccgccctggtgctgctccaggtcacatactcttcctgagccggcttcagcctctccgcgcagaagtctcccggagccatggcctagtattcttatgtgaagtctaccaagcttgtgctcaagggaaccgagattgcctgaggttgactgtacatgcaaatattgagctttcctcctggcctccgtgataaacagaagtttgatatgttaggcgagatggaaagaaagtatcaaggagtgagctgaagccactgcccttgagaaccctctcgaggagtctggcctcatgaagatgccagaataaatggcagtaagaagaaaangagcaaagataagaagagaaaaagagaagatgaagaaacccagcttgatatgtgaggaacgcagctgctcaccagcaacggaacaaagctggacggagaatgactttgaagagctgagagaaggcttcagacgatcaaattactctgagctacgggaggacattcaaaccaaaggcaaagaagttgaaaactttgaaaaaaatacaatgtacattaattaacgtggaatctggtgaacagtaacaaactttggtgaaatttcaggaaccatagccattgaagtggatgagggaacctatatacatgcactcaacaatggtctttttaccctgggagctccacacaaagaagaatcgccctgaaacctggctatggaaatanctnantatanattcagatganctgtngtggcgtcagatgcannnggnccagagaacnagggaaccngncttcacaactgaggcatccagtagaagatgaaagctcagataagggcacatatgaggagtcggaactgattggcacagacaaggatccggcacacaccaagaggacagggtgaatagaagagaataaatcgnagaaggaaagacgaatgagcggaaacgagacaggcagcacgat

SEQ ID NO: 101027 - DNA, 337 bp, Homo sapiens
tatgtgacctgtattaactgagaccctttagtttgtaaatagctgatttatgccaattggggaaattaactgcttctcttaactagaaggtctagcttccattaacatagactaagaggttccaacaatgtctgcaaatcttggtctctctctgtcccttgatggttttctctgagccagtgttgttttaagtaggctctccctgggggtggtaaggagcttctggcatcctcaagttcaaatcctcacagttcagcaatcccaggacaaagagaatttctctttcttggggctacagcaaaagattcctcaagggctctcagtcgagtcatttggg

SEQ ID NO: 101028 - DNA, 133 bp, Homo sapiens
ggtcatcaccttcaggaccacaatgcctggtagggcaaggactcgcgcccgaggcagagcccgccgcagggagagctaccaacaagaggcacctgggggacccagagcacctggatcagctacagtgagccct

SEQ ID NO: 101029 - DNA, 266 bp, Homo sapiens
gccaatgtctcacgaacacttaatccatttgctctgcttctgtctggtaactatattcaaggctgccatatactgttccgcaggtcgtgcactgcacaaaggcacgatctctgagagcattcacatcctacacataatggtgtatttattacaatagtttagttttccagcagatggcagtaaagcatccagcatgttataacttccctacaggaagtgttttaggggacgcctttttttctaatttgctcaaaggtgccccaggg

SEQ ID NO: 101030 - DNA, 462 bp, Homo sapiens
acttctgtatgcgtcgaccttctgctctgggtcgaccttctgctctgggtcgaccttctgttctgggtcgaccttctgctctgggtcgaccttctgctccgggtcgaccttctgctctgggtcgaccttctgctctgggtcgacctatctgtctgagtagaccttctgcactgggccacatccatcttcttcattgtcagaatctgagttttctgtcttgaagaacagctggaaagttgtctggctgttatgacacagtattgaaataccagactgagtttcagttgtttctagttgtgttcactttgtgctttctctgaatgggaatatcttctttcagcaaagttcttcattgaccaggaaaccaaagattgcttcttttccaagtttgttttgtttttaatcttttaccaatgtgcagtatatcttaagaagggaagagtgctcttgggagtagaagaa

SEQ ID NO: 101031 - DNA, 411 bp, Homo sapiens
tctgtacttcacctatagtgcctagcaaattgttatcactcataagcctgtaatcttcatcactcaggttatttgcaagtagaaagcttctggaaccatttgtccatccgacttctgcactgggccacatccatcttcttcattgtcagaatctgagttttctgtcttgaagaacagctggaaagttgtctggctgttatgacacagtattgaaataccagactgagtttcagttgtttctagttgtgttcactttgtgctttctctgaatgggaatatcttctttcagcaaagttcttcattgaccaggaaaccaaagattgcttcttttccaagtttgttttgtttttaatcttttaccaatgtgcagtatatcttaagaagggaagagtgctcttgggagtagaagaa

SEQ ID NO: 101032 - DNA, 928 bp, Homo sapiens
ggctgaacacggtgcgcttcacctcggagttcccactccactccaaggatccaacagcgcacaagctgctcttcacgggcaactacctctgcaagcttcacccccggccccgccacgccccgcagggttccctgtctggtctggatcacctcgctctccctgcgcctctctccttggcctagctagacaagtgcttctcacgatccagcgcgtttaccgctcggtttcgtcgccgctaaggggtggtggtgtctgatccgtcaggctctgcgcttctctctcggatccatcctcaatgtccaggcaggactctcacatgaagccggtgctgtctgctgttcactctaagatgtccagccactcaggacagttacgatctgtcatccagggcccaaaccgactctcctctattgctatctgaggtaggcagtctcctctgtgaggtcggtcccatccatactgcctagatccctgcgcaggaagactgagatgaggaccctaggagacagcagccagggatagcgaaggtggaggatgagtataaatagcgaccccagcgcgatcagagaagctcccttacccccaccatcgcagtgggagtgagtcttcagatctacccccaagacaacgaaatcctacccgggccattgaagggaaacctccactccaacccccagaagacgccttagatgagaaagtgaagagatattgtatgagctcattcatcaaaggccatgccatcaccagctcaggcagtgctgctagggggattcctgcctctctggagggtccagttctctctgaagaccgagaagatgcagggaggaagggtttcaaacaggaactctcaacccacgtctgccagttgtagactctgtaaacaaagttccaactcgcccgctgctgccactgccgctgctattttttg

SEQ ID NO: 101033 - DNA, 413 bp, Homo sapiens
tctcgagcctgacttaccagcctgctgggaaccctcccagaacccagcgtgtggtatgatggggcctgcctaccctccatgactgcaaccctacactaccaaagcctctgcaggctgagttgacttcctgaagttggcaggaataggggtggattatggagcaagatggagcctggccctgttgaattcagtgaagcaggctagggcagctcaaggcagagaagaagcttggagagccctggctcccaacttcaccttcaaaccctgggtcatcccctgtggcagagactacttgttgcctcttaatattcattctcctattcttacacagtaattgaatttgtagctggctccctagctaaagattacatttctcagactcccttgcagctacatgtggtcacatgactgac

SEQ ID NO: 101034 - DNA, 501 bp, Homo sapiens
taatgaaccctcctttgaatgttccttgtaaatactcagtgttcacaagagaatgctctctgaaaaacaaaactacagaacgcaagaggtctgatctctgttttagcagagataatatggtagtcatactgaaggggcccctccacatacgcagatggaaggcggaacgtgacgtagcaggaggatgtgaccctgacccactgttgactcctgcaaggtgattcctggtgattctttcttgtgttttaaaactgcctgattcacatcttcctctggaacccaatgtaatagagattgttgctgttgttgcttctagagagtctttgaaggaagctagacctgaacaaattctaactaaagacaaagcagttcctggtttctcccttttgaggtcttctgggagataggagcagttcttctagaggatgagagacattgaaaagatgagattatgaccagaaagcagaaagtaatcacaatacttagtaggaactttgttgg

SEQ ID NO: 101035 - DNA, 731 bp, Homo sapiens
aaattattctattctttaaaaaaaaaaaaaaaagagaaaaaaactagagacagggttttgcctggtctcaaactcctgggctcaagcaatcctcctgcctcagcctcccaaagtgctggaattacaggcataagccactgtgcccagcacaaaatgctcattattaatgcagtaatttctaatcttacatctctggaggtctagttttcagatgcctcaatagctgaatctcaaaatgaaaattaaaaagcagagaaatctcctgtaatcgtagtgctttgggaagcccaggtgggaggactgcttgaggccaggagtttgagatcagcctgggcaaatagtgagaccccatttctaccacacacacatacacacacacacacaaaaattaggtggacatggtgttatgcacctgtggtcccagctacttgggagtctgaggcaggaaaatagcgtgagcccaggagttcgaggctgcagtgagctatgaacagaccactgcactccagcccaactgacagagtgagactctgtctctgaaaaaaaaaaaaaaaaagaaagaaagaaaaagcagagaaatcattctaacaaagcacttgcacactgccctgtgggagaggaaggaaagccactgtcctggagtctaggggtgagggctgcaggtgggacttctgacagcacaggcaaggcaatggagcacagtggtctctagtctggggtgtgtgtgtaag

SEQ ID NO: 101036 - DNA, 386 bp, Homo sapiens
gaactttactgaaagaagacaacagcatcgtgtttatctgttttgttaattcttgaccttagattccagcttgattttggctgtaccttaatagcttgctgtcgtttctcatgtaaccctgcattaaacttaactcctggctgggcgccatggctcacgcctgtaatctcagcactttgggaggccaaagcagatggatcacctgagatcaggagttcgagaccagcctggccaacatggtgaaaccctgtgtctactaaaaatacaaaaaattaggcgggcatggtggcgtgtgcctgtaatcccagctacttgggaggctgaggcaggagaattgtttgaacccgggaggcagaggtttcactgagccaagattgcggctactg

SEQ ID NO: 101037 - DNA, 275 bp, Homo sapiens
tgccaaatatatatatctgaacatagtgaaaaagtaacatttaaaatcagtcaaattatttttaaaattcctttgcttaatagccattacttactcaccttttgtttttgttttttccttcaactactagagtactgtacttttgctttcattccttctatacattctgccttcatccttaaattgttcaactcgatagtgctaatattggtagataatctacgctagctgctgtttcttgtacagaagttggttgatatcgctgattcactttt

SEQ ID NO: 101038 - DNA, 860 bp, Homo sapiens
tttttttttagaagaaaggcagcttggaatctgtataaatgaaagagagagatagaatgggtaaaaatgattgatggaagaattttgacctactgggtttgaggtaggaggggaaaacagaagggtgctcttctctgaaggtgtaaagataaatttagagcggacagagcagcaaagagttgaaaagtttttgtctgttggccttcaatttatccatgaaggaaggagcaacgttatctgctacaaggacggaggtggcggggaaagtctggactggtttttaggagacaaggggtggggggtgagggaaagactatagataagaggacaaacagaaggtctgctttcgcagatctactatggtcgaaaattattttttctttcctcccctctatcccttcctaacctaagcttgtcgcaaaaaaggcttcaagctgccaaatccaaatttttccaccaatataccccgatactagttttttctccaaaaacaacgggcaactaacacgcagggcagagaaaacaaacagttgccccaggcttccttcgttcgaatagtgaagactgagctggcctcggcactgtgcagactcccaacctgtgctactgtgggttattctccttatagtgcagtcacctcctaaatgcttgctgaaaataatggaagacttcgagccagatgtttgcctcttaagtaacgtcccccaaaagatgcagcacatatttaaggcctgctgaagcaagcaacgctgacggaccaggttattgcgtttttctctcgctgcgtgtccggacgccacactatgagcattaagcgcatactgaccaatttctgttaagcaggaacgtggtgttctgat

SEQ ID NO: 101039 - DNA, 516 bp, Homo sapiens
tttttttttagaagaaaggcagcttggaatctgtataaatgaaagagagagatagaatgggtaaaaatgattgatggaagaattttgacctactgggtttgaggtaggaggggaaaacagaagggtgctcttctctgaaggtgtaaagataaatttagagcggacagagcagcaaagagttgaaaagtttttgtctgttggccttcaatttatccatgaaggaaggagcaacgttatctgctacaaggacggaggtggcggggaaagtctggactggtttttaggagacaaggggtggggggtgagggaaagactatagataagaggacaaacagaaggtctgctttcgcagatctactatggtcgaaaattattttttctttcctcccctctatcccttcctaacctaagcttgtcgcaaaaaaggcttcaagctgccaaatccaaatttttccaccaatataccccgatactagtttttgtcgagcggccgctaatttagtagtagtagtaggc

SEQ ID NO: 101040 - DNA, 574 bp, Homo sapiens
gtagagggcacagtatcccgaaccatctaacggggcccgactcaccctcaccatgcaccaggccagttatggtttctttctgtgtcttatttccccctccatcaaatgagagttattgtagaaaccttatagtgctgtgttgggattagcagtaaacagtttggcatgtggtagatgctcgggaaatggaagctgcccttttttcctaatgggaaagaagggattttgtttttgagacaattcccttcctctgctgctgcatagggacacctgggtgcctttctaaaattagaccagggcatggtggcttgctcgtaatcccagtgttttgagaggccaaggcgggaagatcacttgaggccaggagtttgagaccagcctgggcaacctagtgagactccgtctctataaaaaaataaaattagctggatgtggtagtgcacgcctgtagtcccagctattcaggaggctgagtcaggaagattgcttgagccccaggagtttgaggcaatggtgagccatgttcatgccactgcactccagcctagccaacagagcaagaccccgtctcata

SEQ ID NO: 101041 - DNA, 171 bp, Homo sapiens
gtaagtacactctaggatgttcatacaatgatgaaattacctaacaatacatttcttagaacatatccctgtcattaagcaatgcatgactatattaagaaacatgtacttacagaagtgatacgtcttaagaaaagacaataaaaatccattttaactaactttttggtc

SEQ ID NO: 101042 - DNA, 217 bp, Homo sapiens
tacttacatggtaatcagcacctgccccttccttcgcaaatacattcccacttttttaggatttattatttcacccagccgtgtgcatcatggaaagctgacctcatcccaagctccaggaaataaaaccctgatgatttgaagccattcttccttactatgattggcttaggagtgggcaggtagcccagttctgaccaacaatatgtgagtcagc

SEQ ID NO: 101043 - DNA, 136 bp, Homo sapiens
acttgaagttcctggcacggctggcaagatttggggcaggcgagtgggtgagcatgctgagcagcagcagaacagcagggggtccagctctgtccacccctaatttctcaggctgaccccaagcccccaggaccag

SEQ ID NO: 101044 - DNA, 249 bp, Homo sapiens
ttttgcaaatactgtatatgccactaaggcacggaataataagacgttagtaattcaatattcaaacagataattgtatgcccatgtctatattagcctcataaataatttcattagtagtgtgtcattggaaagaagaattgcaaacagatttttcataagagaatatggtgaagaatgaaatctctctaatgatactcatatgaaactttagtattgttgtgtaagttgggatctcagtattattca

SEQ ID NO: 101045 - DNA, 729 bp, Homo sapiens
aaattatagaggtccttctgtgagtccaaaggagaaggaagtggttggggcagccagaaaggtgcaatctgcattaatatcatattcgatgtatggattgctggggagagagtgggatatatttcttataatgttggatgtatttttcccctatcctgaggcccagaaactctgatgtctctgcagttgtctttccatgctttcctttatacccctcgcctacttctgtaatttctctctctactctccctcctccttcccaccctttttctttccatttgtgctctctccctccattccttctttttcccttttctttctttttgtgggtatctggtagctgcaacttattttctttctgcttttcttactcacttactctatttactaggtatttaacaattgtctttaaaagtaacatcctttctttcttaaaattttatccctaatggacattatttggggaaaaaacatttttatggtgcctctagataagtaattatatcatctgcacatgattcccgtattttcttacatgcccgttcctcgtaggtggaaatgggtacttcattgtactcttctctctttatttacaagagtgttttttctgtctcatccctttaaataacacattgtctctctttttgtgacattgaattaattaggtcagatgcgatttttctcatctattcatttgaagactgtttcatattgcttctagggcctatt

SEQ ID NO: 101046 - DNA, 700 bp, Homo sapiens
cactccaaccccagagtattaaaaagaaaaacaaaaaacaacaacaaaaaaatcaaacctgaactaatgaacaatctggtgttatataacttactttgagggcatgtaaagacaaatgtatctcaaaattctagtgttaaacaaacaaaaaaaccacctgtgactctggtcagcatacacaataccctaaagccacaacaaataatacaatttcaggatccagtgtttgtaaaggaccctggatcctgaaaaggagacttacttccttaaaactttctttattaaatttttaaatgtgattatatttatatagtaagcactggtatacttgtgaagtcagaggcctcaaattttaactagataccaattattcctttgttaacagttggttcttttcatataaccaatgaagtattgaaaatcaggtgttatttacagcatatgaacattactaattctaagtaaagttcagacagagtttagagaactgatcaaatactcgtaacaataaccacttccaaaataaaggcagcatttactggatgcttatgttgcaccagccactgttcctttaaccacttttcatgcattaactcaaataatgctcataatgtttaggagaaaagtattattcctattagaccaaagaattaaactcatcttggccaaagccaaagcaagaaaaccacagctagaatcc

SEQ ID NO: 101047 - DNA, 901 bp, Homo sapiens
aagccagttggaaggagcgcttcaagagcccggcttctcaggcctcacatcctgccgcagacccaccgcaggtggcactatgaaaaggatgcggcattaacagtgggcgctgcggcaggttgcaaaatccagcggttccgtcgcaggtacagactgcatggctaccacaccggctgcggaggctttgcacttgagaagtgagggcaccttcctgcatgaagtgtttgattgtttatgatcctgggaaagtcaggtttccttgccacagagctgaaatttgccacagagctgaaagcacatgatcactttggggtattaagactgcagggtgggccgttcgcaccatggctcacgcctgtaatcccagcgctttgggaggtggacgtggaaggatcgcctgaagcctggaggtcaaggctgcagtgagctataatttcaccaccgcactccagtctgggtgacagagaccctgtctcgaaaaaataaaaataaaaaaactgcaaggtgaccgcagctcactacatcctggccggggactgggctgtctggaccccccagctcctcccaaagctgggctccttcccattcatccttcacgggagccaaagagagcttttaaaactgcaaagcgcttaatgcaacgtgggctcctggaaaagaaagcagacgtttgtggagtgcagtctggagtttagttgggagtaaagaacaaatgttggcttcttagttttgacaaatgtaccacggtaacggtaagatgttagcaatgggagaaactaggggacgggtatacaggaactgtctgtactatctttgtaactttcctgaaaatctaaaattattccaaagtaaaaagtttattttgtaaaaaaaaaaaaaaccccgcaaagcaggtcacatc

SEQ ID NO: 101048 - DNA, 450 bp, Homo sapiens
aaccaatgcgtaggcatcttgcattattttcttgacagtgtaatttatattttccccagtaaagggttattttggtcaggcatatttgcaaagtgctgatattcaactttgctctggggtttttaatgttaaaaatgtgtatttattcatcaagtgtttattgagcctcttgctgtgttccaggccttgttcaaagctctgggcatctagcaatgagtaagatagtcaagatctgtgctctgtccacgttctcttggagcttacattttaagagtaagaaacaatttaacagatgataaatgcaatgaacaaaaatgtaacagaatgtaatagagatgggggtgggatgaacccactacttttgggttggtggtcatggaaggaaagcttttccaagcatttgaaccaagttgcagatgacaggacagagccaaccatgccatgatttgg

SEQ ID NO: 101049 - DNA, 399 bp, Homo sapiens
aagatgtggcaggctcaggtctgctagataaggagacttgactctggaaggaaaaagtaactaaggattgattttcaaaactgagcaaccagctgaggtttttgaggcgaacagcatgttgaaggcagctgatgaaatgtgaggtttacttactccttgtccttacagggactgcgtcatggtgactccaggcccggggactggaggggaatgtagcgtcctcgtccctccctcacctgggcgagtttccagtgcttattcactgttttccttctggccgtttattcacgaaacgtggaggagtatcatacataatacaaccctatttaccttgtcttataccccatttcctagccatagagtaactcaaggccgttcgcttgtttgaagatcctttaa

SEQ ID NO: 101050 - DNA, 278 bp, Homo sapiens
ggggaaagaagggaacggtagaccaggcagagggaactgcatgataaaaggtttatgggtgtgaaaattcatggaatgtttgaggattatggggttgggggatgtgggaatatgtgtagcgataaagcaccaaacaaagccaaaagtttagttagagccctgaatgcctgcctcataatggtttccatattttatatgcctactatgtgccaggcacattgctcagggtcacacagctggaaatggcagggctgagtttttgttgttgttgttgttgt

SEQ ID NO: 101051 - DNA, 545 bp, Homo sapiens
tgtggaatcccagagacctgggactgattctggtgccgtgtgttgccatttgtgcgactttggcaaattacccagccacccagagtatcacatttgtgactggagacgttagcggcttctgtgaaggatgaggggtcactgccagggttgcctgggtggactgttggatgagctgccggaaccagctgccctggtacttgcccggtacttgctgaaggggatgggggttctggatccaggtgcacccctctcaggatgcccctgatgggcctcgggactctcagccctcaagtatggggtcagcacgctcaggggaagctataaatcactcctcattctagccgcctggctccaggatgtttgtacaggtgcccctccctctactccccagccggctgtctgggtccactgccggcaaggtgtgccaccacgtcccatgtactcagagaccccagcggactctctgtgcagacggggcatgttagcattgcagggacgtgccctctggggtggacactgtccaccagatcggcagaggttggggg

SEQ ID NO: 101052 - DNA, 318 bp, Homo sapiens
gatttatgcatggctggagtgcatggccggagtgcatggctggagtgcaatgagcggagtgcagtggctcacacctgtaatcccagcactttggtaggctgaggcgggtggatcatgaggtcaggagatcaagaccatagtggctaacacggtgaaaccccgtctctactaaaatataaaaaattagctgggtgtggtggcacgtacctgtaatcccagctgctcaggaggctgaggcagggcaattgcctgaacccgggaggcggaggttgcagtgagccgagatcgtgccactgcactccagcttggtgacagagt

SEQ ID NO: 101053 - DNA, 403 bp, Homo sapiens
gacccttttcacttagccctcttgggtttgcaacatgctttctctctcaccttctcattgaatgagaaaaaacagcccagccattttttgcaaacagcaaagcaccagagtgatgatggctttgctcatctcacttgactttcacagtaactcagtttgatgtaggcagtccaggcattattattttcattttacagatgatgcaactgaggctcagtgtggtgaaacatttggctcatagccacacagctgataagcatcagggacttggacctaggccttcacatttcaagtcagctgtatctgtccccaagccccaccagacttcatgtgaaggtggctgcttctgggtgatggtggctggagaggcagactttgaggctgccatgctcttatttcagat

SEQ ID NO: 101054 - DNA, 231 bp, Homo sapiens
ggaggaggacgacgtccctcctgaagagaagaggctgcggctgttgctggaggggggaagcgcacagcccgaggactgcgaggacggggaggacgcgctgcggccgggcaaggaggacaccggcacccagacaggtggcgacggcagaggaggtgcctcaaactgctgcccttaaaacacgtgtaagagaatcatccaggcggcttgctcgctctgcatgcatacccttta

SEQ ID NO: 101055 - DNA, 281 bp, Homo sapiens
cacgtgactatctacattgtaatggtcaaataaggtggataatttgcccatggttgtatagctgctgagtggcagaatgaaaccccatctcccatacatcctgctgcccctgggttcaagcctggtgacaaatgtcagcgtcagtgttgagtgtgcctgggagggtgggagtgaggcttctaacctaggtgcctacctgagtcaacaaaatgcactaaaaaaagaggtaggacagtaccaagctagagaacaacaaattttcctgttttaatgtttcatgg

SEQ ID NO: 101056 - DNA, 691 bp, Homo sapiens
aacagaacgaggccggcattttctaaagcgtccttgaggagtccagttcctaaaagattatttcagagtccactgttgtgggctgacttgaatgctctcaaaattcgtaagttgaagccctgacccccaggacctcagaacgtgactgtgcttggacacagggactttccagaggtgattaaggtgaagtgaggtcactggatggccctcctcctatctgactggtgtcctgatggggacgcggacacccacacaggaacggacccggggagaacaacacatcgtctctgcgccagggagagaggcgtccggggaacccagccgtgcccacgcatttatctccgccttccggctcagaattgtgaggaaacccgcttctgttgtgcaagtcccgggtctgtggtgctcggccatggcgcccccagaactgcatccccaccttctgctctgagccacccatcccctctggaagggctgagcttctctccctttccaccttctgttctgagccacccgtcccctccagaagggctgagcttctctctctttcactgcctatgctctgggaaactttcagaatccccaggctgtttctggaatagtctgggatggtcattttcggtcctcacagaaccgggggtttggaaagtaggtgaagccatatgggttgcagagaatctggcccagcccc

SEQ ID NO: 101057 - DNA, 340 bp, Homo sapiens
gcggccgcctactactaaatactcggccgcgtggtccaaagcttgggttttaataggccacatatacatggaagtgggaaacagcctaggggcccaagcaggttggaaggccagatcagggtttgaatgtaaacccacaacccccaaaaggcaatatgcttagtggatgtggcagaaaattttctgccccagagatgatgtgaatatgcacctactttagtttcggctcgagtttggaacaaaaaaataaaaattgcctcctctgataattccttagcacaaaccaccattcacataggattgggacttgaatacacactatgctggaggtgccaaaact

SEQ ID NO: 101058 - DNA, 663 bp, Homo sapiens
gcactcgagctcggcacccatcttccctctctcacaaaggtggtattgtctacttcagtactgtttgtaacagcaaataattaagacaaatgaaaacttggaaacctaaagatatggatgatggcagaattaaaaaatacactgtgctatattcatcgaaatattatacaatagttaacatgaatgaatcaaatctaaaaatgtatcaagatgaatatacttaaaatgtggcatacagagtagagtttttctcctgcttttccaaactgcaaaagaatatgtatagcatgacacatacatggtaaaaacttttaacacaccacatgtatatacacgttgcagaagcaaaaaagaacaacccatgggcaagaatgacaaaaccaactctgggcaagttacctccgaaaaagaaaaagaaatgagagaggatggggaggaaatggtctttagttgtctctataatattttattgcttttacttttttaaagaaaaactaggctattaagagatcacagcggggtgcggtggctcatgcctgtagtcccagcactttgggaggccgaagtgggcggatcacctgaggtcaggagttcaagaccagcctgaccacggagaaaccccgtctctattaaaaatacaaaattagccgagtgtggtggcac

SEQ ID NO: 101059 - DNA, 493 bp, Homo sapiens
gtctgtaaaatcggatggactgccaatcggagaatgagagctgcccagcctggccttacattttttcaattaattcataaacagaaagggggatatgcagggagccgaaggcccatgggatgtgaccaacgcagcattccactggaggctatatgatccaacagcaaactgtttatcatgaatgcaggatgtgagaaaactgacgactgctcctgccgacagaaggtttgctggaggcaatcactccctggcgctgaggttatctactgcaacatttagcctgttgttcgaggaatgcagtcttgcaagcctgctctagactgagcagctgaccccttcttccaccccgcttctcactatctcttttgcctaataaataaggagggctgtataaagctcagggcccttgtccactaggggcaaggtaccccctgaccccttcttcaaaatataaaaggaaaaaaatatacaccactggtctcgttggcctcaa

SEQ ID NO: 101060 - DNA, 479 bp, Homo sapiens
ggccacccagagaatgaatggtgggactgagatcacacctgggcctgcctggctgccaagccttttgctattttcattattccacatttctttccaaggatacagaaagcagggataggaagtgctgtggaaacaagcaaaaagccttatccatagtcagcatccaaaaagtactataccttctctgacccctgctttatttatttgtttattttcagggatgatgtaatagccagaaaaataagtgaacagaagattccgggttctactttatgccaatttttcttaaatatctcagtcactagaaaaagatctatttgaaaatcttgctctgagcagtttctgtcttgggcccagttgtttgaggagcctgttgaatttttaaatttattagtgttcccatgcttcattcattggcatatatgtatattctctatactttataattacaagtaagctcttgataataaaaagtaact

SEQ ID NO: 101061 - DNA, 330 bp, Homo sapiens
ccctatttaaaaatctttgcttcctttgcctgtaaccaagatggtgaatatacttcttctttgtaccagttccagtaagttggttgaggttttttgaaccctacatagagaaagattccaagggttggcctgggctcagcaggaaagaataccattcatgccattttagggatatctgccatgaggatagacagaagggagctctggaattttccattcccaacgttcagaataatgccaaactctaacatgacatgaaagatcctgcataagttatttctctagttgcatttcctccctatgagccaaaagctatatccacaatctatt

SEQ ID NO: 101062 - DNA, 300 bp, Homo sapiens
catgcttctttatgcatatttttaaaaaatctaacttcagaaaaggtaaatttaaaatgcaggtgttacttccatttgaagcactattaaaaaaactggataaagatcagcagcagctacagattgttgcaagttcttgggatatccttctagcttaggaatatggctccatggcagaatttatgatcagagactcatcatgtcttcaaaaatttaaacagaattatgtataattgctagcatgcatctccatagaagctatgttatagtgagtgatttaattagcattacaattttcag

SEQ ID NO: 101063 - DNA, 235 bp, Homo sapiens
actggcattgaattttttttcaacagggaacattaatcatttgtaaacaaaactatattcttaaaccacagtgagcaaaacacactatacatccattcaagggatcacttcctactccctcttgtaacttcaattaagtcagctgtgtagtgagacaggttttgtgaatactcaaagaaaaatcagagctaaagcaatgaaagctagcatacatatccagatgaagcagagcagt

SEQ ID NO: 101064 - DNA, 749 bp, Homo sapiens
gtaatgatgtctggtccgcgttaaggcgggcagctcggcagcccacacctttggttttctggtctcaggcccattatggataagctggtgtggggtggggcaggggagtttcaggggctggaagggcctcatggcagccccacgtagaggctgcctagcccctggactggccccaccaaggggaacaggacattgcagctgggcttggggaagaagggaggcctgtccttttgattcttctttctggcatcctgtgtgtgcacgtctgtgtaggtgtgtgtacacatgcacacctgcctatagtttctttccacttggaattggttttgacaaaaaggtgcgtcagcttcccaagctggtccctgtaacagtgaaggatggagcctcatcctcatcccagagccacaccctcagcttcccctggaaaaggcagcggcttcttccgatccacaccctcagcttcccccggaaaaggcagcagcttcttctgatgcatggatacagcccccactacggagctggggagggagctgcaggcagccttgaccccagaccaaattcaaaggacctgcctcttccaaaggcctccctccaagggccacggggaccccatgaccgtcctctcatcccaagctggctgcatggggtgggctggtttatacgcagataagactgcacctgctgatgaggccagatgcaggtgaaccccggtgctgcaaatgaggagtctgcagatggggtgaggctga

SEQ ID NO: 101065 - DNA, 882 bp, Homo sapiens
gctgcacgcctataatcccagctactggggaggctgaggcaggaaaatcacttaaacctgggaggtagaggttgcagtgagccgagatcgcggcacactgcactccagcctgagtgacagagcgagactccgtctcaaaaaaaaaaaaaaacctgaatagtggggtttattaggaattattctcacacttctgacatgagggggtgcttcatgatgactcttgaatattgacatttcaagtttctaaggacagttctgctgtccctcaggcaggttgggagccattgtttaagagccagacacagcaaagttaaatttgctttaatggtttaatttagggagaaataattttcacgttgctcattgagctttcaactctgagtttgtcttcctattttgaattgtttttctttacctgtttctttttgcaaaaaaaggggacagggtaatttactctgtggcatatttagcacgcctgagggaatgaatgtgggctgctgtcagaatgtttgttgtacagagagttaaggtggtattgaggagggagattgtaggagttggagtggtgagggaaggccttacagaaaatgcagactatgaagtgggcctcagggaggttagaaaactggaaaggcccagaatgtgcagataagggcaaagaagggccttggaggcaggagagggaggactgcccaagctgtaacacaggaataagcatttcaagtgtaggggccactgaagaggccattccgtgcagagaaaggccaaggaactacctcaagaatatatgaaatggcgtttgggtgggtcggttgtgctcagttggtgatcagccaagcagttttcactggtttctggaggtcgcaactatcaaagattctc

SEQ ID NO: 101066 - DNA, 1019 bp, Homo sapiens
ctgaacaggcccttatatatgcattctgacagcctttaggacggtcttggttgacaatacacacataagccagtgttgttatcatgaaacacttcatttgaatgactattacaggctgaacaggatgtcctatgccaagaggttgtgacattttgagagggtggtgctgggagccatgtgggactcttttcccatcacagccaagttgacattttctcaggttgtaggatcattagggctgcaaagggagaaactttgtcagtggctgggtagatgtcccttgagcctggattatgcatttgaaaaaatggtttctttgccttagggaagagagtctcattttaaaaagaaaaaggtttttataacgagttcatgtattccactatgaattttgctgaaaaatctgtcctgaagtatgtctttgctgccaaatcccacgctttacagttaaccaaagttgactctgtatgacctgttacattttccttagacagttggatgtgatcacagaagggtgactgccaaagttttatttcagctcagatatagctaaatgcaagaaatcacttcctgacacctttcttctgcctgccccaccctaaatcaccatttttcaaacaagctatggaatctacaaaatggcctacctgtgttccaagttaattttgagaatggctttttatggctggtttgtaatctctttagaaaagcaaaattatgatggaaactctatgacatcctaagctgtaagcacttgaagatgaatgtaacttcaggtctgtgaagctaaatatttaccttccacatgatttactgcgtctttgttcctttccacactgagctttttctttatgtgcatcccttcatctccaagctactttttagtagccctgttatatcagtgttttgtgatgttacaaaaaagcaaagaatgtgaggtcaaattttccattacacacttcaacaggaatgccagggaacttagccaaactaaggctacaaaaaaaataaaaataaaa

SEQ ID NO: 101067 - DNA, 361 bp, Homo sapiens
caagaccatccttgagaagtcacatccaaagataaaattctgatccatttctagttttagtgtttcgccactgaagacttaacatatgtcttttacactcaggttgcaaaacacaggcccaagacaaacttaacttctcccccaaatcttccttccgctggtttttccatctcgtaagtggtgccactatccatctgttaaattgtttaggggaaacctagaaaagcactaccttaatcagtgttatccttcttcttaactgtgcgtcctaatttctccacatctttcttaagtgcagtgaccaaaccggatgagaattctaacacgggcctgacatcaaatggaaaggaaggataatgtc

SEQ ID NO: 101068 - DNA, 518 bp, Homo sapiens
tgtaatttttaaattaagactgccttagtgagaaaatttcagcaggtgagttaagggcacgaggaaagggcctttgtgcagaagtaatgacataggcaaattgtcaaaggagaggttccctggtgtatttgtagaagaaagtagacccatgtgtctgaacccagcacacagttcacttatggtggttttgaaatctgccctggaattttcatgcatcttttaaatttttggtttattttttcaagaaataaatgaagtctttattttttcaatgagggcaatgtttattaagaacagcacataaggtagaaaagaaggttggtttctaatcttggttcatctcccccactgatcttgagttttaaaagcatagagagcacgatcttctgtgggtctccactgtcagagagccctggtgagaatcatgagcggatgtagtaaaaagtgcttctttcatatcagcaggtggttctgtagtatttgcatccatagacttctatgcagcatcctttctgtta

SEQ ID NO: 101069 - DNA, 768 bp, Homo sapiens
ggacaactctcctggcccacgttcctcttgccagcactgggggtcacaggcctgagccctgggtacaggggtgccctagtcttctgccctccccacctcttaaggcacagagctgttgggtgggctgcctggggctgccatccttcccgtggaagccagtagccactctagtccatgggactcttgacaaaagcgccccgagagggcaaacctgtgcccccatactcgcctgcattcttcggactccacatgcagcagggctttgtgcctggggaggggtggccagtctgtcctggtcagtatgaaaagctgttggccccctagggacagagggcccagctaaggctgcctgaggatacaaactgcttgctatcccactcctggggagcagggtctgcagggactgagagtgggtcccaccttgagaacgcatgcaaggtccgtcctgtcttgatgtcttgatgtgactgtatgtgccctgggggctcactgtggtttacaagtggcttgtgaagctcctgggagcaggtggtacacccagtgctgaagacagggtcgccgtggaagagtgaagagcctgaccgggattcctggtgggttgaaactaggaagtgctcacaccagtcagagccaaatgaggggtgcgctatggtcactgctctgtccagcatgcgttcctcctgggaggtcctggccacctgtgcacccacccctgtgccacctccagcagtcccacctggggccacctacggtggcatggcccctggc

SEQ ID NO: 101070 - DNA, 686 bp, Homo sapiens
atttcttgatttccgtcttaattctaatttttgctaaaaatacattcaagagcaagtcatttaatttctattcattattgtgtggttttgatccatcttcttagcactgatttctatttttattgtgcagaagtgtgagaatgcagttggtaagattttgagttttttgaatttactgatatttgttttatggcaaattgtgtttttgattttacagtatgtgccatgtgcagatgggaagaatgtatattctgttcgttttaggtgaagagttctgtagttgtatgttagttttggtcaagtgtcgaattcaggtcctgaatatctttcttagttttctaccttgatgatctagctaatactgtcagtgtgatgctgaagtcacccactattactgtgtggttatctaagtctcttttaaggtctctaagaacttgcttatgaatctggatgcttctgtgttgggtgcatgtatatttaggatagttaagtcttcttattgaattgaaccatttatcattatgtaatgcccttctttgtctttttttggtcattgttggtttaaagtctgtttcatcagaaattagaatagcaacccccactttttttttcttttccatttgcttggtacatttttctccacccttttactttgagcccatgagtgtcactgcaggtgcaatggg

SEQ ID NO: 101071 - DNA, 610 bp, Homo sapiens
gggccttgggcctctgtttcttgaactgttagagaggggattaggctagatggcctctgaggaccccgcctgctctgacattctgcggtcttccaagtgggaagattttaaggtctcccttccttcccgtgctgtctccccaaagtcaaccagcctcctagaccctgttaagtaagcccatggagccccttccggtggggaaacatgaaggtttggctagaacttgggcttttgtggcatcttagcaaagaagcaatatgtttttagagaagtgacaagagaaaaggaaaggaccttgagtctcaaggggtggcaaattttgggaaggcaaatacatgggaaactcatggtagataaaacttagaaagtttgttgtgtagattcctctggtgccctctccaggctcgtaaaggtctgaaggcatctctggtgatcagcctttgtccttcctggtagagaggggaggggggacacctttgtaaatttatgtcctgcttttaggcaaataaagggaaactagagagcttttcttatatctgcttcttctcaattgtcttcggctcaaagaattcttatgccaaagtggcatatttggaggtggcatatcctg

SEQ ID NO: 101072 - DNA, 487 bp, Homo sapiens
gagtgtgccccatgtggcaggcactgtgctgaggatcggtggtgagcaaaataaacccagcctgtctacctggggctgtctgcccgatccaggaaacaacagagcgcacaggcacacactggacagatgctaacatgttacggggcttaaggagcgtcctggtctgcctggagactcagaacaggttttgtgagctggtcgggggacccctgaggtctcagtgagtgggattcagctgggtacagggcgccacaggggtgaggagacctgggcagggcagcagtgttcctgtggggctccaggtaacactagccacgctgtgtgcaagggccttactgacgcttgggaatccgagcccagcctgggcacaagggggcagggggcatcagagcatctcccctcttccccgcttcctcagtgcatctcccctcttcccccttcctcagtgcatctcccctcttccccattcctcagtgcatctcccctc

SEQ ID NO: 101073 - DNA, 330 bp, Homo sapiens
taaaggttaagtcacttgcctgaggtcacacagcagatgggaagcaggattccatcccagacctcatgctctttcaatagctactgtttggggaactgtcctttccagcaagtttgttcacatagaggctgaaggggtaggtatgcagagcctttggcaagaccagacccagagcagggggacagtagcagaacttgagatcccatgaaccagtgtgttcagggtcacctcctccattcatgccatgggaagctttccccaagggaagacgttcctgtgagggtcccaacagtgaccttacagctacgtggatcccggtcactgaggagg

SEQ ID NO: 101074 - DNA, 1121 bp, Homo sapiens
acgtcagtctcaggaacgttactgattgaattttttacgtcatgtcgggacgtggcaagcagggcggcaaagctcgcgccaaggctaagacccgttcttcaagggcgggtcttcagttcccagtgggccgagtgcaccgactgctccgcaagggcaactacgctgagcgggtcggtgccggagcgccggtgtacctggcggcggtgttggagtacctaaccgccgagatcctggaactggctggcaacgcggcccgcgacaacaagaagacccgcatcatcccgcgccacttgcagctggccatccgcaacgacgaggagctcaacaagctgcttggtaaagtgaccatcgcccagggtggtgtcctgcccaatatccaggccgtgctgctgcctaagaaaactgagagccaccacaaggccaagggcaagtagcggggctggagcagttcattactcatacctcggtccaaaccaaaaaggttcttttcagagccacctactttttcaccaagtagagctgtgttcagttttatctgatagtcgagtcattttgcaatggcactggaatgctgtatggagatgaagcaaaactaaacggcttttacaccacattgttttgagatagaaagtagacattgaaatgtttacggtacatcaagaaatttaggcgcggcagctcgcgcctgcaatacagctgaaacaataagaaaagtgaggcaagagaataacaaagggagctgaaagttagagggcagaataagtaaaagcaaagggcagaagtaaggtagatgggcgggtgaacaagaagcgagataacaagcagtgaaccttttgcagccgaaacaaaagagataatgtgagcaaggacctcgtggccggcaagatctggaacaaaccagtttaagaggcagctcttcagagatgggcatgcgtattagagaggaaaagtatccttaacaaaagcccgtatgataatcagctacttaaggttcatgcatatgggctacatatcatgcatatatttaagattataagatagaggcacaagccacagaggacaaagtaagcaacaaacctatcaataaaagggcagatgctggctatagattaggcagcact

SEQ ID NO: 101075 - DNA, 284 bp, Homo sapiens
aggaaccacgtgcctgttcactgtcactcctcagccccacaactaccattccactttccgtctctatggatttgcctattttgcacatttcatataaataggagtcatacaatatgtggggttctgtgatttatttcacttaacataatgcattcaaggttcatccatttattcctttttatgaccaagtaatattccactgtctggagagactatttttctttatccattcacctgtgaaagatactgaattgtttccccttttttggctattatggaaaatg

SEQ ID NO: 101076 - DNA, 310 bp, Homo sapiens
tttgagaaccatggatatagacaaaagtgataagatagtcttacaagggattttacactaagttgtgctcaaggaatagagaaagaaagaaatggcacaaaaggcaaacagctctggttctactgatagccctgggaaagtctgtcaaaatgatcaactttaaaaagtggtttcacataaaagctaaaaataccacttatctgacagatatgcaagaggatatacaacaatcattccttacctctcaaatcacttctttcctctctgaattgagtactttcctcatcacggtttctgctagtatacctgg

SEQ ID NO: 101077 - DNA, 660 bp, Homo sapiens
tgggcggccaggcagagacactcctcacttcccagacggggtggcggccgggcagaggctgcaatctcggcactttgggaggccaaggcaggcggctgctccttgccctcgggccccgcggggcccgtccgctcctccagccgctgcctcccgggcggccgttaattacaattttaagagcagatttctgagccatatttctgactgtgccaaataaatgaaattccttttgaatgtaatgctgtcctctagcagcagtgggtaggaaggatagggaaatggtacctggagatgatagtactgtgctcttattattattagattgttatgagattcggtttttagacattgaaacagagatgacacagaggttgaagatcccagctgcccagggtttcccccactgctttataaagatactgcctggctgggctcagtggctcccacctgtaatcccagcactttgggaggccgaggcgggcagatcacctgaggtcaggagtttgagaccagcctgggcaacatggtgaaaccctgtctctactaaaaatacaaaaattagctgggtgtggtggcgtgtgcctgtatttccagctactctggaggctgagacaggagaattacttgtaccggggaggcgaaggttgcagtgagccaata

SEQ ID NO: 101078 - DNA, 411 bp, Homo sapiens
atataaaacacaggacataaacatccattaagttatagatcttactgttatgaacagcctgtttgaacctaacacaatataaatacaacagaatctaacacaatataaatacaacaaactggtcagctgaagataattatttcatagcaaaataacagttaccaattaaatggtttcaaaagttgaatggaattaggatgaaatgaaaccaaagaaaatttccagaaaagtttaggcagacagggtgagatgcttaaggtcacaaaagctaaccattccccaagctattatttctatacagaagtcactggaacactcattataaacaaaataagctgggtcttggatagctaagtattaagaaataaaaatcatacaaaagcctaatattaaaataaaacttgaggccag

SEQ ID NO: 101079 - DNA, 793 bp, Homo sapiens
tacaggtaagaaatctttaatgaatctcaagcagcatttataaaaaatgcagtaggacagagaatatcagtgtgcattgtgtgacgtatgggtaagcactgtttcgagaatctcctgttccgggatggaaaggcacagcgtgcgtgcatgggttacacagtatgtcacagccatatcgtgggttctggtcaaaagtgctggccagcgtggccacaggtcaacctccagcccagccggcaccagcaggtgtgctgctctctccccaggtgtgccaagtgcaagaccgtcttccaccagagctgccaggctgtggtgaagaagggctgcccccgctgtgctcgctgacgcaagtaccagcaacagaacgttttcgcctgatgcccctctgctgatcccactctgaaggccgggggtgagtgtggctcagccatcccagctgggtttcctatcagcccaggatactcaccgtgtcacagctgtgtccccttgtcaggaagacctcagatgtgaccagagcactggcctcctacagaaagcccaggaagtccccatgatgtcccctggccctccccccacccctctgctgcaggaggcgtggccaccaccagatgctccctgtctggggcaggcagggccgtttactcaccaggccctggctcaccagcgtcccggcgcctccgttagggctggccaaacactgtggaaaggggacttggggaacattttcaattccacattcctgattaaaaggtctggttttttaaggtgggtttttcccattcatatttcaaca

SEQ ID NO: 101080 - DNA, 908 bp, Homo sapiens
accgggtcccaagcaggctgaattgtgctcctaggccctgccccgcccaggcgggaggtgtctgcctggtgagcagcgccaggggaatgaaaataaacaacacgggctggcctgggtcttcgaaacttttctaaagaatcgcttgtgttttgtttgaaggctcaaccaccggaattatctcttggagtctccgcataggttccgtgttgctgacctccggcagatcgcagatgaggtatatgaaggattcctcaaggccctgattgaatttgcctcccagcatgtctaccactgcgacctgtgcacccagcgcagcttcatctgccagatctgccagcaccacgacatcatcttcccctctgagtttgacaccacagtcaggtgtgccaagtgcaagaccgtcttccaccagagctgccaggctgtggtgaagaagggctgcccccgctgtgctcgctgacgcaagtaccagcaacagaacgttttcgcctgatgcccctctgctgatcccactctgaaggccgggggtgagtgtggctcagccatcccagctgggtttcctatcagcccaggatactcaccgtgtcacagctgtgtccccttgtcaggaagacctcagatgtgaccagagcactggcctcctacagaaagcccaggaagtccccatgatgtcccctggccctccccccacccctctgctgcaggaggcgtggccaccaccagatgctccctgtctggggcaggcagggccgtttactcaccaggccctggctcaccagcgtcccggcgcctccgttagggctggccaaacactgtggaaaggggacttggggaacattttcaattccacattcctgattaaaaggtctggttttttaaggtgggtttttcccattcatatttcaaca

SEQ ID NO: 101081 - DNA, 2017 bp, Homo sapiens
gggcagatgggactgtccaacccattccagggtctcatgaagctgggcaccgtggagcggcagggggcaatgggcatctggaaggagctcttctgcgagctctccccactggagttccgcctctacctgagcaacgaggagcacacctgtgtggagaactgctccctgcttcgctgtgagtctgtggggccagcccacagtgacgggcgctttgagctggtcttctctggcaagaagctggccctgcgcgcctcctcccaggacgaagctgaggactggctggacctggtgcgggaggccctgcagaaggtccggcctcagcaggaggatgagtgggtgaacgtgcagtactcagaccagcctgaggaaccccccgaggcgccccagggctgcctctctccctcagacctgctctcggagcccgcggccctccagggcacacagtctgactggtcgtccgcccaggttccagagctagatgccatcaaggagtccctgctgtacttgtacatggacaggacctggatgccctatatattttctctgcccttggaggctctgaaatgtttccgcatcaggaacaatgagaagatgctgagtgacagccacggcgtggagaccatccgggacatcctgccagacaccagccttgggggcccatccttcttcaaaatcatcacggccaaggctgtcctgaagctgcaggccggaaacgccgaggaagccgccctgtggagggatctggtccgcaaagtcctggcatcctacttggagacagccgaggaggcggtgaccctgggcgggagcctggatgaaaactgtcaggaggtgctgaaatttgccacccgggagaatggcttcctgctgcagtacctggtggccatccccatggagaaaggccttgactcccaaggctgcttctgcgcaggctgctcccggcagatcggcttctcctttgtacgacccaagctctgtgccttctctggcctctattactgtgacatctgccaccaagacgatgcctcagtgattccggccaggatcatccacaactgggacctcaccaagcgcccgatctgcaggcaggccctgaagtttctgacgcagatccgggcccagcccctcatcaacctgcagatggtgaacgcgtctctgtacgagcatgtggagcggatgcacctcattgggaggagccgggagcagctgaagctcctgggggattacctgggcctgtgccggagtggcgccctgaaggagctcagcaagaggctcaaccaccggaattatctcttggagtctccgcataggttccgtgttgctgacctccggcagatcgcagatgaggtatatgaaggattcctcaaggccctgattgaatttgcctcccagcatgtctaccactgcgacctgtgcacccagcgcagcttcatctgccagatctgccagcaccacgacatcatcttcccctctgagtttgacaccacagtcaggtgtgccaagtgcaagaccgtcttccaccagagctgccaggctgtggtgaagaagggctgcccccgctgtgctcgctgacgcaagtaccagcaacagaacgttttcgcctgatgcccctctgctgatcccactctgaaggccgggggtgagtgtggctcagccatcccagctgggtttcctatcagcccaggatactcaccgtgtcacagctgtgtccccttgtcaggaagacctcagatgtgaccagagcactggcctcctacagaaagcccaggaagtccccatgatgtcccctggccctccccccacccctctgctgcaggaggcgtggccaccaccagatgctccctgtctggggcaggcagggccgtttactcaccaggccctggctcaccagcgtcccggcgcctccgttagggctggccaaacactgtggaaaggggacttggggaacattttcaattccacattcctgattaaaaggtctggttttttaaggtgggtttttcccattcatatttcaaca

SEQ ID NO: 101082 - DNA, 2153 bp, Homo sapiens
gggcagatgggactgtccaacccattccagggtctcatgaagctgggcaccgtggagcggcagggggcaatgggcatctggaaggagctcttctgcgagctctccccactggagttccgcctctacctgagcaacgaggagcacacctgtgtggagaactgctccctgcttcgctgtgagtctgtggggccagcccacagtgacgggcgctttgagctggtcttctctggcaagaagctggccctgcgcgcctcctcccaggacgaagctgaggactggctggacctggtgcgggaggccctgcagaaggtccggcctcagcaggaggatgagtgggtgaacgtgcagtactcagaccagcctgaggaaccccccgaggcgccccagggctgcctctctccctcagacctgctctcggagcccgcggccctccagggcacacagtctgactggtcgtccgcccaggttccagagctagatgccatcaaggagtccctgctgtacttgtacatggacaggacctggatgccctatatattttctctgcccttggaggctctgaaatgtttccgcatcaggaacaatgagaagatgctgagtgacagccacggcgtggagaccatccgggacatcctgccagacaccagccttgggggcccatccttcttcaaaatcatcacggccaaggctgtcctgaagctgcaggccggaaacgccgaggaagccgccctgtggagggatctggtccgcaaagtcctggcatcctacttggagacagccgaggaggcggtgaccctgggcgggagcctggatgaaaactgtcaggaggtgctgaaatttgccacccgggagaatggcttcctgctgcagtacctggtggccatccccatggagaaaggccttgactcccaaggctgcttctgcgcaggctgctcccggcagatcggcttctcctttgtacgacccaagctctgtgccttctctggcctctattactgtgacatctgccaccaagacgatgcctcagtgattccggccaggatcatccacaactgggacctcaccaagcgcccgatctgcaggcaggccctgaagtttctgacgcagatccgggcccagcccctcatcaacctgcagatggtgaacgcgtctctgtacgagcatgtggagcggatgcacctcattgggaggagccgggagcagctgaagctcctgggggattacctgggcctgtgccggagtggcgccctgaaggagctcagcaagaggctcaaccaccggaattatctcttggagtctccgcataggttccgtgttgctgacctccggcaggtgagagtgtcatgcctaccccgcccagaactctagaaagacttcattcctggagaagtcagcaaggaagatgggagagagggtgtctgtagtttactgaagaagacagcagtctgcagcttttctgcagctcaggatcgcagatgaggtatatgaaggattcctcaaggccctgattgaatttgcctcccagcatgtctaccactgcgacctgtgcacccagcgcagcttcatctgccagatctgccagcaccacgacatcatcttcccctctgagtttgacaccacagtcaggtgtgccaagtgcaagaccgtcttccaccagagctgccaggctgtggtgaagaagggctgcccccgctgtgctcgctgacgcaagtaccagcaacagaacgttttcgcctgatgcccctctgctgatcccactctgaaggccgggggtgagtgtggctcagccatcccagctgggtttcctatcagcccaggatactcaccgtgtcacagctgtgtccccttgtcaggaagacctcagatgtgaccagagcactggcctcctacagaaagcccaggaagtccccatgatgtcccctggccctccccccacccctctgctgcaggaggcgtggccaccaccagatgctccctgtctggggcaggcagggccgtttactcaccaggccctggctcaccagcgtcccggcgcctccgttagggctggccaaacactgtggaaaggggacttggggaacattttcaattccacattcctgattaaaaggtctggttttttaaggtgggtttttcccattcatatttcaaca

SEQ ID NO: 101083 - DNA, 664 bp, Homo sapiens
gctgacagaacacagctggaaagagcagggtgagaggtcactgtgggcctctcccatcagtgatttggtgctatttgtggcctctgcaggcatggacatatcctgttgacattacaaaataaaatggatgcaaatattattgtttagtgtcttccaatttcttggatccttaaatagctgccaacatcgctcttcagttatttatgtacacaaagagctatttctgaatatccgtcctaattttcttctggcctgttccctgcatattaatgtattccaatgaatcccacccattccaaagagaactgaagcaagcttgtggcttgtttagatgtggtccaagtctgtgtggtcccctcagggaggtgtagtaaggatttctcagaaccggtgtttgcgtgtgagggaagcctgctgagcagagagcgtttacattgcccagtgttccgagtgcttgagtttcaatagttaccttagtttattaggaccttggaagagtaccaaagctgtgagttcctgggagttttccgtcaaaatcagtcctctggcatggtaaagaatatgtttgtaaaggaacaagaaaaaaatatataatttttctaaatatatatataggaaatgtatatatatatacacatataatatatatatagacaaaataaaa

SEQ ID NO: 101084 - DNA, 376 bp, Homo sapiens
cctcccgggttcaagcgattctctcgcctcagcctcctgagtaactgggattacacacacgcgccaccaaacccagctaatttttgtatttttagtagagatggagtctcaccatgttggccagactggtctccaacttctgacctcaggtgatccgcccgcctcagcctctcaaagtgctgagattacaggtgtgagccactgcaccccgcccatttagggaacttttataaggaacttaattgtgtcccacatgcagtagggacactggggtatggcatggccagtttaggcctttaaatgcgttcttccagcaggcagcagggtagaggattgatatgaagtgggagagcgtgggaggcctatgaacagacca

SEQ ID NO: 101085 - DNA, 735 bp, Homo sapiens
caagggaaaggcctcagaagaaaccagtcttgccgacagcatgatctctcatcctcagaactgggaggaaatacatctgtgttgtttcagccactcagttggtgatctctattacagcagtccttagcaaaccgatttagacagggctttggatgccaaccagaagaagctgtaggaattggcacagatccagagcatggacaaggacttacacttctgctgaaggcaaaggagaaacagcattatctaaaaagcaaccaagacttcaggggatgagaacccactaactattacagtccacgtgtcagtcgcgtttctcatcgtgattaacaccccagccattgatttgctcttcagtgtctagtgagcaaggctactgtgaatctttcctcaggaggactgatggagtcacatttctgagcctacagagctgagggcaagacctgagaatggtgatgtcaaaatgccaaccagcgagacctcttggtggccaggtgcttgcttgtgctcctcctgtgcttggacatcagactccaggttcttcaacctttggactctgggacttgcaccagcggcttcccaagggttctcaggccttaagccacagactgacgactgtactgtcagcttccctggttttgaggcttttggacttggactgagccactactggcatctctctttcccagcttgcagacagtctatcatgggactttgccttgtaattgtgctagc

SEQ ID NO: 101086 - DNA, 703 bp, Homo sapiens
agcaaacaaaaacttttatgggagctaaataaaaatttcatttgtgatagatgtattaattgaaacctcagtttattctgtatggatatgaattttctacaatgcacagtcctactcacccgaaggctaataaaactatactttccaaaacaaacactttaggaacccttctaagttggtagaatgcttagatatctcacagagggtagtcaataagcggggatagaacaaggccatacacacatttggaaatttttaacggtacatttctgggaagccaaaaagtatgctattaaaatcttgtcatattaagctagcaagaatatttattactaatatgatgtataaaaatcaggaagaataattctcaatcagcatgaggaagagatggcattctatacatttccagagggcatgtgtgaacaacaaaagtatatctaatatatactgttttcataagacaagctttagaaaataaaaagtgacaaaatctccctagctggtaggtacatacaagagttagaatgagagaatattacaatggcataagttaggaagagttgagaagaactaagctgggaattttttttcataaaattttaaaaatgtcagcattaccctaaatcagacttctcttaacacacaaagaaaagcaaaaacatatataatactgtacaaaccaaaaataaactatttaatagga

SEQ ID NO: 101087 - DNA, 260 bp, Homo sapiens
  misc_feature (17)..(17): n is a, c, g, or t
  misc_feature (21)..(21): n is a, c, g, or t
ctgtagtcgatcgagcnggtnccgaattcgacagtgtgcactccctcatgtcatctatgaatgatcacctgccccaggacttccttgaaggaatagcccaaattatttgctaagagttctgggggtaaaaaagcaaaaaaactaactctactgacacccttctttgtctcccagtgtttatggagcgtaaccagtgttcatagccctctgccaggcatcgcagatacagaggtcaaggagatagacatagccctgcccct

SEQ ID NO: 101088 - DNA, 294 bp, Homo sapiens
gggaggaacatgtttatgtaattctgatttctctagtggaaaataatagctaacctatgacttttcattttagtgtggtactgtaagcattactcattaagacacctttatctctcaaaaaattttgccaaaatggaaacaaaacaaaaccaactctaggtatatcctgtataaaattgaaatacaagaaaaatggcaacccttattaaatactgtccagtattctaggtaataaagaaaataaatgaagactctacctactttaaaaataacatatctaaaaaaaaaatactg

SEQ ID NO: 101089 - DNA, 329 bp, Homo sapiens
tcaagcagagacaggggaacttggactgactgggatgggctgaggggttaccacctagcatgctgcgtacccagtgctgaccagtgacacagagctccgagagggacagatgggctgctggaacaggcaacctttgcccgggagcctggagactctcgacagtcaacaagtcaaagggaaccctcttctgaaccaggtctgactcgaggcccattggcttttcgttaagaagttgccctgcctcaccaagacaggaagctgagtcctgtctgccatgtcttagcgctgtggcccgagccaagtctttccctgaccagaggcctgcctca

SEQ ID NO: 101090 - DNA, 507 bp, Homo sapiens
ccatgttggccaggctggtcttgaacttgttggctgggctggtctcgaacttattaatctctttattctctctaaatttctctgatgcatgtttttcaattgttttcttttttctattttgtttgtttcgtggaaaacctagtagggaatactgtgttgggggtcccctaaaccactctcagacttgataattcactagaagaactcacagaactcagaagaatggttctattcatggttatggtttattatagctaaagatacagattaaaccagcaaaggaaaaaggtgcatagagcagagttgaggagaaaccaggcagaagcttccggttatcctttctgagtagagtcaagtgaatagcacttaattttcccagcaatgatatgtgacaacacatataaagtatagccaaccagggaaactcacctgagccttgacgtctagggttttttattgagggccagttctgtaggctcagaatgcatatgacttgaccttagccat

SEQ ID NO: 101091 - DNA, 257 bp, Homo sapiens
acttctctgatgatgactgcctttccattgcatttatattctaccacttactgctaaaaagtcttggctaaatcttcaagattacaccactgaccatcaatgacccactatttttgctctgtatctctttcctctaattgttgggggcagagaagagtgatacaacttcttgattacgttttccttgactaattctcaatttcagattcatctcagcattccactggcattcccttaagtcctctctaccgcagaaa

SEQ ID NO: 101092 - DNA, 878 bp, Homo sapiens
gtagatggacacgcgatgaaaagtcatggagagcttgcctcttgctctcctccaggactccctggctctagtcttgggaaaatccgaccttcttatggctgccttatctgtaaattagaaataagcctttcctaataagacttatttctgtaaataagccttacctatcttcaggcccaggataaattacagctatggaaaaaaatactgcttaggagaatcacctggaaccaagttctaaacagaatatgtgtatttctttctttttgtactataaaagtaaccaaatagccagaataagccagccatttgttaaaaccccatgagtatgggaaatttttctagctagagagctttgttttttcccagtgggactttaccttgtagttttcatgcttaaaattttgtgaggagaagaaagaatttgaaagatcataaaagacagcaactctttaaaagctgtaaatttaaaagttatctattagagaaaacctatactactgccaaagggcgtttagcagttggatacctcaggttcaacaggaggaccattattcagagtttaatcagatttttaaaatttgaatgggacttcatttagtaaaactattcatggtgttctggctttctctttgcataaatgtggtcaagaatgtgtgtttagcttcactatggccagcaaacaatgatgctgtatcttatagattcccctctccaacaacatatttcgctggcatattttattctcatagccattcctatagtgtagagattttcgacaatccttgtctgcccagagcaacattacttattcaataaattgagtttaaattgcaagtcttttgcctgcaaaacttaacatacattctcatatatat

SEQ ID NO: 101093 - DNA, 258 bp, Homo sapiens
agtcttgggctacccaggagatggttactcagggaaagttctagcacccagcacaggaagcaggcagggcccaggacctctgatatggatcttggtaaataccattttctctgggcattccctccaggggaacctccctgcccagtaccagctgggtctgcaggttctaacaggtttcaggctgagcctcccaggtttcccagatggaacagataaccttccttgggaaggaaactattcccctccaggaagggcctg

SEQ ID NO: 101094 - DNA, 826 bp, Homo sapiens
gaccaacctggccaacatggtgaaaccccagtctctactaaaaatacaaaaattagccgggcatggtggtgtgtgcctgtaatcccagttgctccagaggctgaggcaggagaatagcttgaacccaggaggcggagattgcagtgagctgagatcatgccactgtactccagcctgggtgccagagtgagactccatctcaaaaaaaacccccaaaaattaaaatagtagcagatgatagggaaaagtcctatatgacatcagtatagctaattacatgcatggatttcaaaaccatttctatatatattttatttcaagttttataatagttaaaactatagaagtatttaccttccaatttcaatgattatcaagatgttacttttttacttgcaaggatgtttcttgtattcaaaaagccactacgaaagtattattttattttggagtggggaggatagtcccaaaaatttattgataagccaataatttaggattagatttagtaatttacttagtgcatagaatatcaaagaaaatggctggcaacgtggctcatgcctgtaatcccagcactttgggaggctgaggcgggcagatcacctgaggtcagaagtttgagaccagcctggccaacatggtgaaacccccatctctactaaaaatacaaaaattagccgggcgtggtagcgcacacctgtagtcccaactactcaggaggctgaggccggagaatcacttgaatctgggaggtggaggttgcagtgagctgagatcgtgccactgcactccagcctaggcaagaagagcaaaactccatctc

SEQ ID NO: 101095 - DNA, 443 bp, Homo sapiens
aactctccgcccttctggctctgaactactttcactcctactgagacgctgcatggctatgacaggggcgcctagcatggatcttagcatttggcagcaaagaaaagtggccgaagcctaggaacgtcctggcttcccttcctcttctgcctgctgccattataagtagaatggcgtgtgtacttccacgtatatgattatgccacttcttggaatgtggtcttagttttaagttaattctccacctagggacaacgctgtaagttttattttacaaacataatcttctaaataagctctaaataagtttcatcagttctgagagaaagttcttaagcacacaattcttcaatatttgatgtttcaaaaatcctatggaagcaagttaggcagagaaaaggacaaggccattcttaatgttgtaattttaccagagttcgcca

SEQ ID NO: 101096 - DNA, 469 bp, Homo sapiens
gaggttgggtgggtgggactagcaagccagctgaaagccatgtctctttcctgcaaggggcctcccttatttgagctgttttagtgcctgaggttttgcctggccctttcctctgccagggcttcttaaacagggagcagatgatgatacacccaaactcaggagatgcttgccagcaaaagcattgtcagttgcaaggatttgcctgaaaaaacctcagatgtacccaggtgtacgtgccactaggttgacaggttgtgtttaagagaccatgaccagctgggcatggtggctcacgcctgtaatcccagcacttcaggagaccgaggacggtggatcacctgaggtcaggagtttgagaccagcctggccaacatagtgagaccccatctctactaaaaatacaaaaattagctgggcatggtggcaggcgcctgtaatcccagctacttgggaggctgaggcagga

SEQ ID NO: 101097 - DNA, 219 bp, Homo sapiens
aagggttcaagagtcctaaggacagtataaggacaggaagtgggcaactatagaagcagcagatcatcagcgggcagggattcctcctggcacttgtattctatcccgctagtgtcttcagactgaagcatggccaggcttccatgccttgtctgactctaggcctacttctgcagaggagtcacagagccaggtcgtcatctgggaaaacactttgtg

SEQ ID NO: 101098 - DNA, 240 bp, Homo sapiens
tgtcgcccagactggagtgcagtggcaggatcagggctccgtgcagccccgaccttccaggctccagcgatcctcccgcctcagcctcctgagtagttgggagtagagatgcctcccacatcgcctggctaatttttgtatttttgtcgagaggggatctcgccacgttgcccaggcttgaagccggatcaagcaattgggttcttcggatttccgaaatagaccccaatattctgcctt

SEQ ID NO: 101099 - DNA, 742 bp, Homo sapiens
tagggtagtctagaggatcccaacgctctggaaaaggggctattcatgtcttccctacatagtccaaaaaaggtttgtcaacatggctaacagtgtgtggtccacaagctgaaggttttgatctgaacttcatttctagggagcaactcttcgcaagagttattagaaaagcctcacttgaatggtagtattttatgttagcaatataacaatgcaatcggacaagctgctcatcactagaaacagtattagtatatggtcgaggattaatagtctgccatccatctctagatagggctggtaggcatctgtcacctattctgtgtagcataacactatgcctttgatatatgtgcaatcaagtctgatgagctgctttaaagaaatgccctgcctgggtctcttagaaccctcagaattgtcccttatctgtcgttggtatttgtatccttgggtttgaaggatttgagggtagcctttgacatgcctcctgttggcagtgtagcagtatgtagatggtaataactgattttcttcattccatgagttttatccagaaatggttagagcattgttcctcatacccttatgtgcttatgactcaccaaagtggatctgagcccatttaacagttgtggggtgggcttcttttccctttccccaccgtccctcttcttctttcccctttcccaaccatccttccctcttctgtcccctttcctgacagtcccccttctccttt

SEQ ID NO: 101100 - DNA, 570 bp, Homo sapiens
ctacattcaaaaaacaggcaggctgagtccttagaaacatgggggtcacttggaagacatattgacgacaccttcccaccctaaaggttacacaggtgggaagctttggactccagctcctcactgcataccctgtctttagatcctgctgattctaagcaaatgccctattaaagactagcttcaggaaacagaagcagcccaaagttaaagctggggaaaactacactggctcacagcatgagttccaggactttgggaaaggccacctcccctgcactaggcaagctgaatttctggaaccctaaactgaaatttaaaatacatctttgccacagaaatagtttgacaaaagcagctggggtctgtgactctaggagttctcaagatttatgataagataacacttctatggagcctcttgggtttaattaataaccagggtttccaaggtactgtttgtactgaactataactcaagcatcctctgggctactttggcttctcagggttgacccgatgacttaatcaccttgcttctgtggaaaaacattttctaaacaattaaac

SEQ ID NO: 101101 - DNA, 418 bp, Homo sapiens
aagggcctggcccttccacgcccagagtacattctgtccagcagctctgagtagcctgtcctgggctgggtcctctgtggtgctagatgtacaatgccatttaatcctactgaaaacctcatgaggcgggtgttagctccattttggagatttttatttttactttatttttgggacagggtctcgctctgttgctcaggctggagtgcagtggcataatcatggctcactgtagcctcaacctccagggctctagtgatcctcctgcctcagacttctgagtagctgggaccacaggtgtgcaccactgtgccctgctacttttttttttttttttttttttggaaacggagtcttgctttgtcacctaggctggagtgcactggtgagatcttggctcactgcaacctctacctct

SEQ ID NO: 101102 - DNA, 174 bp, Homo sapiens
tccaagctccttggactgccaggtctttggtattggaatctgctgaataaggagggtgacagttggaggagcctttgagcaggacaggagctgaggtctaaggggagagagaaggacagcagtgagaatcaggatttcctttggtggagttgttgaagaaggagtatatggctg

SEQ ID NO: 101103 - DNA, 640 bp, Homo sapiens
acagttacttcccaggagactaccacagtaagactaataagatttcaaagagcattcttttctctttcatgaatccagcactttaaaacagtaagtgagaaagaattaaaatttcctagggaaattttccaccatctcgaaatacttctttctattaaaacccagtgatttcataaagttgtgcctttcacatatatgacaatgtagttaaatttggagttgagaataatcttttatttctcattagtcaacccaccaacaattacatgcttctcagaaacaataaaagaaacttcactttgaggcagatcatcatagacaatcacctaatttttaggcagctttattttgtttggtttggtttgctttgctttggtttggttgagtcaaggctgctttggagaacaatagaaaatttagacaatcatgtaaaatttatatgccaaacttcacttttttttcaagtactagctaatccatgtagaaatatgtttttcatctgcatgagctgtatatttatcttgatttccttctcttcacaataacctaacctatgaatgggttcctgacaatgtataataacaatggcaaagttaataaaacgtcatttcctggataacagcatgtgactttctcctat

SEQ ID NO: 101104 - DNA, 340 bp, Homo sapiens
agtggcttgaatttaaatggataagattaaggtgatagagtgtcagtcacatattttgcttacaagctgaaaatcaaatcttctttaattgcgtttctgtggcctttcatcacttttctacttttgctatactagtaacatttggtttcatgagagtattaattacttgtgaaataactggttgaacagtgttttaggttgggctgtgtttttatgctgtttctttttaagtactgcatatttttcctttatcacaatcaactgtaatgtaacttaatctgttttgaatatgtttttaagttaaaacctctgataataaaagtgaggatctgctttttaa

SEQ ID NO: 101105 - DNA, 343 bp, Homo sapiens
aaatacctaatgtaaatgacaggttgatggatgcagcaaaccaccatggcacatgtatgcctatgtaacaaacctgcatgttctgcacatgtatccaagaacttaaagtaaaataaaataataattttagaattttcattttgttcttatttagtttcaatacatggaatatatttagagtatatgaagttctatattgtcctgaaatttcccatttttttgtccaatctttttctatagcttctataacatatttatcactgttactttaaagtccttatttcttaacttgatctggagcattgggggacatttgtagttttattcctattaactctttttt

SEQ ID NO: 101106 - DNA, 862 bp, Homo sapiens
tttgaattttcagttttgatccatcatccatcattctgaatcatgtcttttggtagtttctctgcagaaaatagtactttcttacatatttgataatacctttatttggcatatacttaccaatggctgcttgattgggtataaattgtgggaatatcacgatttataaatatataaataattttttttcttttaagctcagcatagattgctcctttgttgtttgaaggcaaagtgatatcttcttttgtggataacctaatatgtaccccccaagatacttgtatgattatatgttaatctagaaaatccaaacaggatttaaatagtaagtcttcccataacctaacacttactgtcaatgttcagaccaagatatattttagatctgaaaaaaaaaatttactctattacagttagaacctttggcttcaaataatagaagtaagatcgtgtatcagttagttcctgctgcgtaacaaatcattccgaaacttagtggtttaaagtaacaactgtccatttaggtcatgattttgtggattgctggctgctctggtttgtgccagctcaactgaattctgtgggagtgtctcatatgtctgcagtcacctatgggtcatgtggctgctggataacctaggaagccttattcacttatcttgtacttggaagattgtcaaccaggatgacagaggtaactgaaccatgtgtttctcattacccaacaggcgagtttaagcttctttatggtggcctgagttcaaaagcaggaaaagaggacaaaccccatggcactaatgctttttgagcctctgcttatctcacatatgccagcatgccactagtcaagcaacccata

SEQ ID NO: 101107 - DNA, 324 bp, Homo sapiens
tgtttttgcacctgactttgatatttatctgtgtctgggcattttttagaaagtaagctctgaaggccaggtgcagtggctcatgcctgtaatcccagcgctttgggaggccgaggtgggcagatcacttgaggtcaggagttcgagaccagcctggccaacatggtgaaaccctgtccctactaaaaatacaaaaactagctctgggtgtggtggcaggcacctgtaatcccaactacttgggagggtaaggcaggaatcgcttgaacctgggaggcagaggttgcaatgagccaagtggtgccactgcgcttcagcctgggt

SEQ ID NO: 101108 - DNA, 2483 bp, Homo sapiens
agcggagcacctttgaggccgactaaaggtgaccctcttcaagtgccctgtgttggccaaggttccccggacaagaggaaaaaccttcaggattgaaactgagccacacgcacctctgctagtagctggtccaaacccattatcctccctcactcattgattaccctgggatagggcacaggaaagaaatgtccctcgaaggcaatataaaactgccccttcttagaattgctaaagccattggtctgaaagtgactttgggaggtcataaagtttgtatctctatctttaagcaaaaaattaaactttcccagctcattttaaagacctccaaggaaggaaaaaagcaattcctctgtcttccttgtgagttgctctaaagtgtgtgattttctagtgtaaatggactttgaggcacttgtaaacacaatggttcttactgtttccattactgcatttacttcaccttgacaaggtacaattttcaaggacaaagcactatatataaagttagtagttctaatatccacttgagagtatactcaagattgattttcatggccatttggcatgattgcatgaattctctattcttttatgtgcagtttttctatagaaaaacattaaaagttaaatgttgactgctaatgttttctgaagtggcatagtctagtggaatcaataatcccttgctttggtataataatttgaacttttgaaagtgctttctcatccgttatctcttatcttcacaaaacccctgtggaagaaagcacaattattcccaatctgcagagggggaaatggaggccttcagagattacaggaccagataccaggtagtggaaccagacagcaggtccttaacttctctccagtggactccctgctttgcctactctctagcaactgacttggggaagtttttaaatggtgagagtgtgtctctgggggcaaccattgaaaagaagactctgatatgttggaacaagtaagggatttgaatgaaatacactattatatcttatatgttagcttgaaccagaaaaagttgacatttttgtaggtcaaaaacaattgagcatcaatttcatatggttcaacctcatatatgatactatgcttttcttctatcagtgaaaatgtcatcatcaattccattgtcaacattagtagccttaaaacaataacataataataatgatgataatgatacttatagctatcatctattaaatgcctatgtttcaggcatgatactaggcaatttatatatatcatcctaatctttctaaaaactctattaggtggccctatccacttaatagatgccaattcaaagaggttaaatgattagactaaggcacctaacttatgtgagtgtcaggcttcaatgcctgtgttagagctactccttcacacaaaatagttcagaacatagagaaggaccaaggttaataaatgattttcatcccaaacactaaacatgattgatgggtagaggctgcccgaagtactgtgtaaagatggaatctgagatagaagaatgctgtggtcaattagtaattcttgcccatggagggattagtgacacatgccttgtatatttgtcatctgtggcctaaactctgcccctgaaggtttgttttctaattcagaggtttaaattaatctagcccacttaataaaaccagagatcctatgggaaatttagcctaagacagtgctggaaattgccatatgttgatacaaagaagtgtttggccacattacaggtctcagactcaactgctatgtgtgactgccgctctgtgcctatgtcttgcttttttgctgagttccctatttccatatctccaggtgaatccatgagaagcgagagggtggctgagaggcctgggcctctgggattccaccttgctatctctgctcttcaaccattgttttagactctgaacaccagatcctcatatctgaaagtgatttggagacctgggcatcaagtgctcttttaagaaggggctatcccagaggactgttcaaaagtctcattcaatagagatgttggagtccagaacaaagttagggagcaaaccagtaacctatgctggtcgtaacagaggatcctacaattacgtttgtttttaagacaggattttgctgtgttgcccagactggtctcaaactcctgggttcaagagatccatcctcccacctcagtctcctgaaagctgggatgacaggcacatgccaccacacctagctccttacaaccatttattttaacttatttcatttataactggtatctttcatttgtatgtggcagctagagatttatataggatggaagtaatttatttttaatttaaatatttcatgttgaactgtttgccttgtatggaacattttacttggccaattcaaataaaaataaagtcagctttgtttgtgacattcatgcaccaccataaaaaaaagcc

SEQ ID NO: 101109 - DNA, 2444 bp, Homo sapiens
agcggagcacctttgaggccgactaaaggtgaccctcttcaagtgccctgtgttggccaaggttccccggacaagaggaaaaaccttcaggattgaaactgagccacacgcacctctgctagtagctggtccaaacccattatcctccctcactcattgattaccctgggatagggcacaggaaagaaatgtccctcgaaggcaatataaaactgccccttcttagaattgctaaagccattggtctgaaagtgactttgggaggtcataaagtttgtatctctatctttaagcaaaaaattaaactttcccagctcattttaaagacctccaaggaaggaaaaaagcaattcctctgtcttccttgtgagttgctctaaagtgtgtgattttctagtgtaaatggactttgaggcacttgtaaacacaatggttcttactgtttccattactgcatttacttcaccttgacaaggtacaattttcaaggacaaagcactatatataaagttagtagttctaatatccacttgagagtatactcaagattgattttcatggccatttggcatgattgcatgaattctctattcttttatgtgcagtttttctatagaaaaacattaaaagttaaatgttgactgctaatgttttctgaagtggcatagtctagtggaatcaataatcccttgctttggtataataatttgaacttttgaaagtgctttctcatccgttatctcttatcttcacaaaacccctgtggaagaaagcacaattattcccaatctgcagagggggaaatggaggccttcagagattacaggaccagataccaggtagtggaaccagacagcaggtccttaacttctctccagtggactccctgctttgcctactctctagcaactgacttggggaagtttttaaatggtgagagtgtgtctctgggggcaaccattgaaaagaagactctgatatgttggaacaagtaagggatttgaatgaaatacactattatatcttatatgttagcttgaaccagaaaaagttgacatttttgtaggtcaaaaacaattgagcatcaatttcatatggttcaacctcatatatgatactatgcttttcttctatcagtgaaaatgtcatcatcaattccattgtcaacattagtagccttaaaacaataacataataataatgatgataatgatacttatagctatcatctattaaatgcctatgtttcaggcatgatactaggcaatttatatatatcatcctaatctttctaaaaactctattaggtggccctatccacttaatagatgccaattcaaagaggttaaatgattagactaaggcacctaacttatgtgagtgtcaggcttcaatgcctgtgttagagctactccttcacacaaaatagttcagaacatagagaaggaccaaggttaataaatgattttcatcccaaacactaaacatgattgatgggtagaggctgcccgaagtactgtgtaaagatggaatctgagatagaagaatgctgtggtcaattagtaattcttgcccatggagggattagtgacacatgccttgtatatttgtcatctgtggcctaaactctgcccctgaaggtttgttttctaattcagaggtttaaattaatctagcccacttaataaaaccagagatcctatgggaaatttagcctaagacagtgctggaaattgccatatgttgatacaaagaagtgtttggccacattacaggtctcagactcaactgctatgtgtgactgccgctctgtgcctatgtcttgcttttttgctgagttccctatttccatatctccaggtgaatccatgagaagcgagagggtggctgagaggcctgggcctctgggattccaccttgctatctctgctcttcaaccattgttttagactctgaacaccagatcctcatatctgaaagtgatttggagacctgggcatcaagtgctcttttaagaaggggctatcccagaggactgttcaaaagtctcattcaatagagatgttggagtccagaacaaagttagggagcaaaccagtaacctatgctggtcgtaacagaggatcctacaattacgtttgtttttaagacaggattttgctgtgttgcccagactggtctcaaactcctgggttcaagagatccatcctcccacctcagtctcctgaaagctgggatgacaggcacatgccaccacacctagctccttacaaccatttattttaacttatttcatttataactggtatctttcatttgtatgtggcagctagagatttatataggatggaagtaatttatttttaatttaaatatttcatgttgaactgtttgccttgtatggaacattttacttggccaattcaaataaaaataaagtcagc

SEQ ID NO: 101110 - DNA, 736 bp, Homo sapiens
gtgagaggcatcctctagaactctgtttcaatgttgtggttagtatctgtattcatattttgaatatcaaccatgtgtaagtacggtgtggcacctctatccaaagctggtaggttgtaaaacacagtgaattattgctatggtaaaatataaaaattaatcaaccaatataactaaataagactaaatgttacattgtctaaattatgcccacaaatgtttgaactctaggacattaggtagacttttgctagaatgatagattttgttacataacccttaaattctggaataaattcctataaggaaatgacaagcttaatttggaagtcttgctccataaaacaaaatacctgtgaagttactaagatttatggtgctaacagggtgggagactttaactttggtgatgcttttcagtatttttcacatctatagaacagctcacagtggttcatctatagcaacctatctttttatagaagcagcactgtgcagactctcagtgaattgctgaatggtctgcatgcctaaagcctacagcaaaggcaagaagccctcaataaagcaatatgaatgattggacttttaacaaagtatcaaagccagcataatctgaaatgaaacactggccaagtagatctcagcaggtaagtaaaaatgctacttacatgaccacctcagccaagcaaacatacagaattgacggagcctcaagaaagcatagattctgaag

SEQ ID NO: 101111 - DNA, 463 bp, Homo sapiens
tagctgggcatggtggtacacgcctgtagtcccagtttttaaggaggctgaggcaggagaattgcttgaattaagaggcagaggttgcagcgagccaagatggtgccactgcattccagtctgggtgatagagtaagactccatctcaataagtaaataataaaatcaaaaattggatagttttctaaataaccactatgatagtaacatttattgagctttcctatctgccagacagtgttagatgctctgaatatattatttctgttccaggagagagtttgcattttcccatactttttttgttttaaatgctgaaagaaattttagcaatatattgtatagagtacagtagcccacgtggtgtaaaacttgattctctggttttctgtagggctgataggtaagttgcccttgtcctgatgtgtcaacagtagagtgtaaagtgtgaagagtattttga

SEQ ID NO: 101112 - DNA, 406 bp, Homo sapiens
ctgatggttttataaagagtagtttccctgcacaagccctcttctcttgtctgctgccacatgagatgtgtctttcaccttctgctatcgttgtgaggcctccccagccacgtggaactgtaagtccattaaacctatttcttttgtaaattgttgagtctcaggtatgtctttatcagcagtgtgaaaacggactaatatagtgctgcaataaacatacaagtacatgtatcctttttatataatggcttttttacttttgggtagatacctattagtgggattgctggatcaaacggtagttctatttttacttatttgagaaatctccatactgtagaggttatattaatttacattcccatcaacagtgtataagcattcccttttagcatcctcaccaaca

SEQ ID NO: 101113 - DNA, 283 bp, Homo sapiens
  misc_feature (23)..(23): n is a, c, g, or t
  misc_feature (86)..(86): n is a, c, g, or t
  misc_feature (99)..(99): n is a, c, g, or t
  misc_feature (129)..(129): n is a, c, g, or t
  misc_feature (202)..(202): n is a, c, g, or t
atctgttgtgtttggcattgtantttggccttaaagaggaaacagaatatttggaacatagtccctgatgaatgcaaggatctctncttgtttaccaantaaaaaagaaaagaaattatacagatacanagaattggggccgggtttgccatcccacatctatcagtggctcacatctataaattccagcaccttgtgagtnccaaggtgggaggattgcttgaggccaggagctcaagagcagcttggtaatattgtgagacccctatgtctacaaaaaaaa

SEQ ID NO: 101114 - DNA, 427 bp, Homo sapiens
attcttcctgtctcattctacaaggccagcattgccctgacaccaaagccagacaaagatacaacaatgatcaaactacaggccagtgagcagagatgcaaattcctgaggagcggagatgcaaaaatattcaacaaaataacagcaaaccaaatccaaaagcacatcaaaaaaataatacaccaccatcaagtgaaatttatctcacagatgcaaggatggttcaatggttgcaaatcaataaacgtgttttataacatcaacagaaagacaaaaattatgtgatcatctcaatggattcaaagtaaagcatttaataaaactcaatatcccttcgtggtaaatactgtcaatagagtacgcatagaaggaacatacctcaatataataaaatccacatattacaagcccactgctaccatcatag

SEQ ID NO: 101115 - DNA, 1156 bp, Homo sapiens
gcggggcctagggagtgagcggggcgcatctcccgctaggagttcctagtaaagtggcgggagccgcagctatggagccgcaggaggagagagaaacgcaggttgctgcgtggttaaaaaaaatatttggagatcatcctattccacagtatgaggtgaacccacggaccacagagattttacatcacctttcagaacgcaacagggtccgggacagggatgtctacctggtaatagaggacttgaagcagaaagcaagtgaatacgagtcagaaggtgagattaagtccagagttttgaacgagaataaatagagccaagtatcttcaagaccttctcatggagagtgtgaatttttcccccgccaatctctctagcactggttccaggtatctgaatgctttggttgacagtgcggtggcccttgaaacaaaggatacctcgctagctagttttatccctgcagtgaatgatttgacctctgatctctttcgtaccaaatccaaaagtgaagaaatcaagattgaactggaaaaacttgaaaaaaatttaactgcaactttagtattagaaaaatgtctacaagaggatgtcaagaaagcagagttgcatctgtctacagaaagggccaaagttgataatcgtcgtcagaacatggactttctaaaagcaaagtcagaggaattcagatttggaatcaaggctgcagaggagcaactttcagccagaggcatggatgcttctctgtctcatcagtccttagtagcactatcagagaaactggcaagattaaagcaacagactatacctttgaagaaaaaattggagtcctatttagacttaatgccgaatccgtctcttgctcaagtgaaaattgaagaagcaaagcgagaactagatagcattgaagctgaacttacaagaagagtagacatgatggaactgtgacaaaagccaaataaacatccttttccctaacaaagtaaattgaataggactttacagagttctttttcctcttggcatttcctaataacaaaactttctgtgttcttagattacagaatatcataattgatagaatatggtttcttactgtgtgttgcatttttgtgcccaaatacatagttttcatattaaaaagccttttctctta

SEQ ID NO: 101116 - DNA, 615 bp, Homo sapiens
ttaaataatttttatatttgaatattttaagacaatgtaatgttagggatgtcaagaaagcagagttgcatctgtctacagaaagggccaaagttgataatcgtcgtcagaacatggactttctaaaagcaaagtcagaggaattcagatttggaatcaaggctgcagaggagcaactttcagccagaggcatggatgcttctctgtctcatcagtccttagtagcactatcagagaaactggcaagattaaagcaacagactatacctttgaagaaaaaattggagtcctatttagacttaatgccgaatccgtctcttgctcaagtgaaaattgaagaagcaaagcgagaactagatagcattgaagctgaacttacaagaagagtagacatgatggaactgtgacaaaagccaaataaacatccttttccctaacaaagtaaattgaataggactttacagagttctttttcctcttggcatttcctaataacaaaactttctgtgttcttagattacagaatatcataattgatagaatatggtttcttactgtgtgttgcatttttgtgcccaaatacatagttttcatattaaaaagccttttctctta

SEQ ID NO: 101117 - DNA, 770 bp, Homo sapiens
gcggggcctagggagtgagcggggcgcatctcccgctaggagttcctagtaaagtggcgggagccgcagctatggagccgcaggaggagagagaaacgcaggttgctgcgtggttaaaaaaaatatttggagatcatcctattccacagtatgaggtgaacccacggaccacagagattttacatcacctttcagaacgcaacagggtccgggacagggatgtctacctggtaatagaggacttgaagcagaaagcaagtgaatacgagtcagaagccaagtatcttcaagaccttctcatggagagtgtgaatttttcccccgccaatctctctagcactggttccaggtatctgaatgctttggttgacagtgcggtggcccttgaaacaaaggatacctcgctagctagttttatccctgcagtgaatgatttgacctctgatctctttcgtaccaaatccaaaagtgaagaaatcaagattgaactggaaaaacttgaaaaaaatttaactgcaactttagtattagaaaaatgtctacaagaggatgtcaagaaagcagagttgcatctgtctacagaaagggccaaagttgataatcgtcgtcagaacatggactttctaaaagcaaagtcagaggaattcagatttggaatcaaggctgcagaggagcaactttcagccagaggcatggatgcttctctgtctcatcagtccttagtagcactatcagaggctggcaggattgtaacctaatttaactttctt

SEQ ID NO: 101118 - DNA, 771 bp, Homo sapiens
gcggggcctagggagtgagcggggcgcatctcccgctaggagttcctagtaaagtggcgggagccgcagctatggagccgcaggaggagagagaaacgcaggttgctgcgtggttaaaaaaaatatttggagatcatcctattccacagtatgaggtgaacccacggaccacagagattttacatcacctttcagaacgcaacagggtccgggacagggatgtctacctggtaatagaggacttgaagcagaaagcaagtgaatacgagtcagaagccaagtatcttcaagaccttctcatggagagtgtgaatttttcccccgccaatctctctagcactggttccaggtatctgaatgctttggttgacagtgcggtggcccttgaaacaaaggatacctcgctagctagttttatccctgcagtgaatgatttgacctctgatctctttcgtaccaaatccaaaagtgaagaaatcaagattgaactggaaaaacttgaaaaaaatttaactgcaactttagtattagaaaaatgtctacaagaggatgtcaagaaagcagagttgcatctgtctacagaaagggccaaagttgataatcgtcgtcagaacatggactttctaaaagcaaagtcagaggaattcagatttagtaccaaaggtgtgaaagaacaaccttctagcctgagccatggaagcttccttgcccataagttcttcacagcaccataagggaactgcactgtttaagcccagactattctttgaa

SEQ ID NO: 101119 - DNA, 371 bp, Homo sapiens
gctctgtcctccagactagagtgcagtggcgttatcttagctcactgcaacctccgcctcccaggttcaagcaattctcatgcctcagcctcctgagcagctgggattacaggatagcattgaagctgaacttacaagaagagtagacatgatggaactgtgacaaaagccaaataaacatccttttccctaacaaagtaaattgaataggactttacagagttctttttcctcttggcatttcctaataacaaaactttctgtgttcttagattacagaatatcataattgatagaatatggtttcttactgtgtgttgcatttttgtgcccaaatacatagttttcatattaaaaagccttttctctta

SEQ ID NO: 101120 - DNA, 591 bp, Homo sapiens
cgcccaggctggagtgcagtggtgtgatctcagctcactgcaacctccatctcctgggttcaagtgattctcatgcctcagcctcccaagtagctgggactacaggcctgcaccaccacacccggctaatttttgtgttttagtaaagacagggtttcacaatattggccaggctggtctcgaactcctgacttcaggtgatccgcctgcctcagcctcccaaagtggtaggattagaggcatgagccactgcgcccggcctgactttttcagcttttacttcatacaattttactccatttcaaaaagaaaaataaagaaaaataaagtgatgactaagggatgtagagtttctttttggagtgatgaaaatgtttttaagaataggttgtactgatggggatacaactaaaagccactgaattacatacataccttaggtgggtggattatatgctatgtgaattatgtcttgataaagctgttaaaaatttttaaaaaagcaaacagtcactatggaactctttcatgtttttagccaagtatcttcaagaccttctcatggagagaaggagagaatatgaacgaagg

SEQ ID NO: 101121 - DNA, 221 bp, Homo sapiens
aaaaaaaaaaaaaaaaaaaaaaaaaaaaaaaaaaaaaaaaaaaaaagggcggccgctcgcgatctagaactgttctttttcctcttggcatttcctaataacaaaactttctgtgttcttagattacagaatatcataattgatagaatatggtttcttactgtgtgttgcatttttgtgcccaaatacatagttttcatattaaaaagccttttctctta

SEQ ID NO: 101122 - DNA, 1052 bp, Homo sapiens
gcggggcctagggagtgagcggggcgcatctcccgctaggagttcctagtaaagtggcgggagccgcagctatggagccgcaggaggagagagaaacgcagggaccacagagattttacatcacctttcagaacgcaacagggtccgggacagggatgtctacctggtaatagaggacttgaagcagaaagcaagtgaatacgagtcagaagccaagtatcttcaagaccttctcatggagagtgtgaatttttcccccgccaatctctctagcactggttccaggtatctgaatgctttggttgacagtgcggtggcccttgaaacaaaggatacctcgctagctagttttatccctgcagtgaatgatttgacctctgatctctttcgtaccaaatccaaaagtgaagaaatcaagattgaactggaaaaacttgaaaaaaatttaactgcaactttagtattagaaaaatgtctacaagaggatgtcaagaaagcagagttgcatctgtctacagaaagggccaaagttgataatcgtcgtcagaacatggactttctaaaagcaaagtcagaggaattcagatttggaatcaaggctgcagaggagcaactttcagccagaggcatggatgcttctctgtctcatcagtccttagtagcactatcagagaaactggcaagattaaagcaacagactatacctttgaagaaaaaattggagtcctatttagacttaatgccgaatccgtctcttgctcaagtgaaaattgaagaagcaaagcgagaactagatagcattgaagctgaacttacaagaagagtagacatgatggaactgtgacaaaagccaaataaacatccttttccctaacaaagtaaattgaataggactttacagagttctttttcctcttggcatttcctaataacaaaactttctgtgttcttagattacagaatatcataattgatagaatatggtttcttactgtgtgttgcatttttgtgcccaaatacatagttttcatattaaaaagccttttctctta

SEQ ID NO: 101123 - DNA, 619 bp, Homo sapiens
tagcgagtgttttgggtgttcttagtatatctctactctctttgtattcgggatgtcaagaaagcagagttgcatctgtctacagaaagggccaaagttgataatcgtcgtcagaacatggactttctaaaagcaaagtcagaggaattcagatttggaatcaaggctgcagaggagcaactttcagccagaggcatggatgcttctctgtctcatcagtccttagtagcactatcagagaaactggcaagattaaagcaacagactatacctttgaagaaaaaattggagtcctatttagacttaatgccgaatccgtctcttgctcaagtgaaaattgaagaagcaaagcgagaactagatagcattgaagctgaacttacaagaagagtagacatgatggaactgtgacaaaagccaaataaacatccttttccctaacaaagtaaattgaataggactttacagagttctttttcctcttggcatttcctaataacaaaactttctgtgttcttagattacagaatatcataattgatagaatatggtttcttactgtgtgttgcatttttgtgcccaaatacatagttttcatattaaaaagccttttctctta

SEQ ID NO: 101124 - DNA, 721 bp, Homo sapiens
gcggggcctagggagtgagcggggcgcatctcccgctaggagttcctagtaaagtggcgggagccgcagctatggagccgcaggaggagagagaaacgcaggttgctgcgtggttaaaaaaaatatttggagatcatcctattccacagtatgaggtgaacccacggaccacagagattttacatcacctttcagaacgcaacagggtccgggacagggatgtctacctggtaatagaggacttgaagcagaaagcaagtgaatacgagtcagaaggagcaactttcagccagaggcatggatgcttctctgtctcatcagtccttagtagcactatcagagaaactggcaagattaaagcaacagactatacctttgaagaaaaaattggagtcctatttagacttaatgccgaatccgtctcttgctcaagtgaaaattgaagaagcaaagcgagaactagatagcattgaagctgaacttacaagaagagtagacatgatggaactgtgacaaaagccaaataaacatccttttccctaacaaagtaaattgaataggactttacagagttctttttcctcttggcatttcctaataacaaaactttctgtgttcttagattacagaatatcataattgatagaatatggtttcttactgtgtgttgcatttttgtgcccaaatacatagttttcatattaaaaagccttttctctta

SEQ ID NO: 101125 - DNA, 498 bp, Homo sapiens
gcactccagcctgggtgacagagcaagactcggtctcaaaaaaaaaagaagaaaaagaaaaatatttgatggtggtcacttttcaaataattttttaactgaactcctttttttggtaattgtaggagcaactttcagccagaggcatggatgcttctctgtctcatcagtccttagtagcactatcagagaatccgtctcttgctcaagtgaaaattgaagaagcaaagcgagaactagatagcattgaagctgaacttacaagaagagtagacatgatggaactgtgacaaaagccaaataaacatccttttccctaacaaagtaaattgaataggactttacagagttctttttcctcttggcatttcctaataacaaaactttctgtgttcttagattacagaatatcataattgatagaatatggtttcttactgtgtgttgcatttttgtgcccaaatacatagttttcatattaaaaagccttttctctta

SEQ ID NO: 101126 - DNA, 1116 bp, Homo sapiens
gcggggcctagggagtgagcggggcgcatctcccgctaggagttcctagtaaagtggcgggagccgcagctatggagccgcaggaggagagagaaacgcaggttgctgcgtggttaaaaaaaatatttggagatcatcctattccacagtatgaggtgaacccacggaccacagagattttacatcacctttcagaacgcaacagggtccgggacagggatgtctacctggtaatagaggacttgaagcagaaagcaagtgaatacgagtcagaagccaagtatcttcaagaccttctcatggagagtgtgaatttttcccccgccaatctctctagcactggttccaggtatctgaatgctttggttgacagtgcggtggcccttgaaacaaaggatacctcgctagctagttttatccctgcagtgaatgatttgacctctgatctctttcgtaccaaatccaaaagtgaagaaatcaagattgaactggaaaaacttgaaaaaaatttaactgcaactttagtattagaaaaatgtctacaagaggatgtcaagaaagcagagttgcatctgtctacagaaagggccaaagttgataatcgtcgtcagaacatggactttctaaaagcaaagtcagaggaattcagatttggaatcaaggctgcagaggagcaactttcagccagaggcatggatgcttctctgtctcatcagtccttagtagcactatcagagaaactggcaagattaaagcaacagactatacctttgaagaaaaaattggagtcctatttagacttaatgccgaatccgtctcttgctcaagtgaaaattgaagaagcaaagcgagaactagatagcattgaagctgaacttacaagaagagtagacatgatggaactgtgacaaaagccaaataaacatccttttccctaacaaagtaaattgaataggactttacagagttctttttcctcttggcatttcctaataacaaaactttctgtgttcttagattacagaatatcataattgatagaatatggtttcttactgtgtgttgcatttttgtgcccaaatacatagttttcatattaaaaagccttttctctta

SEQ ID NO: 101127 - DNA, 622 bp, Homo sapiens
  misc_feature (52)..(52): n is a, c, g, or t
tattaatattattaaaaatataacaaaatttaatagagaatgaaaagctcangggatgtcaagaaagcagagttgcatctgtctacagaaagggccaaagttgataatcgtcgtcagaacatggactttctaaaagcaaagtcagaggaattcagatttggaatcaaggctgcagaggagcaactttcagccagaggcatggatgcttctctgtctcatcagtccttagtagcactatcagagaaactggcaagattaaagcaacagactatacctttgaagaaaaaattggagtcctatttagacttaatgccgaatccgtctcttgctcaagtgaaaattgaagaagcaaagcgagaactagatagcattgaagctgaacttacaagaagagtagacatgatggaactgtgacaaaagccaaataaacatccttttccctaacaaagtaaattgaataggactttacagagttctttttcctcttggcatttcctaataacaaaactttctgtgttcttagattacagaatatcataattgatagaatatggtttcttactgtgtgttgcatttttgtgcccaaatacatagttttcatattaaaaagccttttctctta

SEQ ID NO: 101128 - DNA, 1138 bp, Homo sapiens
gcggggcctagggagtgagcggggcgcatctcccgctaggagttcctagtaaagtggcgggagccgcagctatggagccgcaggaggagagagaaacgcaggttgctgcgtggttaaaaaaaatatttggagatcatcctattccacagtatgaggtgaacccacggaccacagagattttacatcacctttcagaacgcaacagggtccgggacagggatgtctacctggtaatagaggacttgaagcagaaagcaagtgaatacgagtcagaagccaagtatcttcaagaccttctcatggagagtgtgaatttttcccccgccaatctctctagcactggttccaggtatctgaatgctttggttgacagtgcggtggcccttgaaacaaaggatacctcgctagctagttttatccctgcagtgaatgatttgacctctgatctctttcgtaccaaatccaaaagtgaagaaatcaagattgaactggaaaaacttgaaaaaaatttaactgcaactttagtattagaaaaatgtctacaagaggatgtcaagaaagcagagttgcatctgtctacagaaagggccaaagttgataatcgtcgtcagaacatggactttctaaaagcaaagtcagaggaattcagatttggaatcaaggctgcagaggagcaactttcagccagaggcatggatgcttctctgtctcatcagtccttagtagcactatcagagaaactggcaagattaaagcaacagactatacctttgaagaaaaaattggagtcctatttagacttaatgccgaatccgtctcttgctcaagtgaaaattgaagaagcaaagcgagaactagatagcattgaagctgaacttacaagaagagtagacatgatggaactgtgacaaaagccaaataaacatccttttccctaacaaagtaaattgaataggactttacagagttctttttcctcttggcatttcctaataacaaaactttctgtgttcttagattacagaatatcataattgatagaaaaggctttttaatatgaaaactatgtatttgggcacaaaaatgcaacacacagtaagaaaccatattctatcaactatgatattctgtaatctaa

SEQ ID NO: 101129 - DNA, 486 bp, Homo sapiens
  misc_feature (374)..(374): n is a, c, g, or t
gcggggcctagggagtgagcggggcgcatctcccgctaggagttcctagtaaagtggcgggagccgcagctatggagccgcaggaggagagagaaacgcaggttgctgcgtggttaaaaaaaatatttggagatcatcctattccacagtatgaggtgaacccacggaccacagagattttacatcacctttcagaacgcaacagggtccgggacagggatgtctacctggtaatagaggacttgaagcagaaagcaagtgaatacgagtcagaagccaagtatcttcaagaccttctcatggagagtgtgaatttttcccccgccaaatccaaaagtgaagaaatcaagattgaactggaaaaacttgaaganacatatagcgtggacactgtgaggatcagagagagcttgtcgtaccgacacgaggacggcgagaacaaggggagagaagatcgtgggcgcgaaaaacggggcaagggaaaag

SEQ ID NO: 101130 - DNA, 4771 bp, Homo sapiens
cagtcgcgcgcggtgcagtcgggaggtggaggcaccggctgcattgttttcgggatcgaggggtgagggcgctatggcacccggctgcaaaactgagttacgcagcgtgacaaatggtcagtctaaccaaccaagtaatgaaggtgatgccatcaaagtttttgtgcgaattcgtcctcctgcagaaagatctgggtcagctgatggagagcagaacttatgcttatctgtgctgtcctccacgagtctccggctgcactccaaccctgagcccaagaccttcacgtttgatcatgttgcagatgtggataccactcaggaatctgtatttgcaactgtggctaaaagcattgtggagtcttgcatgagcggttataatggtaccatctttgcatatggacagactggctcagggaagacatttactatgatgggaccatctgaatctgataatttttctcataacctgagaggagtaatcccacgaagttttgaatatttgttttccttaattgatcgtgaaaaagaaaaggctggagctggaaagagtttcctttgtaagtgttcctttattgaaatctacaacgagcagatatatgatctactggactctgcatcggctggactgtacttaagggagcatatcaagaagggagtctttgttgttggtgcggtggagcaggtggtaacctcagctgctgaagcctatcaggtgttgtctggaggatggaggaatagacgtgtggcatcaacatcaatgaacagagaatcgtctaggtctcatgccgtctttacaattacaatagagtcaatggagaaaagtaatgagattgtgaatatacggacctccctactcaacctggtggatttagcaggatctgaaaggcaaaaagatacccatgcagaagggatgagattgaaggaagcaggtaacataaatcgatcattgagctgcctgggccaagtgattacagcacttgtcgacgtgggtaatggaaaacagagacatgtttgctacagagactccaaacttaccttcttactacgggattcccttggaggtaatgccaaaacagccataattgcaaatgttcatcctggatccaggtgttttggggaaaccctatcaacacttaactttgctcaaagagccaagctgattaaaaacaaggcagtagtaaatgaagacacccaaggaaatgtgagccagctccaagctgaagtgaagaggctcaaagaacaactggcggagcttgcttcaggacagacaccaccagaaagcttcctgaccagagacaaaaagaagactaactatatggagtatttccaggaagcaatgttattctttaagaaatctgaacaggaaaagaagtctctgatagaaaaagttacccaattagaagacctcaccctcaaaaaggaaaaatttattcaatctaataaaatgattgtgaaattccgagaggatcaaataatacgcttggaaaagctccacaaggaatcccggggaggttttctgcctgaggagcaggatcgtttgctctcagaattaaggaatgagattcaaactctgcgagaacaaatagagcaccaccccagagttgcaaagtatgctatggaaaatcattccctcagggaggagaatagaagactgagattattagagcctgtgaaaagagctcaagaaatggatgcccagaccattgcaaaactagaaaaagctttctctgaaataagtggcatggagaaaagtgacaaaaatcagcaaggattttcacctaaagctcagaaagagccatgtttgtttgcaaacactgagaagttaaaagcacaactcctgcaaattcagacagagctgaataattcaaagcaagaatatgaagaattcaaagaacttactaggaaaaggcagctagaattggaatcagagcttcagtctttgcaaaaagcgaaccttaatcttgaaaaccttttggaagcaacaaaagcctgcaagcggcaagaagtttctcagctgaataaaattcatgctgaaacacttaagattataactacaccaaccaaggcctaccaacttcattcccgaccagtaccaaaattaagccctgaaatgggaagctttggctctctatacactcagaattctagcatattagataatgatatattaaatgagccagttcctcctgagatgaatgaacaagcttttgaggccatttctgaagagcttagaacagtgcaggaacaaatgagtgctcttcaagccaaactggatgaagaagagcataaaaacctaaagcttcagcagcatgttgacaaactggaacatcattctacccaaatgcaggagcttttctcatcagaaagaattgattggaccaaacagcaggaagagcttctctcacagttgaatgtccttgaaaagcagcttcaagagactcaaactaaaaatgactttttgaaaagtgaggtacatgacctgcgagtagtccttcattctgctgacaaggagctttcttcagtgaaattggaatatagttcattcaaaacgaatcaggagaaagaattcaacaaactttccgaaagacacatgcatgtacagcttcaattagataatctcaggttagaaaacgaaaagctgcttgagagcaaagcctgcctacaggattcctatgacaacttacaagaaataatgaaatttgagattgaccaactttcaagaaacctccaaaacttcaaaaaagaaaatgaaactctgaaatctgatctgaataatttgatggagcttcttgaggcagaaaaagaacgcaataacaaattatcattacagtttgaagaagataaagaaaacagttctaaagaaatcttaaaagttcttgaggctgtacgtcaggagaaacagaaagagacggccaagtgtgagcagcagatggcaaaagtacagaaactagaagagagcttgcttgctactgaaaaagtgatcagttccctggaaaagtctagagattctgataagaaagttgtagctgacctcatgaaccagatccaggagctaagaacatcggtctgtgagaaaacagaaactatagacaccctgaaacaagaactgaaggacataaattgcaaatacaactctgctttggttgacagagaagagagcagagtgttgatcaagaagcaggaagtggatattctggatctgaaagaaacccttaggctgagaatactttctgaggacatagagagggatatgctctgtgaggacctggctcatgccactgagcagctgaacatgctcacagaggcctcaaaaaaacactcggggctgctgcagtctgcccaggaagaactgaccaagaaggaagccctgattcaggaacttcagcacaagctaaaccaaaagaaagaggaagtagaacagaagaagaatgaatataacttcaaaatgaggcaactagaacatgtgatggattctgctgctgaggatccccagagtcctaagacaccacctcactttcaaacacatttggcaaaactcctggaaacacaagaacaagagatagaagatggaagagcctctaagacttctttggaacaccttgtaacaaagctaaatgaagacagagaagtcaaaaatgctgaaatcctcagaatgaaggagcagttgcgtgaaatggaaaacctacgcctggaaagtcagcagttaatagagaaaaactggctcctgcaaggtcagctggatgatattaaaagacaaaaggaaaacagtgatcagaatcatccagataatcaacagctgaagaatgaacaagaagaaagtatcaaagaaagacttgcaaaaagtaaaatagttgaagaaatgctgaaaatgaaagcagacctagaagaagtccaaagtgccctttacaacaaagagatggaatgccttagaatgactgatgaagtcgaacgaacccaaactttggagtctaaagcattccaggaaaaagaacaactgagatcaaagctggaagaaatgtatgaagaaagagagagaacatcccaggagatggaaatgttaaggaagcaggtggagtgtcttgctgaggaaaatggaaagttggtaggtcaccaaaatttgcatcagaagattcagtacgtagtgcgactaaagaaggaaaatgtcaggcttgctgaggagacagaaaagttgcgtgccgaaaatgtatttttaaaagaaaagaaaagaagtgaatcttgaggattccggtcagctacctaggcatcaccttgtttgaagatgtttcttctcttttacaagtaagacctactcctggccacttaggagagctgaatttatggaccttaattattaaatgtttataaggtggtggtaaccacctcaagtttctgatgaacattctgcatccatatacaccctgtgacagtcagcagtctgctattaagtggcctacttcaaggctttgaatcaacttaagggaaaaccttttgtctttgtaaaaataaaagcctgtagctaaggtttacagtggacattagccagatcattttcttcttagattatgccataatctcctttgattcttatggaagttctaacaatatatggtggttccaacacctgcagtgagtttaatgactgacttagtagcaggtacaagaagcaaacttgttaatatagattatttttgtattcttactttaggtattttcttgagcattttccatgactgtaaataaagccattttttaagataataattaaagtgac

SEQ ID NO: 101131 - DNA, 187 bp, Homo sapiens
tggcagatggagtcttgctctgtcacccagctggatgatattaaaagacaaaaggaaaacaggtgagaaagaaccacgagaactctatgggctaaatcttggcctgcctgtgtggagttaaatgaggttggaattggtttcacaggtttcccaaggtgtacaatgtttcccactaatccaggagatg

SEQ ID NO: 101132 - DNA, 3879 bp, Homo sapiens
taagaatcagaagcaactggaaatggctgcttaacacacaaaagaacaaaaccaagagccttctactagtcactctcaatggcagtagtaaatgaagacacccaaggaaatgtgagccagctccaagctgaagtgaagaggctcaaagaacaactggcggagcttgcttcaggacagacaccaccagaaagcttcctgaccagagacaaaaagaagactaactatatggagtatttccaggaagcaatgttattctttaagaaatctgaacaggaaaagaagtctctgatagaaaaagttacccaattagaagacctcaccctcaaaaaggaaaaatttattcaatctaataaaatgattgtgaaattccgagaggatcaaataatacgcttggaaaagctccacaaggaatcccggggaggttttctgcctgaggagcaggatcgtttgctctcagaattaaggaatgagattcaaactctgcgagaacaaatagagcaccaccccagagttgcaaagtatgctatggaaaatcattccctcagggaggagaatagaagactgagattattagagcctgtgaaaagagctcaagaaatggatgcccagaccattgcaaaactagaaaaagctttctctgaaataagtggcatggagaaaagtgacaaaaatcagcaaggattttcacctaaagctcagaaagagccatgtttgtttgcaaacactgagaagttaaaagcacaactcctgcaaattcagacagagctgaataattcaaagcaagaatatgaagaattcaaagaacttactaggaaaaggcagctagaattggaatcagagcttcagtctttgcaaaaagcgaaccttaatcttgaaaaccttttggaagcaacaaaagcctgcaagcggcaagaagtttctcagctgaataaaattcatgctgaaacacttaagattataactacaccaaccaaggcctaccaacttcattcccgaccagtaccaaaattaagccctgaaatgggaagctttggctctctatacactcagaattctagcatattagataatgatatattaaatgagccagttcctcctgagatgaatgaacaagcttttgaggccatttctgaagagcttagaacagtgcaggaacaaatgagtgctcttcaagccaaactggatgaagaagagcataaaaacctaaagcttcagcagcatgttgacaaactggaacatcattctacccaaatgcaggagcttttctcatcagaaagaattgattggaccaaacagcaggaagagcttctctcacagttgaatgtccttgaaaagcagcttcaagagactcaaactaaaaatgactttttgaaaagtgaggtacatgacctgcgagtagtccttcattctgctgacaaggagctttcttcagtgaaattggaatatagttcattcaaaacgaatcaggagaaagaattcaacaaactttccgaaagacacatgcatgtacagcttcaattagataatctcaggttagaaaacgaaaagctgcttgagagcaaagcctgcctacaggattcctatgacaacttacaagaaataatgaaatttgagattgaccaactttcaagaaacctccaaaacttcaaaaaagaaaatgaaactctgaaatctgatctgaataatttgatggagcttcttgaggcagaaaaagaacgcaataacaaattatcattacagtttgaagaagataaagaaaacagttctaagccctggtatacagtggtgaacgtagagcttacatccagttgagagacaagcaattgacatttactcatttattcaaacatttattgatatccaacaagccaggcactgatctggtgaattccagaacatttagagttgaaacagtgaacaaaacatccctgtcctcgtggattttaacttctagcacagggagacagagaaatcttaaaagttcttgaggctgtacgtcaggagaaacagaaagagacggccaagtgtgagcagcagatggcaaaagtacagaaactagaagagagcttgcttgctactgaaaaagtgatcagttccctggaaaagtctagagattctgataagaaagttgtagctgacctcatgaaccagatccaggagctaagaacatcggtctgtgagaaaacagaaactatagacaccctgaaacaagaactgaaggacataaattgcaaatacaactctgctttggttgacagagaagagagcagagtgttgatcaagaagcaggaagtggatattctggatctgaaagaaacccttaggctgagaatactttctgaggacatagagagggatatgctctgtgaggacctggctcatgccactgagcagctgaacatgctcacagaggcctcaaaaaaacactcggggctgctgcagtctgcccaggaagaactgaccaagaaggaagccctgattcaggaacttcagcacaagctaaaccaaaagaaagaggaagtagaacagaagaagaatgaatataacttcaaaatgaggcaactagaacatgtgatggattctgctgctgaggatccccagagtcctaagacaccacctcactttcaaacacatttggcaaaactcctggaaacacaagaacaagagatagaagatggaagagcctctaagacttctttggaacaccttgtaacaaagctaaatgaagacagagaagtcaaaaatgctgaaatcctcagaatgaaggagcagttgcgtgaaatggaaaacctacgcctggaaagtcagcagttaatagagaaaaactggctcctgcaaggtcagctggatgatattaaaagacaaaaggaaaacagtgatcagaatcatccagataatcaacagctgaagaatgaacaagaagaaagtatcaaagaaagacttgcaaaaagtaaaatagttgaagaaatgctgaaaatgaaagcagacctagaagaagtccaaagtgccctttacaacaaagagatggaatgccttagaatgactgatgaagtcgaacgaacccaaactttggagtctaaagcattccaggaaaaagaacaactgagatcaaagctggaagaaatgtatgaagaaagagagagaacatcccaggagatggaaatgttaaggaagcaggtggagtgtcttgctgaggaaaatggaaagttggtaggtcaccaaaatttgcatcagaagattcagtacgtagtgcgactaaagaaggaaaatgtcaggcttgctgaggagacagaaaagttgcgtgccgaaaatgtatttttaaaagaaaagaaaagaagtgaatcttgaggattccggtcagctacctaggcatcaccttgtttgaagatgtttcttctcttttacaagtaagacctactcctggccacttaggagagctgaatttatggaccttaattattaaatgtttataaggtggtggtaaccacctcaagtttctgatgaacattctgcatccatatacaccctgtgacagtcagcagtctgctattaagtggcctacttcaaggctttgaatcaacttaagggaaaaccttttgtctttgtaaaaataaaagcctgtagctaaggtttacagtggacattagccagatcattttcttcttagattatgccataatctcctttgattcttatggaagttctaacaatatatggtggttccaacacctgcagtgagtttaatgactgacttagtagcaggtacaagaagcaaacttgttaatatagattatttttgtattcttactttaggtattttcttgagcattttccatgactgtaaataaagccattttttaagataataattaaagtgac

SEQ ID NO: 101133 - DNA, 5105 bp, Homo sapiens
cagtcgcgcgcggtgcagtcgggaggtggaggcaccggctgcattgttttcgggatcgaggggtgagggcgctatggcacccggctgcaaaactgagttacgcagcgtgacaaatggtcagtctaaccaaccaagtaatgaaggtgatgccatcaaagtttttgtgcgaattcgtcctcctgcagaaagatctgggtcagctgatggagagcagaacttatgcttatctgtgctgtcctccacgagtctccggctgcactccaaccctgagcccaagaccttcacgtttgatcatgttgcagatgtggataccactcaggaatctgtatttgcaactgtggctaaaagcattgtggagtcttgcatgagcggttataatggtaccatctttgcatatggacagactggctcagggaagacatttactatgatggtatgcccagcactcttcaagacactgttggtttacttgaatacaaggcagtgtcctggctcttgtggaccttctgattctcaggcagagggaatacacaattaaaagcaaatacacctctagaaattatgccaaaggaccatctgaatctgataatttttctcataacctgagaggagtaatcccacgaagttttgaatatttgttttccttaattgatcgtgaaaaagaaaaggctggagctggaaagagtttcctttgtaagtgttcctttattgaaatctacaacgagcagatatatgatctactggactctgcatcggctggactgtacttaagggagcatatcaagaagggagtctttgttgttggtgcggtggagcaggtggtaacctcagctgctgaagcctatcaggtgttgtctggaggatggaggaatagacgtgtggcatcaacatcaatgaacagagaatcgtctaggtctcatgccgtctttacaattacaatagagtcaatggagaaaagtaatgagattgtgaatatacggacctccctactcaacctggtggatttagcaggatctgaaaggcaaaaagatacccatgcagaagggatgagattgaaggaagcaggtaacataaatcgatcattgagctgcctgggccaagtgattacagcacttgtcgacgtgggtaatggaaaacagagacatgtttgctacagagactccaaacttaccttcttactacgggattcccttggaggtaatgccaaaacagccataattgcaaatgttcatcctggatccaggtgttttggggaaaccctatcaacacttaactttgctcaaagagccaagctgattaaaaacaaggcagtagtaaatgaagacacccaaggaaatgtgagccagctccaagctgaagtgaagaggctcaaagaacaactggcggagcttgcttcaggacagacaccaccagaaagcttcctgaccagagacaaaaagaagactaactatatggagtatttccaggaagcaatgttattctttaagaaatctgaacaggaaaagaagtctctgatagaaaaagttacccaattagaagacctcaccctcaaaaaggaaaaatttattcaatctaataaaatgattgtgaaattccgagaggatcaaataatacgcttggaaaagctccacaaggaatcccggggaggttttctgcctgaggagcaggatcgtttgctctcagaattaaggaatgagattcaaactctgcgagaacaaatagagcaccaccccagagttgcaaagtatgctatggaaaatcattccctcagggaggagaatagaagactgagattattagagcctgtgaaaagagctcaagaaatggatgcccagaccattgcaaaactagaaaaagctttctctgaaataagtggcatggagaaaagtgacaaaaatcagcaaggattttcacctaaagctcagaaagagccatgtttgtttgcaaacactgagaagttaaaagcacaactcctgcaaattcagacagagctgaataattcaaagcaagaatatgaagaattcaaagaacttactaggaaaaggcagctagaattggaatcagagcttcagtctttgcaaaaagcgaaccttaatcttgaaaaccttttggaagcaacaaaagcctgcaagcggcaagaagtttctcagctgaataaaattcatgctgaaacacttaagattataactacaccaaccaaggcctaccaacttcattcccgaccagtaccaaaattaagccctgaaatgggaagctttggctctctatacactcagaattctagcatattagataatgatatattaaatgagccagttcctcctgagatgaatgaacaagcttttgaggccatttctgaagagcttagaacagtgcaggaacaaatgagtgctcttcaagccaaactggatgaagaagagcataaaaacctaaagcttcagcagcatgttgacaaactggaacatcattctacccaaatgcaggagcttttctcatcagaaagaattgattggaccaaacagcaggaagagcttctctcacagttgaatgtccttgaaaagcagcttcaagagactcaaactaaaaatgactttttgaaaagtgaggtacatgacctgcgagtagtccttcattctgctgacaaggagctttcttcagtgaaattggaatatagttcattcaaaacgaatcaggagaaagaattcaacaaactttccgaaagacacatgcatgtacagcttcaattagataatctcaggttagaaaacgaaaagctgcttgagagcaaagcctgcctacaggattcctatgacaacttacaagaaataatgaaatttgagattgaccaactttcaagaaacctccaaaacttcaaaaaagaaaatgaaactctgaaatctgatctgaataatttgatggagcttcttgaggcagaaaaagaacgcaataacaaattatcattacagtttgaagaagataaagaaaacagttctaagccctggtatacagtggtgaacgtagagcttacatccagttgagagacaagcaattgacatttactcatttattcaaacatttattgatatccaacaagccaggcactgatctggtgaattccagaacatttagagttgaaacagtgaacaaaacatccctgtcctcgtggattttaacttctagcacagggagacagagaaatcttaaaagttcttgaggctgtacgtcaggagaaacagaaagagacggccaagtgtgagcagcagatggcaaaagtacagaaactagaagagagcttgcttgctactgaaaaagtgatcagttccctggaaaagtctagagattctgataagaaagttgtagctgacctcatgaaccagatccaggagctaagaacatcggtctgtgagaaaacagaaactatagacaccctgaaacaagaactgaaggacataaattgcaaatacaactctgctttggttgacagagaagagagcagagtgttgatcaagaagcaggaagtggatattctggatctgaaagaaacccttaggctgagaatactttctgaggacatagagagggatatgctctgtgaggacctggctcatgccactgagcagctgaacatgctcacagaggcctcaaaaaaacactcggggctgctgcagtctgcccaggaagaactgaccaagaaggaagccctgattcaggaacttcagcacaagctaaaccaaaagaaagaggaagtagaacagaagaagaatgaatataacttcaaaatgaggcaactagaacatgtgatggattctgctgctgaggatccccagagtcctaagacaccacctcactttcaaacacatttggcaaaactcctggaaacacaagaacaagagatagaagatggaagagcctctaagacttctttggaacaccttgtaacaaagctaaatgaagacagagaagtcaaaaatgctgaaatcctcagaatgaaggagcagttgcgtgaaatggaaaacctacgcctggaaagtcagcagttaatagagaaaaactggctcctgcaaggtcagctggatgatattaaaagacaaaaggaaaacagtgatcagaatcatccagataatcaacagctgaagaatgaacaagaagaaagtatcaaagaaagacttgcaaaaagtaaaatagttgaagaaatgctgaaaatgaaagcagacctagaagaagtccaaagtgccctttacaacaaagagatggaatgccttagaatgactgatgaagtcgaacgaacccaaactttggagtctaaagcattccaggaaaaagaacaactgagatcaaagctggaagaaatgtatgaagaaagagagagaacatcccaggagatggaaatgttaaggaagcaggtggagtgtcttgctgaggaaaatggaaagttggtaggtcaccaaaatttgcatcagaagattcagtacgtagtgcgactaaagaaggaaaatgtcaggcttgctgaggagacagaaaagttgcgtgccgaaaatgtatttttaaaagaaaagaaaagaagtgaatcttgaggattccggtcagctacctaggcatcaccttgtttgaagatgtttcttctcttttacaagtaagacctactcctggccacttaggagagctgaatttatggaccttaattattaaatgtttataaggtggtggtaaccacctcaagtttctgatgaacattctgcatccatatacaccctgtgacagtcagcagtctgctattaagtggcctacttcaaggctttgaatcaacttaagggaaaaccttttgtctttgtaaaaataaaagcctgtagctaaggtttacagtggacattagccagatcattttcttcttagattatgccataatctcctttgattcttatggaagttctaacaatatatggtggttccaacacctgcagtgagtttaatgactgacttagtagcaggtacaagaagcaaacttgttaatatagattatttttgtattcttactttaggtattttcttgagcattttccatgactgtaaataaagccattttttaagataataattaaagtgac

SEQ ID NO: 101134 - DNA, 3274 bp, Homo sapiens
taagaatcagaagcaactggaaatggctgcttaacacacaaaagaacaaaaccaagagccttctactagtcactctcaatggcagtagtaaatgaagacacccaaggaaatgtgagccagctccaagctgaagtgaagaggctcaaagaacaactggcggagcttgcttcaggacagacaccaccagaaagcttcctgaccagagacaaaaagaagactaactatatggagtatttccaggaagcaatgttattctttaagaaatctgaacaggaaaagaagtctctgatagaaaaagttacccaattagaagacctcaccctcaaaaaggaaaaatttattcaatctaataaaatgattgtgaaattccgagaggatcaaataatacgcttggaaaagctccacaaggaatcccggggaggttttctgcctgaggagcaggatcgtttgctctcagaattaaggaatgagattcaaactctgcgagaacaaatagagcaccaccccagagttgcaaagtatgctatggaaaatcattccctcagggaggagaatagaagactgagattattagagcctgtgaaaagagctcaagaaatggatgcccagaccattgcaaaactagaaaaagctttctctgaaataagtggcatggagaaaagtgacaaaaatcagcaaggattttcacctaaagctcagaaagagccatgtttgtttgcaaacactgagaagttaaaagcacaactcctgcaaattcagacagagctgaataattcaaagcaagaatatgaagaattcaaagaacttactaggaaaaggcagctagaattggaatcagagcttcagtctttgcaaaaagcgaaccttaatcttgaaaaccttttggaagcaacaaaagcctgcaagcggcaagaagtttctcagctgaataaaattcatgctgaaacacttaagattataactacaccaaccaaggcctaccaacttcattcccgaccagtaccaaaattaagccctgaaatgggaagctttggctctctatacactcagaattctagcatattagataatgatatattaaatgagccagttcctcctgagatgaatgaacaagcttttgaggccatttctgaagagcttagaacagtgcaggaacaaatgagtgctcttcaagccaaactggatgaagaagagcataaaaacctaaagcttcagcagcatgttgacaaactggaacatcattctacccaaatgcaggagcttttctcatcagaaagaattgattggaccaaacagcaggaagagcttctctcacagttgaatgtccttgaaaagcagcttcaagagactcaaactaaaaatgactttttgaaaagtgaggtacatgacctgcgagtagtccttcattctgctgacaaggagctttcttcagtgaaattggaatatagttcattcaaaacgaatcaggagaaagaattcaacaaactttccgaaagacacatgcatgtacagcttcaattagataatctcaggttagaaaacgaaaagctgcttgagagcaaagcctgcctacaggattcctatgacaacttacaagaaataatgaaatttgagattgaccaactttcaagaaacctccaaaacttcaaaaaagaaaatgaaactctgaaatctgatctgaataatttgatggagcttcttgaggcagaaaaagaacgcaataacaaattatcattacagtttgaagaagataaagaaaacagttctaagccctggtatacagtggtgaacgtagagcttacatccagttgagagacaagcaattgacatttactcatttattcaaacatttattgatatccaacaagccaggcactgatctggtgaattccagaacatttagagttgaaacagtgaacaaaacatccctgtcctcgtggattttaacttctagcacagggagacagagaaatcttaaaagttcttgaggctgtacgtcaggagaaacagaaagagacggccaagtgtgagcagcagatggcaaaagtacagaaactagaagagagcttgcttgctactgaaaaagtgatcagttccctggaaaagtctagagattctgataagaaagttgtagctgacctcatgaaccagatccaggagctaagaacatcggtctgtgagaaaacagaaactatagacaccctgaaacaagaactgaaggacataaattgcaaatacaactctgctttggttgacagagaagagagcagagtgttgatcaagaagcaggaagtggatattctggatctgaaagaaacccttaggctgagaatactttctgaggacatagagagggatatgctctgtgaggacctggctcatgccactgagcagctgaacatgctcacagaggcctcaaaaaaacactcggggctgctgcagtctgcccaggaagaactgaccaagaaggaagccctgattcaggaacttcagcacaagctaaaccaaaagaaagaggaagtagaacagaagaagaatgaatataacttcaaaatgaggcaactagaacatgtgatggattctgctgctgaggatccccagagtcctaagacaccacctcactttcaaacacatttggcaaaactcctggaaacacaagaacaagagatagaagatggaagagcctctaagacttctttggaacaccttgtaacaaagctaaatgaagacagagaagtcaaaaatgctgaaatcctcagaatgaaggagcagttgcgtgaaatggaaaacctacgcctggaaagtcagcagttaatagagaaaaactggctcctgcaaggtcagctggatgatattaaaagacaaaaggaaaacagtgatcagaatcatccagataatcaacagctgaagaatgaacaagaagaaagtatcaaagaaagacttgcaaaaagtaaaaaaaaaaaaaaaaaaaaaaaaaaaaaaaaaaaaaaaaaaaaaaaaaaaaaaaaaaaaaaaaaaaaaaaaaaaaacaaaaataacacgaaaaagaagaaaccaaaaaaaaaaaaaaacacaacaaaagaaagagaaaacaaaaagaggggcgagacagagcgaggagagacgaaggcgcactatacaacccacagagacgcggccacgcacagcacaacaaacaacgccacggtacagggaaaaaccggagcaaaacagggaacccggaaaaagacaagaaaccgccggacggagacacacgagaagacaaaaaacaaga

SEQ ID NO: 101135 - DNA, 1464 bp, Homo sapiens
taagaatcagaagcaactggaaatggctgcttaacacacaaaagaacaaaaccaagagccttctactagtcactctcaatggcagtagtaaatgaagacacccaaggaaatgtgagccagctccaagctgaagtgaagaggctcaaagaacaactggcggagcttgcttcaggacagacaccaccagaaagcttcctgaccagagacaaaaagaagactaactatatggagtatttccaggaagcaatgttattctttaagaaatctgaacaggaaaagaagtctctgatagaaaaagttacccaattagaagacctcaccctcaaaaaggaaaaatttattcaatctaataaaatgattgtgaaattccgagaggatcaaataatacgcttggaaaagctccacaaggaatcccggggaggttttctgcctgaggagcaggatcgtttgctctcagaattaaggaatgagattcaaactctgcgagaacaaatagagcaccaccccagagttgcaaagtatgctatggaaaatcattccctcagggaggagaatagaagactgagattattagagcctgtgaaaagagctcaagaaatggatgcccagaccattgcaaaactagaaaaagctttctctgaaataagtggcatggagaaaagtgacaaaaatcagcaaggattttcacctaaagctcagaaagagccatgtttgtttgcaaacactgagaagttaaaagcacaactcctgcaaattcagacagagctgaataattcaaagcaagaatatgaagaattcaaagaacttactaggaaaaggcagctagaattggaatcagagcttcagtctttgcaaaaagcgaaccttaatcttgaaaaccttttggaagcaacaaaagcctgcaagcggcaagaagtttctcagctgaataaaattcatgctgaaacacttaagattataactacaccaaccaaggcctaccaacttcattcccgaccagtaccaaaattaagccctgaaatgggaagctttggctctctatacactcagaattctagcatattagataatgatatattaaatgagccagttcctcctgagatgaatgaacaagcttttgaggccatttctgaagagcttagaacagtgcaggaacaaatgagtgctcttcaagccaaactggatgaagaagagcataaaaacctaaagcttcagcagcatgttgacaaactggaacatcattctacccaaatgcaggagcttttctcatcagaaagaattgattggaccaaacagcaggaagagcttctctcacagttgaatgtccttgaaaagcagcttcaagagactcaaactaaaaatgactgtaagttattctatcaggagctttgtgacttgaaggaatactgtaactcaatatctttttacttttattaataaatgctgttcctatgtttttggatg

SEQ ID NO: 101136 - DNA, 369 bp, Homo sapiens
acaactggcggagcttgcttcaggacagacaccaccagaaagcttcctgaccagaggtaggatgagcacacagtcctttatcttggggaagactgtacaaataatagtttaagagcccttggtgatagacacaacacaataaggcaacccaaatttttctgcaggtatctctttctgcttatttctcctatataggaacatagtggtttgtttataatcagatacagataccataggcagtgagaagggggaattaaaataattttgaataatgtataagtgctaaaaagagattaatttcatttagatctacttctacgtagcatatgtaatctatatatgtttactataggataagagagacttatt

SEQ ID NO: 101137 - DNA, 315 bp, Homo sapiens
gtgcctgccacatagaaggtacttgacatgttcgttgactatgcattgctagtaacagttacttaaaatctaatgttgtcttttagaatttgatggagcttcttgaggcagaaaaagaacgcaataacaaattatcattacagtttgaagaagataaagaaaacagttctaagtgagtgctatttattttttctactagcatactagaatattgtttaataccacattcttaatcttgttttttttttattgccaataccctgtaaagagttatttttttaaagcattccaaaagcaacagcaggttcttttgta

SEQ ID NO: 101138 - DNA, 536 bp, Homo sapiens
ccctgtgctgcccacgggtagggaggaggagtgggcgctggtggcagcagaagcagcaccagcagagaaggaaagagcacctcgtcacctcacttaagtttcccacctgcctcacacaccagtgttcttggagggcatctccgaaatagcctgctctgtatttttattcctggggttccctcctcagggcctcacctctagagcctggttagctgtggtttgagtaggctggctacatacagagaactagaactttctgtgctctatgtgcttgtgtctttaattcttgtgagcaaggaaaagatcaaatttaagcagggaaactgaggcaaaagaagaaggatatgaaaaagaagacaaaggggtgaggacagcaaacaactggatttttttcaggaacagaggtctgccagggagtacagggaatattctggaaaaatgacaaatgctaggttgccagtattaatgcctttctttcaccccgagacagagtctacctctagcctagagctggagtgcaatggcgtgatctcggc

SEQ ID NO: 101139 - DNA, 380 bp, Homo sapiens
acacccagggtcaatactttgtatccttcaatccgatcaagttggactcagtattaactatcacaggcaatgatggtgtttgggatctttggctatcagcatcaatctgtattcacgtgtttggaaatatctgagtaatttacggattgatcgatggtgttgcaacatctttcttgtttttcagttgatgtgttttgggtcacagaactggctcaggcctaaaagctgagcatggaaataaggcttttcactgagcatagctgacctcaaacttctactctgccgtcacgtatctcttttgaatattcatattcaaatacccttattggctgcctatctatcttgcccctagggacaaaatgttctatgagccctttcca

SEQ ID NO: 101140 - DNA, 627 bp, Homo sapiens
ctcagtgttttggggaaccagaaacaaaccaataaaataaaggcgtggaaaggctactgtgagaacagaaaggagcaactggggcactgaaacaaaaacaacctgcacagaaattaaattgagccagaacgtaaagaactgaaggaagtgtctgatacagagaagagagaaagtacatttaggccaaaagaatcatcacaggatgaactaaccttctggttccaggagaaagacgagggacttggaaactgaattgtcccatccactgcagctgaaatctgccaccttaacttcctgcagagcttcaatgagaagcagagatcagccaagggcctctgagcacctattcaactcacagatgtgtgaatgatgataccgaattgctgctttaaacccctcagctttgtggtagttacatgggaatagctaatacaaataagtggtgcagaccccggacacagagctgatacacaggatgtcactgggagaaacagagaaagagtgtggttgtctccccatatctacagtttcacattctgggatttcagttacctgcatttaacggaggttgtctgaaaatattaaataaaaaattcccaaagtaaacaattcgtaagttttagaatg

SEQ ID NO: 101141 - DNA, 798 bp, Homo sapiens
ggagagcgccaggacgctacagcagctgaagaggcagtggcgcccgcggccgcggcgtcggggctggagcgatggcggcgaccgcggtggcggcggctgtggcgggaaccgagtcggcccagggtcccccgggcccggcagcgtcgctggagctgtggctgaacaaagccacagacccaagcatgtcggaacaggattggtcagctatccagaatttctgtgagcaggtgaacactgaccccaatggccccacacatgcgccctggctactggcccacaagatccagtctccgcaagagaaggaagctctttatgccttaacgagaacagtacgactctgtgaacagctctccacagttataccaaactcacatgtttattacagaagaggactggctctgaaaaaaattattccacagtgcatcgcaagagatttcacagacctgattgttattaatgaagatcgtaaaaccccaaatggacttattttgagtcacttgccaaatggcccaactgctcattttaaaatgagcagtgttcgtcttcgtaaagaaattaagagaagaggcaaggaccccacagaacacatacctgaaataattctgaataattttacaacacggctgggtcattcaattggacgtatgtttgcatctctctttcctcataatcctcaatttatcggaaggcaggtggccccattccacaatcaaccgggattacatattgttcaaatttttacaaaaacctaatttcggatgggaaaagaaaaggggaaattagggcatttggcacccc

SEQ ID NO: 101142 - DNA, 543 bp, Homo sapiens
ggagagcgccaggacgctacagcagctgaagaggcagtggcgcccgcggccgcggcgtcggggctggagcgatggcggcgaccgcggtggcggcggctgtggcgggaaccgagtcggcccagggtcccccgggcccggcagcgtcgctggagctgtggctgaacaaagccacagacccaagcatgtcggaacaggattggtcagctatccagaatttctgtgagcaggtgaacactgaccccaatgggtaaggtaacttctcacacacatagttgactctgggggcaccccacactgagtgtaggcctttgtctctcaagactgttttagggttaagctctctaggcaaggatcggtggctcatgcctataatcccaacagtttgggagaccaaggcaggaggattgcttgagcccaggagtttgagacctgcctgggtgacagagtgagagactctgtctcaaaaaaatagaaatgcagtcaggctggcattcattctctcattttcccctataatcctgagaacattatttttctaaaatt

SEQ ID NO: 101143 - DNA, 5136 bp, Homo sapiens
ggagagcgccaggacgctacagcagctgaagaggcagtggcgcccgcggccgcggcgtcggggctggagcgatggcggcgaccgcggtggcggcggctgtggcgggaaccgagtcggcccagggtcccccgggcccggcagcgtcgctggagctgtggctgaacaaagccacagacccaagcatgtcggaacaggattggtcagctatccagaatttctgtgagcaggtgaacactgaccccaatggccccacacatgcgccctggctactggcccacaagatccagtctccgcaagagaaggaagctctttatgccttaacggtgctggagatgtgcatgaaccactgtggggagaagttccacagcgaggtggccaaatttcgtttcctgaacgaactgatcaaagtgttgtccccaaagtacctggggtcctgggccacaggaaaagttaaaggaagagtcattgaaatactcttcagttggacagtctggtttccggaagacatcaagattcgagacgcttatcagatgctgaagaaacaaggaattataaaacaagaccctaaactaccagtggataaaatcttacccccaccatctccctggcccaagagctccatctttgatgctgatgaagaaaagtccaagcttctgacaaggcttctaaagagcaaccaccccgaggaccttcaggctgcaaaccggttaatcaagaatttggtcaaggaggaacaagaaaaatcggagaaggtgtccaagagggtcagtgcggtggaggaagtgcgaagccatgtgaaggtgctgcaggagatgctgagcatgtaccgcaggccagggcaggccccgcccgaccaggaggccctgcaggtcgtgtatgagaggtgtgaaaagctgcggcccacgctgttccggttggcgagtgacaccactgatgacgatgatgcactcgcggaaattctccaggcaaatgacctcctcacccaaggagttctgctgtacaaacaggtgatggagggccgggtcacctttggaaacagagtgaccagctcattgggagacatccctgtctccagagtctttcagaatccagcaggctgcatgaagacctgccccctgattgacttggaggtggacaatggacctgcgcagatggggactgtggtgccatctttgcttcatcaggacctggcagccttgggaatcagtgatgctcctgttacaggcatggtttctggtcagaattgctgtgaggaaaagaggaatccctcctccagcacgctgccaggcggtggtgttcagaacccttctgcagacaggaatttgctggacctcctctcagcacagccagctccgtgccctctgaattatgtttcgcagaaaagtgtccccaaggaagtgccaccaggtactaagtcctctccaggttggtcctgggaggctggcccgttggctccttccccatcttcacagaatacacctctggctcaagtgtttgtccctttggagtctgttaagcccagcagcctgccgcctctcattgtgtatgaccggaatggattcagaattctgctccacttctcccagacgggagcccctgggcacccagaggtacaggtgctgctcttgaccatgatgagcacggctccccagcctgtctgggatatcatgtttcaagtggctgtgccaaagtcaatgagagtgaagctgcagccggcatccagctccaagcttcctgcattcagtcctttgatgcctccagctgtgatatctcagatgctgctgcttgacaatccacacaaagaacctatccgcttacggtacaagctgacattcaaccaaggtggacagcctttcagcgaagtaggagaagtgaaagacttcccagacctggctgtcttgggcgcagcctaacttttcacaagatggacccttcatttcaagcttaggctggcgttacttttgctgtctagtcaggactaatcacggtgtttcagtgcggagtgccaagagtcctatcctgacgtcaggctctgggtgtcaacctctgacttattctgcagatgctctgtgtgtgtgtgtgtgtgtgtgtgtgtgtgtgtgtgtgtgtgtgtgtgtgtgtgtcggggagagggtggtagcacagggcttgggatatcggcagtgtgggaaatgcgaagcatttctcatcatcatcatctctgctacagtcatgtttctgcatgtcagcgagcgacactgtccctgcctcaggttggaggttttatcagccaaagtgtttttttcatgtatcgttcgttccattcatccactctgtgccttgtcagcctttgaaaggcttggttgctcccaggctgctgttctcagggaccttaaaagggacctggttagtcttggggcagagagtatctacttgggcactctcttccaagaaagaccttgtctccattttcattagacaatgcttcttgtgtgtgttctggaagatcttctaaatggaatgcttgttgcactgttcccaggcgagtggctgccatgagacctgaggaccacacttgggggaccaatcatgtccttcaccactgtgccttagaatcgcccctggacagagttcctgggcagaggggaaagcagctcccaggccttactcaggcctcaggtccatgggttgggcagccagtctgggcccttctcaggatcctcatctccatcctcatcctcttccttcacagcatttacttggagctctttgtgacacaccatgtcagtcatgatgaatcggccaacagccagcccttgccagctgacgtcacagtctaagatgggaaactggtacagatagacatgaagagagcttagcagtgattgaggtggtgactaaatatacagtcattgaataaataccatgtagcaagtgtactttgtggagtgttgagtaagtggaaaatggaaagccagttgcatttagagatgataggcctaaagggaactgtcttctgtcgagaagtaaaggaaacttcatgaaggatgtagaagcttagctgcctcagagaagagagaacctgaagatctgaggcaagctggacaggagaggtggatatttgttgatggaagaattcaagtttataatcaattcccacttagcacctactgtgtgctaggaacttgaatgtgtatgtttgacaagtcctgcttggcctgatgggtgggagaaggaacctgagcctggctgagatggctaggcggagggctttgaagtccaagcagctgaactggctgggtgggtttctacctttgaaactgcaagacttgtttggagctcttaattacaatatctgatatttttacagtctgatcttttgacttctacatatagtggaaatctgccaatactaattggtggagatgggaactgtaaaagatcaagtatgctaattttaagcaaatgtaaaaactcataaaacaggtaaacagtggggtgatttcatttgccataattcacataagacgaattttaatctaaaagtactttcttgcttgtattctgtgtggcttttttttgttttttgaggccatatctcactctgtcactcaggctggagtgcggtggtataatctcagcctctcgagtagctgggactacaggcgtgagccagcacgcccagctaatttttgtatttttagtagagacaggatttcaccatgttggccaggctggtctcgaactcctgacctcaggtgatccgcctgccttggcctcccagagtgctgggattacaggcgtgagccaccgcacccggcctctgtgtagcttttataggctctgttactgttgcgtagtcttgaagaggtacccatcataatgacagcatctccctctgaagggttttggtcaaaatgggtgaatgagacttatacataaagacaggctttctcccctatagttaggaggtgaactcacacatgtgtacctgaacattcttgcttttgaggagacagactcccagtggtactactatgcttaggtgttggacaggataggggtaggaggagaggaggcaggctgctgtcctgaaagtggctgtggtttatggcatcactcccttctaatcagcaagtccagtggccacttagagcccagctcctacctcttcattcacttaacaagtagttattggctgtgcacagtggctcacgcctgtagtcccagcattttgggaggctgagtgggatgaccgcttgagcccaggatttcaagtccagcctgggctacatagtgagaccgtgtctctgtttttttaaaagctagttgttgaccagctaccctgagccaggcaccaccctgaaggagcttcttttcctctggggagaagcaaattcatgatgtgtgtgctggagatctggcactcatggccagtgctttccagtatcttgaactcttcgggggtcctgttgacccatttcgtgacctacctccgtgactgctctttttcctctgtctcttaagtgtgatggttttccagagtccaatcctcaggactttcccgtccacacacaggcctggtagtcaggtggctctaaaccattaggtgggttgtagacctctctcaagctgccacctccttgctgtcgccagatcgtatttcagtctgtcaggggttatctgtatctggaggttccactgttgcttcagtctcagttacttagaatggaacccagagtcctgcccctttccacctacatgctcttacttgaaagcacctgagacttattgggtccctgattcctgcttcgtctgtatccgcagagtagttgcatgtcatttggcctgttttctaaataatcccacatcatgtcctccctgcacttacattgccactgctctgatttgggcttttttttttttgggacaatgcctctgtcccaattctgagtaacagctctggttcttgccactaccagagttctctagcaaatctgagcatctgacagggtgaaaaattctgaatggcttcctgatgcctgactttatgggatcaaattcaagttgcacgctggcactcagtgcccttctggtatcatctgccaagaccagggcctgcttcaccacagccacaataaagtcctttcaagccct

SEQ ID NO: 101144 - DNA, 5151 bp, Homo sapiens
ggagagcgccaggacgctacagcagctgaagaggcagtggcgcccgcggccgcggcgtcggggctggagcgatggcggcgaccgcggtggcggcggctgtggcgggaaccgagtcggcccagggtcccccgggcccggcagcgtcgctggagctgtggctgaacaaagccacagacccaagcatgtcggaacaggattggtcagctatccagaatttctgtgagcaggtgaacactgaccccaatggccccacacatgcgccctggctactggcccacaagatccagtctccgcaagagaaggaagctctttatgccttaacggtgctggagatgtgcatgaaccactgtggggagaagttccacagcgaggtggccaaatttcgtttcctgaacgaactgatcaaagtgttgtccccaaagtacctggggtcctgggccacaggaaaagttaaaggaagagtcattgaaatactcttcagttggacagtctggtttccggaagacatcaagattcgagacgcttatcagatgctgaagaaacaaggaattataaaacaagaccctaaactaccagtggataaaatcttacccccaccatctccctggcccaagagctccatctttgatgctgatgaagaaaagtccaagcttctgacaaggcttctaaagagcaaccaccccgaggaccttcaggctgcaaaccggttaatcaagaatttggtcaaggaggaacaagaaaaatcggagaaggtgtccaagagggtcagtgcggtggaggaagtgcgaagccatgtgaaggtgctgcaggagatgctgagcatgtaccgcaggccagggcaggccccgcccgaccaggaggccctgcaggtcgtgtatgagaggtgtgaaaagctgcggcccacgctgttccggttggcgagtgacaccactgatgacgatgatgcactcgcggaaattctccaggcaaatgacctcctcacccaaggagttctgctgtacaaacaggtgatggagggccgggtcacctttggaaacagagtgaccagctcattgggagacatccctgtctccagagtctttcagaatccagcaggctgcatgaagacctgccccctgattgacttggaggtggacaatggacctgcgcagatggggactgtggtgccatctttgcttcatcaggacctggcagccttgggaatcagtgatgctcctgttacaggcatggtttctggtcagaattgctgtgaggaaaagaggaatccctcctccagcacgctgccaggcggtggtgttcagaacccttctgcagacaggaatttgctggacctcctctcagcacagccagctccgtgccctctgaattatgtttcgcagaaaagtgtccccaaggaagtgccaccaggtactaagtcctctccaggttggtcctgggaggctggcccgttggctccttccccatcttcacagaatacacctctggctcaagtgtttgtccctttggagtctgttaagcccagcagcctgccgcctctcattgtgtatgaccggaatggattcagaattctgctccacttctcccagacgggagcccctgggcacccagaggtacaggtgctgctcttgaccatgatgagcacggctccccagcctgtctgggatatcatgtttcaagtggctgtgccaaagtcaatgagagtgaagctgcagccggcatccagctccaagcttcctgcattcagtcctttgatgcctccagctgtgatatctcagatgctgctgcttgacaatccacacaaagaacctatccgcttacggtacaagctgacattcaaccaaggtggacagcctttcagcgaagtaggagaagtgaaagacttcccagacctggctgtcttgggcgcagcctaacttttcacaagatggacccttcatttcaagcttaggctggcgttacttttgctgtctagtcaggactaatcacggtgtttcagtgcggagtgccaagagtcctatcctgacgtcaggctctgggtgtcaacctctgacttattctgcagatgctctgtgtgtgtgtgtgtgtgtgtgtgtgtgtgtgtgtgtgtgtgtgtgtgtgtgtgtgtgtgtgtgtgtgttcggggagagggtggtagcacagggcttgggatatcggcagtgtgggaaatgcgaagcatttctcatcatcatcatctctgctacagtcatgtttctgcatgtcagcgagcgacactgtccctgcctcaggttggaggttttatcagccaaagtgtttttttcatgtatcgttcgttccattcatccactctgtgccttgtcagcctttgaaaggcttggttgctcccaggctgctgttctcagggaccttaaaagggacctggttagtcttggggcagagagtatctacttgggcactctcttccaagaaagaccttgtctccattttcattagacaatgcttcttgtgtgtgttctggaagatcttctaaatggaatgcttgttgcactgttcccaggcgagtggctgccatgagacctgaggaccacacttgggggaccaatcatgtccttcaccactgtgccttagaatcgcccctggacagagttcctgggcagaggggaaagcagctcccaggccttactcaggcctcaggtccatgggttgggcagccagtctgggcccttctcaggatcctcatctccatcctcatcctcttccttcacagcatttacttggagctctttgtgacacaccatgtcagtcatgatgaatcggccaacagccagcccttgccagctgacgtcacagtctaagatgggaaactggtacagatagacatgaagagagcttagcagtgattgaggtggtgactaaatatacagtcattgaataaataccatgtagcaagtgtactttgtggagtgttgagtaagtggaaaatggaaagccagttgcatttagagatgataggcctaaagggaactgtcttctgtcgagaagtaaaggaaacttcatgaaggatgtagaagcttagctgcctcagagaagagagaacctgaagatctgaggcaagctggacaggagaggtggatatttgttgatggaagaattcaagtttataatcaattcccacttagcacctactgtgtgctaggaacttgaatgtgtatgtttgacaagtcctgcttggcctgatgggtgggagaaggaacctgagcctggctgagatggctaggcggagggctttgaagtccaagcagctgaactggctgggtgggtttctacctttgaaactgcaagacttgtttggagctcttaattacaatatctgatatttttacagtctgatcttttgacttctacatatagtggaaatctgccaatactaattggtggagatgggaactgtaaaagatcaagtatgctaattttaagcaaatgtaaaaactcataaaacaggtaaacagtggggtgatttcatttgccataattcacataagacgaattttaatctaaaagtactttcttgcttgtattctgtgtggcttttttttgttttttgaggccatatctcactctgtcactcaggctggagtgcggtggtataatctcagcctctcgagtagctgggactacaggcgtgagccagcacgcccagctaatttttgtatttttagtagagacaggatttcaccatgttggccaggctggtctcgaactcctgacctcaggtgatccgcctgccttggcctcccagagtgctgggattacaggcgtgagccaccgcacccggcctctgtgtagcttttataggctctgttactgttgcgtagtcttgaagaggtacccatcataatgacagcatctccctctgaagggttttggtcaaaatgggtgaatgagacttatacataaagacaggctttctcccctatagttaggaggtgaactcacacatgtgtacctgaacattcttgcttttgaggagacagactcccagtggtactactatgcttaggtgttggacaggataggggtaggaggagaggaggcaggctgctgtcctgaaagtggctgtggtttatggcatcactcccttctaatcagcaagtccagtggccacttagagcccagctcctacctcttcattcacttaacaagtagttattggctgtgcacagtggctcacgcctgtagtcccagcattttgggaggctgagtgggatgaccgcttgagcccaggatttcaagtccagcctgggctacatagtgagaccgtgtctctgtttttttaaaagctagttgttgaccagctaccctgagccaggcaccaccctgaaggagcttcttttcctctggggagaagcaaattcatgatgtgtgtgctggagatctggcactcatggccagtgctttccagtatcttgaactcttcgggggtcctgttgacccatttcgtgacctacctccgtgactgctctttttcctctgtctcttaagtgtgatggttttccagagtccaatcctcaggactttcccgtccacacacaggcctggtagtcaggtggctctaaaccattaggtgggttgtagacctctctcaagctgccacctccttgctgtcgccagatcgtatttcagtctgtcaggggttatctgtatctggaggttccactgttgcttcagtctcagttacttagaatggaacccagagtcctgcccctttccacctacatgctcttacttgaaagcacctgagacttattgggtccctgattcctgcttcgtctgtatccgcagagtagttgcatgtcatttggcctgttttctaaataatcccacatcatgtcctccctgcacttacattgccactgctctgatttgggcttttttttttttgggacaatgcctctgtcccaattctgagtaacagctctggttcttgccactaccagagttctctagcaaatctgagcatctgacagggtgaaaaattctgaatggcttcctgatgcctgactttatgggatcaaattcaagttgcacgctggcactcagtgcccttctggtatcatctgccaagaccagggcctgcttcaccacagccacaataaagtcctttcaagccct

SEQ ID NO: 101145 - DNA, 5980 bp, Homo sapiens
ggagagcgccaggacgctacagcagctgaagaggcagtggcgcccgcggccgcggcgtcggggctggagcgatggcggcgaccgcggtggcggcggctgtggcgggaaccgagtcggcccagggtcccccgggcccggcagcgtcgctggagctgtggctgaacaaagccacagacccaagcatgtcggaacaggattggtcagctatccagaatttctgtgagcaggtgaacactgaccccaatggccccacacatgcgccctggctactggcccacaagatccagtctccgcaagagaaggaagctctttatgccttaacggtgagtttggcttgccttgtagcctaacctttcctgtccttgtgctatagagagccgagaggcgctttgcttccacacagatccttttcactggagaagggaggtcccctgagaggtttaccttcacagcaggttggaggagggagatctgggccagggtccccacccttcttcctcctgtttctcgtctgtttcttcagggcagcattgagtctactgtgggagaaggaaaggaaggttttatttcatttgcccttcttagaccagggctggcaagttcatgtgccttttctagagagggcagttctagcacagggcccactagctgttggcaggtatgagtatgggctcagggttgctagtttaggtctttgtatatgtttgagtgtttagatgttggtgactaatttgcagtgttgaaagccacagtatggacgagaggaggggtctgcaggctcagcttgcctcttgagtgccagtgggtgacatccggctggtcttgggcactggataccagatctctgcctctggggaggggttggttctttagccactttctcctctcaaagggtctccttaaaaggtggggtgacctcagggtttgacatacctcactaagctatttcctggacataaacctcaggcagttatagcaagattgaacaggggacatttttttcttgatctgaaaacgtcctcttcatcaaaacttcagtgtcctcataggcttgaggcagggttagccttggttccagcgcagtctccagcaagtgattaccagcctggaggggagcctgggaccactggctttccaccttctcctgggggtcctgtgtctgtgcaggtgctggagatgtgcatgaaccactgtggggagaagttccacagcgaggtggccaaatttcgtttcctgaacgaactgatcaaagtgttgtccccaaagtacctggggtcctgggccacaggaaaagttaaaggaagagtcattgaaatactcttcagttggacagtctggtttccggaagacatcaagattcgagacgcttatcagatgctgaagaaacaaggaattataaaacaagaccctaaactaccagtggataaaatcttacccccaccatctccctggcccaagagctccatctttgatgctgatgaagaaaagtccaagcttctgacaaggcttctaaagagcaaccaccccgaggaccttcaggctgcaaaccggttaatcaagaatttggtcaaggaggaacaagaaaaatcggagaaggtgtccaagagggtcagtgcggtggaggaagtgcgaagccatgtgaaggtgctgcaggagatgctgagcatgtaccgcaggccagggcaggccccgcccgaccaggaggccctgcaggtcgtgtatgagaggtgtgaaaagctgcggcccacgctgttccggttggcgagtgacaccactgatgacgatgatgcactcgcggaaattctccaggcaaatgacctcctcacccaaggagttctgctgtacaaacaggtgatggagggccgggtcacctttggaaacagagtgaccagctcattgggagacatccctgtctccagagtctttcagaatccagcaggctgcatgaagacctgccccctgattgacttggaggtggacaatggacctgcgcagatggggactgtggtgccatctttgcttcatcaggacctggcagccttgggaatcagtgatgctcctgttacaggcatggtttctggtcagaattgctgtgaggaaaagaggaatccctcctccagcacgctgccaggcggtggtgttcagaacccttctgcagacaggaatttgctggacctcctctcagcacagccagctccgtgccctctgaattatgtttcgcagaaaagtgtccccaaggaagtgccaccaggtactaagtcctctccaggttggtcctgggaggctggcccgttggctccttccccatcttcacagaatacacctctggctcaagtgtttgtccctttggagtctgttaagcccagcagcctgccgcctctcattgtgtatgaccggaatggattcagaattctgctccacttctcccagacgggagcccctgggcacccagaggtacaggtgctgctcttgaccatgatgagcacggctccccagcctgtctgggatatcatgtttcaagtggctgtgccaaagtcaatgagagtgaagctgcagccggcatccagctccaagcttcctgcattcagtcctttgatgcctccagctgtgatatctcagatgctgctgcttgacaatccacacaaagaacctatccgcttacggtacaagctgacattcaaccaaggtggacagcctttcagcgaagtaggagaagtgaaagacttcccagacctggctgtcttgggcgcagcctaacttttcacaagatggacccttcatttcaagcttaggctggcgttacttttgctgtctagtcaggactaatcacggtgtttcagtgcggagtgccaagagtcctatcctgacgtcaggctctgggtgtcaacctctgacttattctgcagatgctctgtgtgtgtgtgtgtgtgtgtgtgtgtgtgtgtgtgtgtgtgtgtgtgtgtgtgtcggggagagggtggtagcacagggcttgggatatcggcagtgtgggaaatgcgaagcatttctcatcatcatcatctctgctacagtcatgtttctgcatgtcagcgagcgacactgtccctgcctcaggttggaggttttatcagccaaagtgtttttttcatgtatcgttcgttccattcatccactctgtgccttgtcagcctttgaaaggcttggttgctcccaggctgctgttctcagggaccttaaaagggacctggttagtcttggggcagagagtatctacttgggcactctcttccaagaaagaccttgtctccattttcattagacaatgcttcttgtgtgtgttctggaagatcttctaaatggaatgcttgttgcactgttcccaggcgagtggctgccatgagacctgaggaccacacttgggggaccaatcatgtccttcaccactgtgccttagaatcgcccctggacagagttcctgggcagaggggaaagcagctcccaggccttactcaggcctcaggtccatgggttgggcagccagtctgggcccttctcaggatcctcatctccatcctcatcctcttccttcacagcatttacttggagctctttgtgacacaccatgtcagtcatgatgaatcggccaacagccagcccttgccagctgacgtcacagtctaagatgggaaactggtacagatagacatgaagagagcttagcagtgattgaggtggtgactaaatatacagtcattgaataaataccatgtagcaagtgtactttgtggagtgttgagtaagtggaaaatggaaagccagttgcatttagagatgataggcctaaagggaactgtcttctgtcgagaagtaaaggaaacttcatgaaggatgtagaagcttagctgcctcagagaagagagaacctgaagatctgaggcaagctggacaggagaggtggatatttgttgatggaagaattcaagtttataatcaattcccacttagcacctactgtgtgctaggaacttgaatgtgtatgtttgacaagtcctgcttggcctgatgggtgggagaaggaacctgagcctggctgagatggctaggcggagggctttgaagtccaagcagctgaactggctgggtgggtttctacctttgaaactgcaagacttgtttggagctcttaattacaatatctgatatttttacagtctgatcttttgacttctacatatagtggaaatctgccaatactaattggtggagatgggaactgtaaaagatcaagtatgctaattttaagcaaatgtaaaaactcataaaacaggtaaacagtggggtgatttcatttgccataattcacataagacgaattttaatctaaaagtactttcttgcttgtattctgtgtggcttttttttgttttttgaggccatatctcactctgtcactcaggctggagtgcggtggtataatctcagcctctcgagtagctgggactacaggcgtgagccagcacgcccagctaatttttgtatttttagtagagacaggatttcaccatgttggccaggctggtctcgaactcctgacctcaggtgatccgcctgccttggcctcccagagtgctgggattacaggcgtgagccaccgcacccggcctctgtgtagcttttataggctctgttactgttgcgtagtcttgaagaggtacccatcataatgacagcatctccctctgaagggttttggtcaaaatgggtgaatgagacttatacataaagacaggctttctcccctatagttaggaggtgaactcacacatgtgtacctgaacattcttgcttttgaggagacagactcccagtggtactactatgcttaggtgttggacaggataggggtaggaggagaggaggcaggctgctgtcctgaaagtggctgtggtttatggcatcactcccttctaatcagcaagtccagtggccacttagagcccagctcctacctcttcattcacttaacaagtagttattggctgtgcacagtggctcacgcctgtagtcccagcattttgggaggctgagtgggatgaccgcttgagcccaggatttcaagtccagcctgggctacatagtgagaccgtgtctctgtttttttaaaagctagttgttgaccagctaccctgagccaggcaccaccctgaaggagcttcttttcctctggggagaagcaaattcatgatgtgtgtgctggagatctggcactcatggccagtgctttccagtatcttgaactcttcgggggtcctgttgacccatttcgtgacctacctccgtgactgctctttttcctctgtctcttaagtgtgatggttttccagagtccaatcctcaggactttcccgtccacacacaggcctggtagtcaggtggctctaaaccattaggtgggttgtagacctctctcaagctgccacctccttgctgtcgccagatcgtatttcagtctgtcaggggttatctgtatctggaggttccactgttgcttcagtctcagttacttagaatggaacccagagtcctgcccctttccacctacatgctcttacttgaaagcacctgagacttattgggtccctgattcctgcttcgtctgtatccgcagagtagttgcatgtcatttggcctgttttctaaataatcccacatcatgtcctccctgcacttacattgccactgctctgatttgggcttttttttttttgggacaatgcctctgtcccaattctgagtaacagctctggttcttgccactaccagagttctctagcaaatctgagcatctgacagggtgaaaaattctgaatggcttcctgatgcctgactttatgggatcaaattcaagttgcacgctggcactcagtgcccttctggtatcatctgccaagaccagggcctgcttcaccacagccacaataaagtcctttcaagccct

SEQ ID NO: 101146 - DNA, 5960 bp, Homo sapiens
ggagagcgccaggacgctacagcagctgaagaggcagtggcgcccgcggccgcggcgtcggggctggagcgatggcggcgaccgcggtggcggcggctgtggcgggaaccgagtcggcccagggtcccccgggcccggcagcgtcgctggagctgtggctgaacaaagccacagacccaagcatgtcggaacaggattggtcagctatccagaatttctgtgagcagccccacacatgcgccctggctactggcccacaagatccagtctccgcaagagaaggaagctctttatgccttaacggtgagtttggcttgccttgtagcctaacctttcctgtccttgtgctatagagagccgagaggcgctttgcttccacacagatccttttcactggagaagggaggtcccctgagaggtttaccttcacagcaggttggaggagggagatctgggccagggtccccacccttcttcctcctgtttctcgtctgtttcttcagggcagcattgagtctactgtgggagaaggaaaggaaggttttatttcatttgcccttcttagaccagggctggcaagttcatgtgccttttctagagagggcagttctagcacagggcccactagctgttggcaggtatgagtatgggctcagggttgctagtttaggtctttgtatatgtttgagtgtttagatgttggtgactaatttgcagtgttgaaagccacagtatggacgagaggaggggtctgcaggctcagcttgcctcttgagtgccagtgggtgacatccggctggtcttgggcactggataccagatctctgcctctggggaggggttggttctttagccactttctcctctcaaagggtctccttaaaaggtggggtgacctcagggtttgacatacctcactaagctatttcctggacataaacctcaggcagttatagcaagattgaacaggggacatttttttcttgatctgaaaacgtcctcttcatcaaaacttcagtgtcctcataggcttgaggcagggttagccttggttccagcgcagtctccagcaagtgattaccagcctggaggggagcctgggaccactggctttccaccttctcctgggggtcctgtgtctgtgcaggtgctggagatgtgcatgaaccactgtggggagaagttccacagcgaggtggccaaatttcgtttcctgaacgaactgatcaaagtgttgtccccaaagtacctggggtcctgggccacaggaaaagttaaaggaagagtcattgaaatactcttcagttggacagtctggtttccggaagacatcaagattcgagacgcttatcagatgctgaagaaacaaggaattataaaacaagaccctaaactaccagtggataaaatcttacccccaccatctccctggcccaagagctccatctttgatgctgatgaagaaaagtccaagcttctgacaaggcttctaaagagcaaccaccccgaggaccttcaggctgcaaaccggttaatcaagaatttggtcaaggaggaacaagaaaaatcggagaaggtgtccaagagggtcagtgcggtggaggaagtgcgaagccatgtgaaggtgctgcaggagatgctgagcatgtaccgcaggccagggcaggccccgcccgaccaggaggccctgcaggtcgtgtatgagaggtgtgaaaagctgcggcccacgctgttccggttggcgagtgacaccactgatgacgatgatgcactcgcggaaattctccaggcaaatgacctcctcacccaaggagttctgctgtacaaacaggtgatggagggccgggtcacctttggaaacagagtgaccagctcattgggagacatccctgtctccagagtctttcagaatccagcaggctgcatgaagacctgccccctgattgacttggaggtggacaatggacctgcgcagatggggactgtggtgccatctttgcttcatcaggacctggcagccttgggaatcagtgatgctcctgttacaggcatggtttctggtcagaattgctgtgaggaaaagaggaatccctcctccagcacgctgccaggcggtggtgttcagaacccttctgcagacaggaatttgctggacctcctctcagcacagccagctccgtgccctctgaattatgtttcgcagaaaagtgtccccaaggaagtgccaccaggtactaagtcctctccaggttggtcctgggaggctggcccgttggctccttccccatcttcacagaatacacctctggctcaagtgtttgtccctttggagtctgttaagcccagcagcctgccgcctctcattgtgtatgaccggaatggattcagaattctgctccacttctcccagacgggagcccctgggcacccagaggtacaggtgctgctcttgaccatgatgagcacggctccccagcctgtctgggatatcatgtttcaagtggctgtgccaaagtcaatgagagtgaagctgcagccggcatccagctccaagcttcctgcattcagtcctttgatgcctccagctgtgatatctcagatgctgctgcttgacaatccacacaaagaacctatccgcttacggtacaagctgacattcaaccaaggtggacagcctttcagcgaagtaggagaagtgaaagacttcccagacctggctgtcttgggcgcagcctaacttttcacaagatggacccttcatttcaagcttaggctggcgttacttttgctgtctagtcaggactaatcacggtgtttcagtgcggagtgccaagagtcctatcctgacgtcaggctctgggtgtcaacctctgacttattctgcagatgctctgtgtgtgtgtgtgtgtgtgtgtgtgtgtgtgtgtgtgtgtgtgtgtgtgtgtgtcggggagagggtggtagcacagggcttgggatatcggcagtgtgggaaatgcgaagcatttctcatcatcatcatctctgctacagtcatgtttctgcatgtcagcgagcgacactgtccctgcctcaggttggaggttttatcagccaaagtgtttttttcatgtatcgttcgttccattcatccactctgtgccttgtcagcctttgaaaggcttggttgctcccaggctgctgttctcagggaccttaaaagggacctggttagtcttggggcagagagtatctacttgggcactctcttccaagaaagaccttgtctccattttcattagacaatgcttcttgtgtgtgttctggaagatcttctaaatggaatgcttgttgcactgttcccaggcgagtggctgccatgagacctgaggaccacacttgggggaccaatcatgtccttcaccactgtgccttagaatcgcccctggacagagttcctgggcagaggggaaagcagctcccaggccttactcaggcctcaggtccatgggttgggcagccagtctgggcccttctcaggatcctcatctccatcctcatcctcttccttcacagcatttacttggagctctttgtgacacaccatgtcagtcatgatgaatcggccaacagccagcccttgccagctgacgtcacagtctaagatgggaaactggtacagatagacatgaagagagcttagcagtgattgaggtggtgactaaatatacagtcattgaataaataccatgtagcaagtgtactttgtggagtgttgagtaagtggaaaatggaaagccagttgcatttagagatgataggcctaaagggaactgtcttctgtcgagaagtaaaggaaacttcatgaaggatgtagaagcttagctgcctcagagaagagagaacctgaagatctgaggcaagctggacaggagaggtggatatttgttgatggaagaattcaagtttataatcaattcccacttagcacctactgtgtgctaggaacttgaatgtgtatgtttgacaagtcctgcttggcctgatgggtgggagaaggaacctgagcctggctgagatggctaggcggagggctttgaagtccaagcagctgaactggctgggtgggtttctacctttgaaactgcaagacttgtttggagctcttaattacaatatctgatatttttacagtctgatcttttgacttctacatatagtggaaatctgccaatactaattggtggagatgggaactgtaaaagatcaagtatgctaattttaagcaaatgtaaaaactcataaaacaggtaaacagtggggtgatttcatttgccataattcacataagacgaattttaatctaaaagtactttcttgcttgtattctgtgtggcttttttttgttttttgaggccatatctcactctgtcactcaggctggagtgcggtggtataatctcagcctctcgagtagctgggactacaggcgtgagccagcacgcccagctaatttttgtatttttagtagagacaggatttcaccatgttggccaggctggtctcgaactcctgacctcaggtgatccgcctgccttggcctcccagagtgctgggattacaggcgtgagccaccgcacccggcctctgtgtagcttttataggctctgttactgttgcgtagtcttgaagaggtacccatcataatgacagcatctccctctgaagggttttggtcaaaatgggtgaatgagacttatacataaagacaggctttctcccctatagttaggaggtgaactcacacatgtgtacctgaacattcttgcttttgaggagacagactcccagtggtactactatgcttaggtgttggacaggataggggtaggaggagaggaggcaggctgctgtcctgaaagtggctgtggtttatggcatcactcccttctaatcagcaagtccagtggccacttagagcccagctcctacctcttcattcacttaacaagtagttattggctgtgcacagtggctcacgcctgtagtcccagcattttgggaggctgagtgggatgaccgcttgagcccaggatttcaagtccagcctgggctacatagtgagaccgtgtctctgtttttttaaaagctagttgttgaccagctaccctgagccaggcaccaccctgaaggagcttcttttcctctggggagaagcaaattcatgatgtgtgtgctggagatctggcactcatggccagtgctttccagtatcttgaactcttcgggggtcctgttgacccatttcgtgacctacctccgtgactgctctttttcctctgtctcttaagtgtgatggttttccagagtccaatcctcaggactttcccgtccacacacaggcctggtagtcaggtggctctaaaccattaggtgggttgtagacctctctcaagctgccacctccttgctgtcgccagatcgtatttcagtctgtcaggggttatctgtatctggaggttccactgttgcttcagtctcagttacttagaatggaacccagagtcctgcccctttccacctacatgctcttacttgaaagcacctgagacttattgggtccctgattcctgcttcgtctgtatccgcagagtagttgcatgtcatttggcctgttttctaaataatcccacatcatgtcctccctgcacttacattgccactgctctgatttgggcttttttttttttgggacaatgcctctgtcccaattctgagtaacagctctggttcttgccactaccagagttctctagcaaatctgagcatctgacagggtgaaaaattctgaatggcttcctgatgcctgactttatgggatcaaattcaagttgcacgctggcactcagtgcccttctggtatcatctgccaagaccagggcctgcttcaccacagccacaataaagtcctttcaagccct

SEQ ID NO: 101147 - DNA, 5265 bp, Homo sapiens
ggagagcgccaggacgctacagcagctgaagaggcagtggcgcccgcggccgcggcgtcggggctggagcgatggcggcgaccgcggtggcggcggctgtggcgggaaccgagtcggcccagggtcccccgggcccggcagcgtcgctggagctgtggctgaacaaagccacagacccaagcatgtcggaacaggattggtcagctatccagaatttctgtgagcaggtgaacactgaccccaatggccccacacatgcgccctggctactggcccacaagatccagtctccgcaagagaaggaagctctttatgccttaacgtgtcctcataggcttgaggcagggttagccttggttccagcgcagtctccagcaagtgattaccagcctggaggggagcctgggaccactggctttccaccttctcctgggggtcctgtgtctgtgcaggtgctggagatgtgcatgaaccactgtggggagaagttccacagcgaggtggccaaatttcgtttcctgaacgaactgatcaaagtgttgtccccaaagtacctggggtcctgggccacaggaaaagttaaaggaagagtcattgaaatactcttcagttggacagtctggtttccggaagacatcaagattcgagacgcttatcagatgctgaagaaacaaggaattataaaacaagaccctaaactaccagtggataaaatcttacccccaccatctccctggcccaagagctccatctttgatgctgatgaagaaaagtccaagcttctgacaaggcttctaaagagcaaccaccccgaggaccttcaggctgcaaaccggttaatcaagaatttggtcaaggaggaacaagaaaaatcggagaaggtgtccaagagggtcagtgcggtggaggaagtgcgaagccatgtgaaggtgctgcaggagatgctgagcatgtaccgcaggccagggcaggccccgcccgaccaggaggccctgcaggtcgtgtatgagaggtgtgaaaagctgcggcccacgctgttccggttggcgagtgacaccactgatgacgatgatgcactcgcggaaattctccaggcaaatgacctcctcacccaaggagttctgctgtacaaacaggtgatggagggccgggtcacctttggaaacagagtgaccagctcattgggagacatccctgtctccagagtctttcagaatccagcaggctgcatgaagacctgccccctgattgacttggaggtggacaatggacctgcgcagatggggactgtggtgccatctttgcttcatcaggacctggcagccttgggaatcagtgatgctcctgttacaggcatggtttctggtcagaattgctgtgaggaaaagaggaatccctcctccagcacgctgccaggcggtggtgttcagaacccttctgcagacaggaatttgctggacctcctctcagcacagccagctccgtgccctctgaattatgtttcgcagaaaagtgtccccaaggaagtgccaccaggtactaagtcctctccaggttggtcctgggaggctggcccgttggctccttccccatcttcacagaatacacctctggctcaagtgtttgtccctttggagtctgttaagcccagcagcctgccgcctctcattgtgtatgaccggaatggattcagaattctgctccacttctcccagacgggagcccctgggcacccagaggtacaggtgctgctcttgaccatgatgagcacggctccccagcctgtctgggatatcatgtttcaagtggctgtgccaaagtcaatgagagtgaagctgcagccggcatccagctccaagcttcctgcattcagtcctttgatgcctccagctgtgatatctcagatgctgctgcttgacaatccacacaaagaacctatccgcttacggtacaagctgacattcaaccaaggtggacagcctttcagcgaagtaggagaagtgaaagacttcccagacctggctgtcttgggcgcagcctaacttttcacaagatggacccttcatttcaagcttaggctggcgttacttttgctgtctagtcaggactaatcacggtgtttcagtgcggagtgccaagagtcctatcctgacgtcaggctctgggtgtcaacctctgacttattctgcagatgctctgtgtgtgtgtgtgtgtgtgtgtgtgtgtgtgtgtgtgtgtgtgtgtgtgtgtgtcggggagagggtggtagcacagggcttgggatatcggcagtgtgggaaatgcgaagcatttctcatcatcatcatctctgctacagtcatgtttctgcatgtcagcgagcgacactgtccctgcctcaggttggaggttttatcagccaaagtgtttttttcatgtatcgttcgttccattcatccactctgtgccttgtcagcctttgaaaggcttggttgctcccaggctgctgttctcagggaccttaaaagggacctggttagtcttggggcagagagtatctacttgggcactctcttccaagaaagaccttgtctccattttcattagacaatgcttcttgtgtgtgttctggaagatcttctaaatggaatgcttgttgcactgttcccaggcgagtggctgccatgagacctgaggaccacacttgggggaccaatcatgtccttcaccactgtgccttagaatcgcccctggacagagttcctgggcagaggggaaagcagctcccaggccttactcaggcctcaggtccatgggttgggcagccagtctgggcccttctcaggatcctcatctccatcctcatcctcttccttcacagcatttacttggagctctttgtgacacaccatgtcagtcatgatgaatcggccaacagccagcccttgccagctgacgtcacagtctaagatgggaaactggtacagatagacatgaagagagcttagcagtgattgaggtggtgactaaatatacagtcattgaataaataccatgtagcaagtgtactttgtggagtgttgagtaagtggaaaatggaaagccagttgcatttagagatgataggcctaaagggaactgtcttctgtcgagaagtaaaggaaacttcatgaaggatgtagaagcttagctgcctcagagaagagagaacctgaagatctgaggcaagctggacaggagaggtggatatttgttgatggaagaattcaagtttataatcaattcccacttagcacctactgtgtgctaggaacttgaatgtgtatgtttgacaagtcctgcttggcctgatgggtgggagaaggaacctgagcctggctgagatggctaggcggagggctttgaagtccaagcagctgaactggctgggtgggtttctacctttgaaactgcaagacttgtttggagctcttaattacaatatctgatatttttacagtctgatcttttgacttctacatatagtggaaatctgccaatactaattggtggagatgggaactgtaaaagatcaagtatgctaattttaagcaaatgtaaaaactcataaaacaggtaaacagtggggtgatttcatttgccataattcacataagacgaattttaatctaaaagtactttcttgcttgtattctgtgtggcttttttttgttttttgaggccatatctcactctgtcactcaggctggagtgcggtggtataatctcagcctctcgagtagctgggactacaggcgtgagccagcacgcccagctaatttttgtatttttagtagagacaggatttcaccatgttggccaggctggtctcgaactcctgacctcaggtgatccgcctgccttggcctcccagagtgctgggattacaggcgtgagccaccgcacccggcctctgtgtagcttttataggctctgttactgttgcgtagtcttgaagaggtacccatcataatgacagcatctccctctgaagggttttggtcaaaatgggtgaatgagacttatacataaagacaggctttctcccctatagttaggaggtgaactcacacatgtgtacctgaacattcttgcttttgaggagacagactcccagtggtactactatgcttaggtgttggacaggataggggtaggaggagaggaggcaggctgctgtcctgaaagtggctgtggtttatggcatcactcccttctaatcagcaagtccagtggccacttagagcccagctcctacctcttcattcacttaacaagtagttattggctgtgcacagtggctcacgcctgtagtcccagcattttgggaggctgagtgggatgaccgcttgagcccaggatttcaagtccagcctgggctacatagtgagaccgtgtctctgtttttttaaaagctagttgttgaccagctaccctgagccaggcaccaccctgaaggagcttcttttcctctggggagaagcaaattcatgatgtgtgtgctggagatctggcactcatggccagtgctttccagtatcttgaactcttcgggggtcctgttgacccatttcgtgacctacctccgtgactgctctttttcctctgtctcttaagtgtgatggttttccagagtccaatcctcaggactttcccgtccacacacaggcctggtagtcaggtggctctaaaccattaggtgggttgtagacctctctcaagctgccacctccttgctgtcgccagatcgtatttcagtctgtcaggggttatctgtatctggaggttccactgttgcttcagtctcagttacttagaatggaacccagagtcctgcccctttccacctacatgctcttacttgaaagcacctgagacttattgggtccctgattcctgcttcgtctgtatccgcagagtagttgcatgtcatttggcctgttttctaaataatcccacatcatgtcctccctgcacttacattgccactgctctgatttgggcttttttttttttgggacaatgcctctgtcccaattctgagtaacagctctggttcttgccactaccagagttctctagcaaatctgagcatctgacagggtgaaaaattctgaatggcttcctgatgcctgactttatgggatcaaattcaagttgcacgctggcactcagtgcccttctggtatcatctgccaagaccagggcctgcttcaccacagccacaataaagtcctttcaagccct

SEQ ID NO: 101148 - DNA, 4876 bp, Homo sapiens
ggagagcgccaggacgctacagcagctgaagaggcagtggcgcccgcggccgcggcgtcggggctggagcgatggcggcgaccgcggtggcggcggctgtggcgggaaccgagtcggcccagggtcccccgggcccggcagcgtcgctggagctgtggctgatacctggggtcctgggccacaggaaaagttaaaggaagagtcattgaaatactcttcagttggacagtctggtttccggaagacatcaagattcgagacgcttatcagatgctgaagaaacaaggaattataaaacaagaccctaaactaccagtggataaaatcttacccccaccatctccctggcccaagagctccatctttgatgctgatgaagaaaagtccaagcttctgacaaggcttctaaagagcaaccaccccgaggaccttcaggctgcaaaccggttaatcaagaatttggtcaaggaggaacaagaaaaatcggagaaggtgtccaagagggtcagtgcggtggaggaagtgcgaagccatgtgaaggtgctgcaggagatgctgagcatgtaccgcaggccagggcaggccccgcccgaccaggaggccctgcaggtcgtgtatgagaggtgtgaaaagctgcggcccacgctgttccggttggcgagtgacaccactgatgacgatgatgcactcgcggaaattctccaggcaaatgacctcctcacccaaggagttctgctgtacaaacaggtgatggagggccgggtcacctttggaaacagagtgaccagctcattgggagacatccctgtctccagagtctttcagaatccagcaggctgcatgaagacctgccccctgattgacttggaggtggacaatggacctgcgcagatggggactgtggtgccatctttgcttcatcaggacctggcagccttgggaatcagtgatgctcctgttacaggcatggtttctggtcagaattgctgtgaggaaaagaggaatccctcctccagcacgctgccaggcggtggtgttcagaacccttctgcagacaggaatttgctggacctcctctcagcacagccagctccgtgccctctgaattatgtttcgcagaaaagtgtccccaaggaagtgccaccaggtactaagtcctctccaggttggtcctgggaggctggcccgttggctccttccccatcttcacagaatacacctctggctcaagtgtttgtccctttggagtctgttaagcccagcagcctgccgcctctcattgtgtatgaccggaatggattcagaattctgctccacttctcccagacgggagcccctgggcacccagaggtacaggtgctgctcttgaccatgatgagcacggctccccagcctgtctgggatatcatgtttcaagtggctgtgccaaagtcaatgagagtgaagctgcagccggcatccagctccaagcttcctgcattcagtcctttgatgcctccagctgtgatatctcagatgctgctgcttgacaatccacacaaagaacctatccgcttacggtacaagctgacattcaaccaaggtggacagcctttcagcgaagtaggagaagtgaaagacttcccagacctggctgtcttgggcgcagcctaacttttcacaagatggacccttcatttcaagcttaggctggcgttacttttgctgtctagtcaggactaatcacggtgtttcagtgcggagtgccaagagtcctatcctgacgtcaggctctgggtgtcaacctctgacttattctgcagatgctctgtgtgtgtgtgtgtgtgtgtgtgtgtgtgtgtgtgtgtgtgtgtgtgtgtgtgtcggggagagggtggtagcacagggcttgggatatcggcagtgtgggaaatgcgaagcatttctcatcatcatcatctctgctacagtcatgtttctgcatgtcagcgagcgacactgtccctgcctcaggttggaggttttatcagccaaagtgtttttttcatgtatcgttcgttccattcatccactctgtgccttgtcagcctttgaaaggcttggttgctcccaggctgctgttctcagggaccttaaaagggacctggttagtcttggggcagagagtatctacttgggcactctcttccaagaaagaccttgtctccattttcattagacaatgcttcttgtgtgtgttctggaagatcttctaaatggaatgcttgttgcactgttcccaggcgagtggctgccatgagacctgaggaccacacttgggggaccaatcatgtccttcaccactgtgccttagaatcgcccctggacagagttcctgggcagaggggaaagcagctcccaggccttactcaggcctcaggtccatgggttgggcagccagtctgggcccttctcaggatcctcatctccatcctcatcctcttccttcacagcatttacttggagctctttgtgacacaccatgtcagtcatgatgaatcggccaacagccagcccttgccagctgacgtcacagtctaagatgggaaactggtacagatagacatgaagagagcttagcagtgattgaggtggtgactaaatatacagtcattgaataaataccatgtagcaagtgtactttgtggagtgttgagtaagtggaaaatggaaagccagttgcatttagagatgataggcctaaagggaactgtcttctgtcgagaagtaaaggaaacttcatgaaggatgtagaagcttagctgcctcagagaagagagaacctgaagatctgaggcaagctggacaggagaggtggatatttgttgatggaagaattcaagtttataatcaattcccacttagcacctactgtgtgctaggaacttgaatgtgtatgtttgacaagtcctgcttggcctgatgggtgggagaaggaacctgagcctggctgagatggctaggcggagggctttgaagtccaagcagctgaactggctgggtgggtttctacctttgaaactgcaagacttgtttggagctcttaattacaatatctgatatttttacagtctgatcttttgacttctacatatagtggaaatctgccaatactaattggtggagatgggaactgtaaaagatcaagtatgctaattttaagcaaatgtaaaaactcataaaacaggtaaacagtggggtgatttcatttgccataattcacataagacgaattttaatctaaaagtactttcttgcttgtattctgtgtggcttttttttgttttttgaggccatatctcactctgtcactcaggctggagtgcggtggtataatctcagcctctcgagtagctgggactacaggcgtgagccagcacgcccagctaatttttgtatttttagtagagacaggatttcaccatgttggccaggctggtctcgaactcctgacctcaggtgatccgcctgccttggcctcccagagtgctgggattacaggcgtgagccaccgcacccggcctctgtgtagcttttataggctctgttactgttgcgtagtcttgaagaggtacccatcataatgacagcatctccctctgaagggttttggtcaaaatgggtgaatgagacttatacataaagacaggctttctcccctatagttaggaggtgaactcacacatgtgtacctgaacattcttgcttttgaggagacagactcccagtggtactactatgcttaggtgttggacaggataggggtaggaggagaggaggcaggctgctgtcctgaaagtggctgtggtttatggcatcactcccttctaatcagcaagtccagtggccacttagagcccagctcctacctcttcattcacttaacaagtagttattggctgtgcacagtggctcacgcctgtagtcccagcattttgggaggctgagtgggatgaccgcttgagcccaggatttcaagtccagcctgggctacatagtgagaccgtgtctctgtttttttaaaagctagttgttgaccagctaccctgagccaggcaccaccctgaaggagcttcttttcctctggggagaagcaaattcatgatgtgtgtgctggagatctggcactcatggccagtgctttccagtatcttgaactcttcgggggtcctgttgacccatttcgtgacctacctccgtgactgctctttttcctctgtctcttaagtgtgatggttttccagagtccaatcctcaggactttcccgtccacacacaggcctggtagtcaggtggctctaaaccattaggtgggttgtagacctctctcaagctgccacctccttgctgtcgccagatcgtatttcagtctgtcaggggttatctgtatctggaggttccactgttgcttcagtctcagttacttagaatggaacccagagtcctgcccctttccacctacatgctcttacttgaaagcacctgagacttattgggtccctgattcctgcttcgtctgtatccgcagagtagttgcatgtcatttggcctgttttctaaataatcccacatcatgtcctccctgcacttacattgccactgctctgatttgggcttttttttttttgggacaatgcctctgtcccaattctgagtaacagctctggttcttgccactaccagagttctctagcaaatctgagcatctgacagggtgaaaaattctgaatggcttcctgatgcctgactttatgggatcaaattcaagttgcacgctggcactcagtgcccttctggtatcatctgccaagaccagggcctgcttcaccacagccacaataaagtcctttcaagccct

SEQ ID NO: 101149 - DNA, 4365 bp, Homo sapiens
agggctggagccctaaggtgtatgttagctggccgatggagcttacaaacattctaaccgcaggccaggcaggccccgcccgatcaggaggccctgaggtcgtgtatgagaggtgtgaaaagctgcggcccacgctgttccggttggcgagtgacaccactgatgacgatgatgcactcgcggaaattctccaggcaaatgacctcctcacccaaggagttctgctgtacaaacaggtgatggagggccgggtcacctttggaaacagagtgaccagctcattgggagacatccctgtctccagagtctttcagaatccagcaggctgcatgaagacctgccccctgattgacttggaggtggacaatggacctgcgcagatggggactgtggtgccatctttgcttcatcaggacctggcagccttgggaatcagtgatgctcctgttacaggcatggtttctggtcagaattgctgtgaggaaaagaggaatccctcctccagcacgctgccaggcggtggtgttcagaacccttctgcagacaggaatttgctggacctcctctcagcacagccagctccgtgccctctgaattatgtttcgcagaaaagtgtccccaaggaagtgccaccaggtactaagtcctctccaggttggtcctgggaggctggcccgttggctccttccccatcttcacagaatacacctctggctcaagtgtttgtccctttggagtctgttaagcccagcagcctgccgcctctcattgtgtatgaccggaatggattcagaattctgctccacttctcccagacgggagcccctgggcacccagaggtacaggtgctgctcttgaccatgatgagcacggctccccagcctgtctgggatatcatgtttcaagtggctgtgccaaagtcaatgagagtgaagctgcagccggcatccagctccaagcttcctgcattcagtcctttgatgcctccagctgtgatatctcagatgctgctgcttgacaatccacacaaagaacctatccgcttacggtacaagctgacattcaaccaaggtggacagcctttcagcgaagtaggagaagtgaaagacttcccagacctggctgtcttgggcgcagcctaacttttcacaagatggacccttcatttcaagcttaggctggcgttacttttgctgtctagtcaggactaatcacggtgtttcagtgcggagtgccaagagtcctatcctgacgtcaggctctgggtgtcaacctctgacttattctgcagatgctctgtgtgtgtgtgtgtgtgtgtgtgtgtgtgtgtgtgtgtgtgtgtgtgtgtgtgtcggggagagggtggtagcacagggcttgggatatcggcagtgtgggaaatgcgaagcatttctcatcatcatcatctctgctacagtcatgtttctgcatgtcagcgagcgacactgtccctgcctcaggttggaggttttatcagccaaagtgtttttttcatgtatcgttcgttccattcatccactctgtgccttgtcagcctttgaaaggcttggttgctcccaggctgctgttctcagggaccttaaaagggacctggttagtcttggggcagagagtatctacttgggcactctcttccaagaaagaccttgtctccattttcattagacaatgcttcttgtgtgtgttctggaagatcttctaaatggaatgcttgttgcactgttcccaggcgagtggctgccatgagacctgaggaccacacttgggggaccaatcatgtccttcaccactgtgccttagaatcgcccctggacagagttcctgggcagaggggaaagcagctcccaggccttactcaggcctcaggtccatgggttgggcagccagtctgggcccttctcaggatcctcatctccatcctcatcctcttccttcacagcatttacttggagctctttgtgacacaccatgtcagtcatgatgaatcggccaacagccagcccttgccagctgacgtcacagtctaagatgggaaactggtacagatagacatgaagagagcttagcagtgattgaggtggtgactaaatatacagtcattgaataaataccatgtagcaagtgtactttgtggagtgttgagtaagtggaaaatggaaagccagttgcatttagagatgataggcctaaagggaactgtcttctgtcgagaagtaaaggaaacttcatgaaggatgtagaagcttagctgcctcagagaagagagaacctgaagatctgaggcaagctggacaggagaggtggatatttgttgatggaagaattcaagtttataatcaattcccacttagcacctactgtgtgctaggaacttgaatgtgtatgtttgacaagtcctgcttggcctgatgggtgggagaaggaacctgagcctggctgagatggctaggcggagggctttgaagtccaagcagctgaactggctgggtgggtttctacctttgaaactgcaagacttgtttggagctcttaattacaatatctgatatttttacagtctgatcttttgacttctacatatagtggaaatctgccaatactaattggtggagatgggaactgtaaaagatcaagtatgctaattttaagcaaatgtaaaaactcataaaacaggtaaacagtggggtgatttcatttgccataattcacataagacgaattttaatctaaaagtactttcttgcttgtattctgtgtggcttttttttgttttttgaggccatatctcactctgtcactcaggctggagtgcggtggtataatctcagcctctcgagtagctgggactacaggcgtgagccagcacgcccagctaatttttgtatttttagtagagacaggatttcaccatgttggccaggctggtctcgaactcctgacctcaggtgatccgcctgccttggcctcccagagtgctgggattacaggcgtgagccaccgcacccggcctctgtgtagcttttataggctctgttactgttgcgtagtcttgaagaggtacccatcataatgacagcatctccctctgaagggttttggtcaaaatgggtgaatgagacttatacataaagacaggctttctcccctatagttaggaggtgaactcacacatgtgtacctgaacattcttgcttttgaggagacagactcccagtggtactactatgcttaggtgttggacaggataggggtaggaggagaggaggcaggctgctgtcctgaaagtggctgtggtttatggcatcactcccttctaatcagcaagtccagtggccacttagagcccagctcctacctcttcattcacttaacaagtagttattggctgtgcacagtggctcacgcctgtagtcccagcattttgggaggctgagtgggatgaccgcttgagcccaggatttcaagtccagcctgggctacatagtgagaccgtgtctctgtttttttaaaagctagttgttgaccagctaccctgagccaggcaccaccctgaaggagcttcttttcctctggggagaagcaaattcatgatgtgtgtgctggagatctggcactcatggccagtgctttccagtatcttgaactcttcgggggtcctgttgacccatttcgtgacctacctccgtgactgctctttttcctctgtctcttaagtgtgatggttttccagagtccaatcctcaggactttcccgtccacacacaggcctggtagtcaggtggctctaaaccattaggtgggttgtagacctctctcaagctgccacctccttgctgtcgccagatcgtatttcagtctgtcaggggttatctgtatctggaggttccactgttgcttcagtctcagttacttagaatggaacccagagtcctgcccctttccacctacatgctcttacttgaaagcacctgagacttattgggtccctgattcctgcttcgtctgtatccgcagagtagttgcatgtcatttggcctgttttctaaataatcccacatcatgtcctccctgcacttacattgccactgctctgatttgggcttttttttttttgggacaatgcctctgtcccaattctgagtaacagctctggttcttgccactaccagagttctctagcaaatctgagcatctgacagggtgaaaaattctgaatggcttcctgatgcctgactttatgggatcaaattcaagttgcacgctggcactcagtgcccttctggtatcatctgccaagaccagggcctgcttcaccacagccacaataaagtcctttcaagccct

SEQ ID NO: 101150 - DNA, 4450 bp, Homo sapiens
  misc_feature (21)..(21): n is a, c, g, or t
  misc_feature (73)..(73): n is a, c, g, or t
  misc_feature (78)..(78): n is a, c, g, or t
  misc_feature (85)..(85): n is a, c, g, or t
  misc_feature (103)..(103): n is a, c, g, or t
ctcctgttacaggcatggttnctggtcaagaattcctgtgaggaaaaagaggaatccctcctccagcaccctnccagncgggtgntgttcaagaacccttctncagacaggaatttgctggacctcctctcacacatgtaccgcaggccagggcaggccccgcccgaccaggaggccctgcaggtcgtgtatgagaggtgtgaaaagctgcggcccacgctgttccggttggcgagtgacaccactgatgacgatgatgcactcgcggaaattctccaggcaaatgacctcctcacccaaggagttctgctgtacaaacaggtgatggagggccgggtcacctttggaaacagagtgaccagctcattgggagacatccctgtctccagagtctttcagaatccagcaggctgcatgaagacctgccccctgattgacttggaggtggacaatggacctgcgcagatggggactgtggtgccatctttgcttcatcaggacctggcagccttgggaatcagtgatgctcctgttacaggcatggtttctggtcagaattgctgtgaggaaaagaggaatccctcctccagcacgctgccaggcggtggtgttcagaacccttctgcagacaggaatttgctggacctcctctcagcacagccagctccgtgccctctgaattatgtttcgcagaaaagtgtccccaaggaagtgccaccaggtactaagtcctctccaggttggtcctgggaggctggcccgttggctccttccccatcttcacagaatacacctctggctcaagtgtttgtccctttggagtctgttaagcccagcagcctgccgcctctcattgtgtatgaccggaatggattcagaattctgctccacttctcccagacgggagcccctgggcacccagaggtacaggtgctgctcttgaccatgatgagcacggctccccagcctgtctgggatatcatgtttcaagtggctgtgccaaagtcaatgagagtgaagctgcagccggcatccagctccaagcttcctgcattcagtcctttgatgcctccagctgtgatatctcagatgctgctgcttgacaatccacacaaagaacctatccgcttacggtacaagctgacattcaaccaaggtggacagcctttcagcgaagtaggagaagtgaaagacttcccagacctggctgtcttgggcgcagcctaacttttcacaagatggacccttcatttcaagcttaggctggcgttacttttgctgtctagtcaggactaatcacggtgtttcagtgcggagtgccaagagtcctatcctgacgtcaggctctgggtgtcaacctctgacttattctgcagatgctctgtgtgtgtgtgtgtgtgtgtgtgtgtgtgtgtgtgtgtgtgtgtgtgtgtgtgtcggggagagggtggtagcacagggcttgggatatcggcagtgtgggaaatgcgaagcatttctcatcatcatcatctctgctacagtcatgtttctgcatgtcagcgagcgacactgtccctgcctcaggttggaggttttatcagccaaagtgtttttttcatgtatcgttcgttccattcatccactctgtgccttgtcagcctttgaaaggcttggttgctcccaggctgctgttctcagggaccttaaaagggacctggttagtcttggggcagagagtatctacttgggcactctcttccaagaaagaccttgtctccattttcattagacaatgcttcttgtgtgtgttctggaagatcttctaaatggaatgcttgttgcactgttcccaggcgagtggctgccatgagacctgaggaccacacttgggggaccaatcatgtccttcaccactgtgccttagaatcgcccctggacagagttcctgggcagaggggaaagcagctcccaggccttactcaggcctcaggtccatgggttgggcagccagtctgggcccttctcaggatcctcatctccatcctcatcctcttccttcacagcatttacttggagctctttgtgacacaccatgtcagtcatgatgaatcggccaacagccagcccttgccagctgacgtcacagtctaagatgggaaactggtacagatagacatgaagagagcttagcagtgattgaggtggtgactaaatatacagtcattgaataaataccatgtagcaagtgtactttgtggagtgttgagtaagtggaaaatggaaagccagttgcatttagagatgataggcctaaagggaactgtcttctgtcgagaagtaaaggaaacttcatgaaggatgtagaagcttagctgcctcagagaagagagaacctgaagatctgaggcaagctggacaggagaggtggatatttgttgatggaagaattcaagtttataatcaattcccacttagcacctactgtgtgctaggaacttgaatgtgtatgtttgacaagtcctgcttggcctgatgggtgggagaaggaacctgagcctggctgagatggctaggcggagggctttgaagtccaagcagctgaactggctgggtgggtttctacctttgaaactgcaagacttgtttggagctcttaattacaatatctgatatttttacagtctgatcttttgacttctacatatagtggaaatctgccaatactaattggtggagatgggaactgtaaaagatcaagtatgctaattttaagcaaatgtaaaaactcataaaacaggtaaacagtggggtgatttcatttgccataattcacataagacgaattttaatctaaaagtactttcttgcttgtattctgtgtggcttttttttgttttttgaggccatatctcactctgtcactcaggctggagtgcggtggtataatctcagcctctcgagtagctgggactacaggcgtgagccagcacgcccagctaatttttgtatttttagtagagacaggatttcaccatgttggccaggctggtctcgaactcctgacctcaggtgatccgcctgccttggcctcccagagtgctgggattacaggcgtgagccaccgcacccggcctctgtgtagcttttataggctctgttactgttgcgtagtcttgaagaggtacccatcataatgacagcatctccctctgaagggttttggtcaaaatgggtgaatgagacttatacataaagacaggctttctcccctatagttaggaggtgaactcacacatgtgtacctgaacattcttgcttttgaggagacagactcccagtggtactactatgcttaggtgttggacaggataggggtaggaggagaggaggcaggctgctgtcctgaaagtggctgtggtttatggcatcactcccttctaatcagcaagtccagtggccacttagagcccagctcctacctcttcattcacttaacaagtagttattggctgtgcacagtggctcacgcctgtagtcccagcattttgggaggctgagtgggatgaccgcttgagcccaggatttcaagtccagcctgggctacatagtgagaccgtgtctctgtttttttaaaagctagttgttgaccagctaccctgagccaggcaccaccctgaaggagcttcttttcctctggggagaagcaaattcatgatgtgtgtgctggagatctggcactcatggccagtgctttccagtatcttgaactcttcgggggtcctgttgacccatttcgtgacctacctccgtgactgctctttttcctctgtctcttaagtgtgatggttttccagagtccaatcctcaggactttcccgtccacacacaggcctggtagtcaggtggctctaaaccattaggtgggttgtagacctctctcaagctgccacctccttgctgtcgccagatcgtatttcagtctgtcaggggttatctgtatctggaggttccactgttgcttcagtctcagttacttagaatggaacccagagtcctgcccctttccacctacatgctcttacttgaaagcacctgagacttattgggtccctgattcctgcttcgtctgtatccgcagagtagttgcatgtcatttggcctgttttctaaataatcccacatcatgtcctccctgcacttacattgccactgctctgatttgggcttttttttttttgggacaatgcctctgtcccaattctgagtaacagctctggttcttgccactaccagagttctctagcaaatctgagcatctgacagggtgaaaaattctgaatggcttcctgatgcctgactttatgggatcaaattcaagttgcacgctggcactcagtgcccttctggtatcatctgccaagaccagggcctgcttcaccacagccacaataaagtcctttcaagccct

SEQ ID NO: 101151 - DNA, 5066 bp, Homo sapiens
ggagagcgccaggacgctacagcagctgaagaggcagtggcgcccgcggccgcggcgtcggggctggagcgatggcggcgaccgcggtggcggcggctgtggcgggaaccgagtcggcccagggtcccccgggcccggcagcgtcgctggagctgtggctgaacaaagccacagacccaagcatgtcggaacaggattggtcagctatccagaatttctgtgagcaggtgaacactgaccccaatggccccacacatgcgccctggctactggcccacaagatccagtctccgcaagagaaggaagctctttatgccttaacggtgctggagatgtgcatgaaccactgtggggagaagttccacagcgaggtggccaaatttcgtttcctgaacgaactgatcaaagtgttgtccccaaagtacctggggtcctgggccacaggaaaagttaaaggaagagtcattgaaatactcttcagttggacagtctggtttccggaagacatcaagattcgagacgcttatcagatgctgaagaaacaaggaattataaaacaagaccctaaactaccagtggataaaatcttacccccaccatctccctggcccaagagctccatctttgatgctgatgaagaaaagtccaagctctttctcagtgccagtgagcccggccctatccattttccatccaccatgaactccccaaaccgttattccttggacatcagtatctagagggacaagaagaagaaggtggccaagacccagggataactgtggtgcctcttctgacaaggcttctaaagagcaaccaccccgaggaccttcaggctgcaaaccggttaatcaagaatttggtcaaggaggaacaagaaaaatcggagaaggtgtccaagagggtcagtgcggtggaggaagtgcgaagccatgtgaaggtgctgcaggagatgctgagcatgtaccgcaggccagggcaggccccgcccgaccaggaggccctgcaggtcgtgtatgagaggtgtgaaaagctgcggcccacgctgttccggttggcgagtgacaccactgatgacgatgatgcactcgcggaaattctccaggcaaatgacctcctcacccaaggagttctgctgtacaaacaggtgatggagggccgggtcacctttggaaacagagtgaccagctcattgggagacatccctgtctccagagtctttcagaatccagcaggctgcatgaagacctgccccctgattgacttggaggtggacaatggacctgcgcagatggggactgtggtgccatctttgcttcatcaggacctggcagccttgggaatcagtgatgctcctgttacaggcatggtttctggtcagaattgctgtgaggaaaagaggaatccctcctccagcacgctgccaggcggtggtgttcagaacccttctgcagacaggaatttgctggacctcctctcagcacagccagctccgtgccctctgaattatgtttcgcagaaaagtgtccccaaggaagtgccaccaggtactaagtcctctccaggttggtcctgggatatcatgtttcaagtggctgtgccaaagtcaatgagagtgaagctgcagccggcatccagctccaagcttcctgcattcagtcctttgatgcctccagctgtgatatctcagatgctgctgcttgacaatccacacaaagaacctatccgcttacggtacaagctgacattcaaccaaggtggacagcctttcagcgaagtaggagaagtgaaagacttcccagacctggctgtcttgggcgcagcctaacttttcacaagatggacccttcatttcaagcttaggctggcgttacttttgctgtctagtcaggactaatcacggtgtttcagtgcggagtgccaagagtcctatcctgacgtcaggctctgggtgtcaacctctgacttattctgcagatgctctgtgtgtgtgtgtgtgtgtgtgtgtgtgtgtgtgtgtgtgtgtgtgtgtgtgtgtgtgtgtgtgtgtgttcggggagagggtggtagcacagggcttgggatatcggcagtgtgggaaatgcgaagcatttctcatcatcatcatctctgctacagtcatgtttctgcatgtcagcgagcgacactgtccctgcctcaggttggaggttttatcagccaaagtgtttttttcatgtatcgttcgttccattcatccactctgtgccttgtcagcctttgaaaggcttggttgctcccaggctgctgttctcagggaccttaaaagggacctggttagtcttggggcagagagtatctacttgggcactctcttccaagaaagaccttgtctccattttcattagacaatgcttcttgtgtgtgttctggaagatcttctaaatggaatgcttgttgcactgttcccaggcgagtggctgccatgagacctgaggaccacacttgggggaccaatcatgtccttcaccactgtgccttagaatcgcccctggacagagttcctgggcagaggggaaagcagctcccaggccttactcaggcctcaggtccatgggttgggcagccagtctgggcccttctcaggatcctcatctccatcctcatcctcttccttcacagcatttacttggagctctttgtgacacaccatgtcagtcatgatgaatcggccaacagccagcccttgccagctgacgtcacagtctaagatgggaaactggtacagatagacatgaagagagcttagcagtgattgaggtggtgactaaatatacagtcattgaataaataccatgtagcaagtgtactttgtggagtgttgagtaagtggaaaatggaaagccagttgcatttagagatgataggcctaaagggaactgtcttctgtcgagaagtaaaggaaacttcatgaaggatgtagaagcttagctgcctcagagaagagagaacctgaagatctgaggcaagctggacaggagaggtggatatttgttgatggaagaattcaagtttataatcaattcccacttagcacctactgtgtgctaggaacttgaatgtgtatgtttgacaagtcctgcttggcctgatgggtgggagaaggaacctgagcctggctgagatggctaggcggagggctttgaagtccaagcagctgaactggctgggtgggtttctacctttgaaactgcaagacttgtttggagctcttaattacaatatctgatatttttacagtctgatcttttgacttctacatatagtggaaatctgccaatactaattggtggagatgggaactgtaaaagatcaagtatgctaattttaagcaaatgtaaaaactcataaaacaggtaaacagtggggtgatttcatttgccataattcacataagacgaattttaatctaaaagtactttcttgcttgtattctgtgtggcttttttttgttttttgaggccatatctcactctgtcactcaggctggagtgcggtggtataatctcagcctctcgagtagctgggactacaggcgtgagccagcacgcccagctaatttttgtatttttagtagagacaggatttcaccatgttggccaggctggtctcgaactcctgacctcaggtgatccgcctgccttggcctcccagagtgctgggattacaggcgtgagccaccgcacccggcctctgtgtagcttttataggctctgttactgttgcgtagtcttgaagaggtacccatcataatgacagcatctccctctgaagggttttggtcaaaatgggtgaatgagacttatacataaagacaggctttctcccctatagttaggaggtgaactcacacatgtgtacctgaacattcttgcttttgaggagacagactcccagtggtactactatgcttaggtgttggacaggataggggtaggaggagaggaggcaggctgctgtcctgaaagtggctgtggtttatggcatcactcccttctaatcagcaagtccagtggccacttagagcccagctcctacctcttcattcacttaacaagtagttattggctgtgcacagtggctcacgcctgtagtcccagcattttgggaggctgagtgggatgaccgcttgagcccaggatttcaagtccagcctgggctacatagtgagaccgtgtctctgtttttttaaaagctagttgttgaccagctaccctgagccaggcaccaccctgaaggagcttcttttcctctggggagaagcaaattcatgatgtgtgtgctggagatctggcactcatggccagtgctttccagtatcttgaactcttcgggggtcctgttgacccatttcgtgacctacctccgtgactgctctttttcctctgtctcttaagtgtgatggttttccagagtccaatcctcaggactttcccgtccacacacaggcctggtagtcaggtggctctaaaccattaggtgggttgtagacctctctcaagctgccacctccttgctgtcgccagatcgtatttcagtctgtcaggggttatctgtatctggaggttccactgttgcttcagtctcagttacttagaatggaacccagagtcctgcccctttccacctacatgctcttacttgaaagcacctgagacttattgggtccctgattcctgcttcgtctgtatccgcagagtagttgcatgtcatttggcctgttttctaaataatcccacatcatgtcctccctgcacttacattgccactgctctgatttgggcttttttttttttgggacaatgcctctgtcccaattctgagtaacagctctggttcttgccactaccagagttctctagcaaatctgagcatctgacagggtgaaaaattctgaatggcttcctgatgcctgactttatgggatcaaattcaagttgcacgctggcactcagtgcccttctggtatcatctgccaagaccagggcctgcttcaccacagccacaataaagtcctttcaagccct

SEQ ID NO: 101152 - DNA, 4129 bp, Homo sapiens
tataggctagcatgcatgcatgcagactgtagagtaagcacccggcagccattaaccatgcgttatctagtctttcagaatccagcaggctgcatgaagacctgccccctgattgacttggaggtggacaatggacctgcgcagatggggactgtggtgccatctttgcttcatcaggacctggcagccttgggaatcagtgatgctcctgttacaggcatggtttctggtcagaattgctgtgaggaaaagaggaatccctcctccagcacgctgccaggcggtggtgttcagaacccttctgcagacaggaatttgctggacctcctctcagcacagccagctccgtgccctctgaattatgtttcgcagaaaagtgtccccaaggaagtgccaccaggtactaagtcctctccaggttggtcctgggaggctggcccgttggctccttccccatcttcacagaatacacctctggctcaagtgtttgtccctttggagtctgttaagcccagcagcctgccgcctctcattgtgtatgaccggaatggattcagaattctgctccacttctcccagacgggagcccctgggcacccagaggtacaggtgctgctcttgaccatgatgagcacggctccccagcctgtctgggatatcatgtttcaagtggctgtgccaaagtcaatgagagtgaagctgcagccggcatccagctccaagcttcctgcattcagtcctttgatgcctccagctgtgatatctcagatgctgctgcttgacaatccacacaaagaacctatccgcttacggtacaagctgacattcaaccaaggtggacagcctttcagcgaagtaggagaagtgaaagacttcccagacctggctgtcttgggcgcagcctaacttttcacaagatggacccttcatttcaagcttaggctggcgttacttttgctgtctagtcaggactaatcacggtgtttcagtgcggagtgccaagagtcctatcctgacgtcaggctctgggtgtcaacctctgacttattctgcagatgctctgtgtgtgtgtgtgtgtgtgtgtgtgtgtgtgtgtgtgtgtgtgtgtgtgtgtgtcggggagagggtggtagcacagggcttgggatatcggcagtgtgggaaatgcgaagcatttctcatcatcatcatctctgctacagtcatgtttctgcatgtcagcgagcgacactgtccctgcctcaggttggaggttttatcagccaaagtgtttttttcatgtatcgttcgttccattcatccactctgtgccttgtcagcctttgaaaggcttggttgctcccaggctgctgttctcagggaccttaaaagggacctggttagtcttggggcagagagtatctacttgggcactctcttccaagaaagaccttgtctccattttcattagacaatgcttcttgtgtgtgttctggaagatcttctaaatggaatgcttgttgcactgttcccaggcgagtggctgccatgagacctgaggaccacacttgggggaccaatcatgtccttcaccactgtgccttagaatcgcccctggacagagttcctgggcagaggggaaagcagctcccaggccttactcaggcctcaggtccatgggttgggcagccagtctgggcccttctcaggatcctcatctccatcctcatcctcttccttcacagcatttacttggagctctttgtgacacaccatgtcagtcatgatgaatcggccaacagccagcccttgccagctgacgtcacagtctaagatgggaaactggtacagatagacatgaagagagcttagcagtgattgaggtggtgactaaatatacagtcattgaataaataccatgtagcaagtgtactttgtggagtgttgagtaagtggaaaatggaaagccagttgcatttagagatgataggcctaaagggaactgtcttctgtcgagaagtaaaggaaacttcatgaaggatgtagaagcttagctgcctcagagaagagagaacctgaagatctgaggcaagctggacaggagaggtggatatttgttgatggaagaattcaagtttataatcaattcccacttagcacctactgtgtgctaggaacttgaatgtgtatgtttgacaagtcctgcttggcctgatgggtgggagaaggaacctgagcctggctgagatggctaggcggagggctttgaagtccaagcagctgaactggctgggtgggtttctacctttgaaactgcaagacttgtttggagctcttaattacaatatctgatatttttacagtctgatcttttgacttctacatatagtggaaatctgccaatactaattggtggagatgggaactgtaaaagatcaagtatgctaattttaagcaaatgtaaaaactcataaaacaggtaaacagtggggtgatttcatttgccataattcacataagacgaattttaatctaaaagtactttcttgcttgtattctgtgtggcttttttttgttttttgaggccatatctcactctgtcactcaggctggagtgcggtggtataatctcagcctctcgagtagctgggactacaggcgtgagccagcacgcccagctaatttttgtatttttagtagagacaggatttcaccatgttggccaggctggtctcgaactcctgacctcaggtgatccgcctgccttggcctcccagagtgctgggattacaggcgtgagccaccgcacccggcctctgtgtagcttttataggctctgttactgttgcgtagtcttgaagaggtacccatcataatgacagcatctccctctgaagggttttggtcaaaatgggtgaatgagacttatacataaagacaggctttctcccctatagttaggaggtgaactcacacatgtgtacctgaacattcttgcttttgaggagacagactcccagtggtactactatgcttaggtgttggacaggataggggtaggaggagaggaggcaggctgctgtcctgaaagtggctgtggtttatggcatcactcccttctaatcagcaagtccagtggccacttagagcccagctcctacctcttcattcacttaacaagtagttattggctgtgcacagtggctcacgcctgtagtcccagcattttgggaggctgagtgggatgaccgcttgagcccaggatttcaagtccagcctgggctacatagtgagaccgtgtctctgtttttttaaaagctagttgttgaccagctaccctgagccaggcaccaccctgaaggagcttcttttcctctggggagaagcaaattcatgatgtgtgtgctggagatctggcactcatggccagtgctttccagtatcttgaactcttcgggggtcctgttgacccatttcgtgacctacctccgtgactgctctttttcctctgtctcttaagtgtgatggttttccagagtccaatcctcaggactttcccgtccacacacaggcctggtagtcaggtggctctaaaccattaggtgggttgtagacctctctcaagctgccacctccttgctgtcgccagatcgtatttcagtctgtcaggggttatctgtatctggaggttccactgttgcttcagtctcagttacttagaatggaacccagagtcctgcccctttccacctacatgctcttacttgaaagcacctgagacttattgggtccctgattcctgcttcgtctgtatccgcagagtagttgcatgtcatttggcctgttttctaaataatcccacatcatgtcctccctgcacttacattgccactgctctgatttgggcttttttttttttgggacaatgcctctgtcccaattctgagtaacagctctggttcttgccactaccagagttctctagcaaatctgagcatctgacagggtgaaaaattctgaatggcttcctgatgcctgactttatgggatcaaattcaagttgcacgctggcactcagtgcccttctggtatcatctgccaagaccagggcctgcttcaccacagccacaataaagtcctttcaagccct

SEQ ID NO: 101153 - DNA, 3674 bp, Homo sapiens
ccgccccgcaccaggcccgggttacggcgagggttgtcccttggagtctgttacgcccagcagcctgccgcctctcattgtgtatgaccggaatggattcagaattctgctccacttctcccagacgggagcccctgggcacccagaggtacaggtgctgctcttgaccatgatgagcacggctccccagcctgtctgggatatcatgtttcaagtggctgtgccaaagtcaatgagagtgaagctgcagccggcatccagctccaagcttcctgcattcagtcctttgatgcctccagctgtgatatctcagatgctgctgcttgacaatccacacaaagaacctatccgcttacggtacaagctgacattcaaccaaggtggacagcctttcagcgaagtaggagaagtgaaagacttcccagacctggctgtcttgggcgcagcctaacttttcacaagatggacccttcatttcaagcttaggctggcgttacttttgctgtctagtcaggactaatcacggtgtttcagtgcggagtgccaagagtcctatcctgacgtcaggctctgggtgtcaacctctgacttattctgcagatgctctgtgtgtgtgtgtgtgtgtgtgtgtgtgtgtgtgtgtgtgtgtgtgtgtgtgtgtcggggagagggtggtagcacagggcttgggatatcggcagtgtgggaaatgcgaagcatttctcatcatcatcatctctgctacagtcatgtttctgcatgtcagcgagcgacactgtccctgcctcaggttggaggttttatcagccaaagtgtttttttcatgtatcgttcgttccattcatccactctgtgccttgtcagcctttgaaaggcttggttgctcccaggctgctgttctcagggaccttaaaagggacctggttagtcttggggcagagagtatctacttgggcactctcttccaagaaagaccttgtctccattttcattagacaatgcttcttgtgtgtgttctggaagatcttctaaatggaatgcttgttgcactgttcccaggcgagtggctgccatgagacctgaggaccacacttgggggaccaatcatgtccttcaccactgtgccttagaatcgcccctggacagagttcctgggcagaggggaaagcagctcccaggccttactcaggcctcaggtccatgggttgggcagccagtctgggcccttctcaggatcctcatctccatcctcatcctcttccttcacagcatttacttggagctctttgtgacacaccatgtcagtcatgatgaatcggccaacagccagcccttgccagctgacgtcacagtctaagatgggaaactggtacagatagacatgaagagagcttagcagtgattgaggtggtgactaaatatacagtcattgaataaataccatgtagcaagtgtactttgtggagtgttgagtaagtggaaaatggaaagccagttgcatttagagatgataggcctaaagggaactgtcttctgtcgagaagtaaaggaaacttcatgaaggatgtagaagcttagctgcctcagagaagagagaacctgaagatctgaggcaagctggacaggagaggtggatatttgttgatggaagaattcaagtttataatcaattcccacttagcacctactgtgtgctaggaacttgaatgtgtatgtttgacaagtcctgcttggcctgatgggtgggagaaggaacctgagcctggctgagatggctaggcggagggctttgaagtccaagcagctgaactggctgggtgggtttctacctttgaaactgcaagacttgtttggagctcttaattacaatatctgatatttttacagtctgatcttttgacttctacatatagtggaaatctgccaatactaattggtggagatgggaactgtaaaagatcaagtatgctaattttaagcaaatgtaaaaactcataaaacaggtaaacagtggggtgatttcatttgccataattcacataagacgaattttaatctaaaagtactttcttgcttgtattctgtgtggcttttttttgttttttgaggccatatctcactctgtcactcaggctggagtgcggtggtataatctcagcctctcgagtagctgggactacaggcgtgagccagcacgcccagctaatttttgtatttttagtagagacaggatttcaccatgttggccaggctggtctcgaactcctgacctcaggtgatccgcctgccttggcctcccagagtgctgggattacaggcgtgagccaccgcacccggcctctgtgtagcttttataggctctgttactgttgcgtagtcttgaagaggtacccatcataatgacagcatctccctctgaagggttttggtcaaaatgggtgaatgagacttatacataaagacaggctttctcccctatagttaggaggtgaactcacacatgtgtacctgaacattcttgcttttgaggagacagactcccagtggtactactatgcttaggtgttggacaggataggggtaggaggagaggaggcaggctgctgtcctgaaagtggctgtggtttatggcatcactcccttctaatcagcaagtccagtggccacttagagcccagctcctacctcttcattcacttaacaagtagttattggctgtgcacagtggctcacgcctgtagtcccagcattttgggaggctgagtgggatgaccgcttgagcccaggatttcaagtccagcctgggctacatagtgagaccgtgtctctgtttttttaaaagctagttgttgaccagctaccctgagccaggcaccaccctgaaggagcttcttttcctctggggagaagcaaattcatgatgtgtgtgctggagatctggcactcatggccagtgctttccagtatcttgaactcttcgggggtcctgttgacccatttcgtgacctacctccgtgactgctctttttcctctgtctcttaagtgtgatggttttccagagtccaatcctcaggactttcccgtccacacacaggcctggtagtcaggtggctctaaaccattaggtgggttgtagacctctctcaagctgccacctccttgctgtcgccagatcgtatttcagtctgtcaggggttatctgtatctggaggttccactgttgcttcagtctcagttacttagaatggaacccagagtcctgcccctttccacctacatgctcttacttgaaagcacctgagacttattgggtccctgattcctgcttcgtctgtatccgcagagtagttgcatgtcatttggcctgttttctaaataatcccacatcatgtcctccctgcacttacattgccactgctctgatttgggcttttttttttttgggacaatgcctctgtcccaattctgagtaacagctctggttcttgccactaccagagttctctagcaaatctgagcatctgacagggtgaaaaattctgaatggcttcctgatgcctgactttatgggatcaaattcaagttgcacgctggcactcagtgcccttctggtatcatctgccaagaccagggcctgcttcaccacagccacaataaagtcctttcaagccct

SEQ ID NO: 101154 - DNA, 2585 bp, Homo sapiens
ggagagcgccaggacgctacagcagctgaagaggcagtggcgcccgcggccgcggcgtcggggctggagcgatggcggcgaccgcggtggcggcggctgtggcgggaaccgagtcggcccagggtcccccgggcccggcagcgtcgctggagctgtggctgaacaaagccacagacccaagcatgtcggaacaggattggtcagctatccagaatttctgtgagcaggtgaacactgaccccaatggccccacacatgcgccctggctactggcccacaagatccagtctccgcaagagaaggaagctctttatgccttaacggtgctggagatgtgcatgaaccactgtggggagaagttccacagcgaggtggccaaatttcgtttcctgaacgaactgatcaaagtgttgtccccaaagtacctggggtcctgggccacaggaaaagttaaaggaagagtcattgaaatactcttcagttggacagtctggtttccggaagacatcaagattcgagacgcttatcagatgctgaagaaacaaggaattataaaacaagaccctaaactaccagtggataaaatcttacccccaccatctccctggcccaagagctccatctttgatgctgatgaagaaaagtccaagcttctgacaaggcttctaaagagcaaccaccccgaggaccttcaggctgcaaaccggttaatcaagaatttggtcaaggaggaacaagaaaaatcggagaaggtgtccaagagggtcagtgcggtggaggaagtgcgaagccatgtgaaggtgctgcaggagatgctgagcatgtaccgcaggccagggcaggccccgcccgaccaggaggccctgcaggtcgtgtatgagaggtgtgaaaagctgcggcccacgctgttccggttggcgagtgacaccactgatgacgatgatgcactcgcggaaattctccaggcaaatgacctcctcacccaaggagttctgctgtacaaacaggtgatggagggccgggtcacctttggaaacagagtgaccagctcattgggagacatccctgtctccagagtctttcagaatccagcaggctgcatgaagacctgccccctgattgacttggaggtggacaatggacctgcgcagatggggactgtggtgccatctttgcttcatcaggacctggcagccttgggaatcagtgatgctcctgttacaggcatggtttctggtcagaattgctgtgaggaaaagaggaatccctcctccagcacgctgccaggcggtggtgttcagaacccttctgcagacaggaatttgctggacctcctctcagcacagccagctccgtgccctctgaattatgtttcgcagaaaagtgtccccaaggaagtgccaccaggtactaagtcctctccaggttggtcctgggaggctggcccgttggctccttccccatcttcacagaatacacctctggctcaagtgtttgtccctttggagtctgttaagcccagaaagtggctgtggtttatggcatcactcccttctaatcagcaagtccagtggccacttagagcccagctcctacctcttcattcacttaacaagtagttattggctgtgcacagtggctcacgcctgtagtcccagcattttgggaggctgagtgggatgaccgcttgagcccaggatttcaagtccagcctgggctacatagtgagaccgtgtctctgtttttttaaaagctagttgttgaccagctaccctgagccaggcaccaccctgaaggagcttcttttcctctggggagaagcaaattcatgatgtgtgtgctggagatctggcactcatggccagtgctttccagtatcttgaactcttcgggggtcctgttgacccatttcgtgacctacctccgtgactgctctttttcctctgtctcttaagtgtgatggttttccagagtccaatcctcaggactttcccgtccacacacaggcctggtagtcaggtggctctaaaccattaggtgggttgtagacctctctcaagctgccacctccttgctgtcgccagatcgtatttcagtctgtcaggggttatctgtatctggaggttccactgttgcttcagtctcagttacttagaatggaacccagagtcctgcccctttccacctacatgctcttacttgaaagcacctgagacttattgggtccctgattcctgcttcgtctgtatccgcagagtagttgcatgtcatttggcctgttttctaaataatcccacatcatgtcctccctgcacttacattgccactgctctgatttgggcttttttttttttgggacaatgcctctgtcccaattctgagtaacagctctggttcttgccactaccagagttctctagcaaatctgagcatctgacagggtgaaaaattctgaatggcttcctgatgcctgactttatgggatcaaattcaagttgcacgctggcactcagtgcccttctggtatcatctgccaagaccagggcctgcttcaccacagccacaataaagtcctttcaagccct

SEQ ID NO: 101155 - DNA, 208 bp, Homo sapiens
ggtcatgtcctgtgtgggtgtggtgttggggtggggacagtggaagaacttgctgctgtgtgttgcttcagctctttctcagtgccagtgagcccggccctatccattttccatccaccatgaactccccaaaccgttattccttggacatcagtatctagagggacaagaagaagaaggtggccaagacccagggataactgtggtg

SEQ ID NO: 101156 - DNA, 302 bp, Homo sapiens
atctgcccaccttggcctcccaaagtgctgggattacaggcgtgagccactgtgtccggtccatacttctttttttttaaaggtttgatcctgtttggattctatcagtagtgaaggcccgggattctgaaatgaaaatgtatgcagtgtttataaactctcattccttggtgttcatgagatctgtggtcagcccaatcagcctgcttagatggaatagtttgtgaagggcagagcagggtgagactgaatttcagatttagcatagattgctagaaaacagaggaatttctttggtaagt

SEQ ID NO: 101157 - DNA, 394 bp, Homo sapiens
caaggactctcttcctgacttgcagatggctgccttctccctgtgtgtttacatggcagtgagcggggagggatgggggaagaggaggttgagggaggaggaggagagaacgagaaggagagagagccctctgcttcttatgaggccactaatcctatcgaattaaggcctcacctttatgaccgcatttgaccttaattacctcccaaaagcactgtctccacatacagtcacattgagggttagggattcaacatatgaatttggagaatggtaaacacaattcaactcatgccaaccactgatctagcaggagaagattggatatatagtgtgatgtgatgtgtttaagtccaggtgtgattatagcaacagaacgagtgcaggcaaaatc

SEQ ID NO: 101158 - DNA, 357 bp, Homo sapiens
aaaggcctcctcagtctgcagttccagctccaggtaagtgcaccttctctgggtctgtctgcctgtctgcttgttagtgtgaccaaagggaaccttctgcatcattacgccatctctggcttgtttaacactggccctgggtccctatgagatcttaacagaccctagctccagtccccttcccataacccacctgggctgtgcctgaccacagaatcaaggagacgctggcctgcgagggagctgtagagcagggagcaggaagctgtgtgtgtccagccctgacctgtcctgttctgcccccagcccctcacagtgcttttcaagccatgcttcctgtgcccccagtggggccct

SEQ ID NO: 101159 - DNA, 424 bp, Homo sapiens
gagaaagacaaaaagaacaatttagaaaaatggtggaaaatctatctttcccaacaaattgactttgtgcttcctaatctatgttaacagtatcactgacacccaattatgcagaataaagacaatgttccttatctttggctccatcttcctccaatttctgttaagtcccccagaaatatctctcagctgtcctttacctttacactggtattgccattgctccaggtgaactcttgcaattgattcctaaccagtcttcctttccatgacctcctcctctcttaggccattattcacaaagccaacagtgatctttctgaagcacagactgaattgcatgactctaacctgctcaagaatcagtattaggctttctaatgcccacaaagtaaagttcaaattctttagcatggcattcaaa

SEQ ID NO: 101160 - DNA, 321 bp, Homo sapiens
agaacttttaacatagtagcctaaaactgcttttaagaagaaaatgaggctgggtgcggtggctcatgcctgtaatcctagcactttgggaggccaaggtgggcggatcacaaggtcaggaaatcgagaccatcctggctaacagtgaaactccgtctctactaaaaatagaaaaattagccaggcatggtggcgggcacctgtagtcccagctacctaggaggctgaggcaggagaatggcatgaacccaggaggcggagcttgcagtgtgctgagatcgcgccaccactccagcctgggcaacagagcgagactgtctc

SEQ ID NO: 101161 - DNA, 397 bp, Homo sapiens
gatgaagtcagaagctgaggaaacactagcaggaagtagtgggtgagagccaggagaaaagttggcagatgtggcagtgcatgggcctgggcttcctgggaaagggatcttattcacctgccaggcaagtgccttgacctgggtgtgcctggaaaacaaaattaattgaatgaatacaaaggtgctttgtaaactccatcaaattatttgttatgctaatgtcatcattactagtttctctaataaccaatcacacaattaggaagcactaactgaactttcaccttgtcacacaatccacagctggatttgccccaaggactctctttctggagtgtgtaagcagattcaattggtacccagccctctttctgatgcagaaatctagccgtgtcca

SEQ ID NO: 101162 - DNA, 343 bp, Homo sapiens
tttccccctaaactggaccaaagccttgtttgcagaacaaatggtcaattacatctacattcaaaaataaaattcaaatgtgctcatgttttcaatttaagtatgtctgttgtttgctgtttattcctttggtataaatagaagctttctggcttatttgaacgcagaacacatagtacactgtttagatacaattattcattataaattaaatcaatgcttttcctttttagaataccatgccctaactagaatctctacaacattataaaaacataaaatatgactaacgatttaatttaaggccctaattcccaatgaaagataaataatgctgctgtag

SEQ ID NO: 101163 - DNA, 184 bp, Homo sapiens
tgttcccaataaacattcactctagttatgagtaagtaatacaaattccacagaaactgtcaagtcctaagtatgatgtacaagggattatttttaaaaatccacactaaagaaactatccatccgtaggtttaaaaggtgacagaatgaaaataaggctacaaatacacacatgtaatgctaa

SEQ ID NO: 101164 - DNA, 102 bp, Homo sapiens
attagtgtttgggccaaattgcctctgcacatcctgcatatcctgggctgagtatggtgtccactctccaatgtgaaacttctgacaatggtaaaggtgaag

SEQ ID NO: 101165 - DNA, 454 bp, Homo sapiens
  misc_feature (364)..(364): n is a, c, g, or t
tgaagtaataatgactgagaactttcaaaaatgaatgacagacagcaaaccacatccaggaagctcagagaatgccaaccataataaatcccaaaaaatatacctaggcatgtcatattcaaactgcagaaaatcacaaagagaaaaatcttaaaagaagccagagaataaaaacaccttacctgtagaggaatgagaatatgaattacatctgacttttaatcagaaaccatgcaagagactagagtgaaatatgtaaagtgctgaaagacaaaaatcaccaacctggtattctatatagaaagaaattattcgtgaatgtttctcggccgtttttagctattttgcaaagaaactaaggtgncttaggatttaggaaccatttaggactttggcagacaattggttcttgggacacacattttcactaaagccccactggtttatgtgtaaa

SEQ ID NO: 101166 - DNA, 361 bp, Homo sapiens
tattattggttgaagacatataaataaatgattaatgttgggagaatacattgatcaagttaatcacaagtgaaaagagacaaaattttctccttaacattttcagataccactcaagctaattttgaaaagttctcagaaaatatgcataaggtttgtatgtctgagcaatgtaatcaagatttaatcaataaaaataagcttagactcagatcatttttcatgtttctttgatgtatcttttccaattaaaagacaactaacttataatgtgtaccactaatacagaaagacagagtgaacaatatttcattttctttgtctcagtgcttttggtttatttgaaacaaatatatctatc

SEQ ID NO: 101167 - DNA, 508 bp, Homo sapiens
  misc_feature (500)..(501): n is a, c, g, or t
gcggccgcggggccgaggagcctgggccgggccgggcggggactactccggagtcaggaggcagcagcggcggaggacgaggatctctggcagtcagcgccgctcggacgccgccggcaccatgggctgctgcaccggacgctgctcgctcatctgcctctgcgcgctgcagttggtctcagcattagagaggcagatctttgacttccttggtttccagtgggcgcctattcttggaaattttctacacataatagttgtcatattgggtttgtttgggaccattcagtacagacctcgatacataatggtgtatacagtgtggactgccctctgggtcacctggaatgtgttcattatctgcttttatttggaagtaggtggactctcaaaggacaccgatctaatgacattcaatatctctgtacatcggtcatggtggagagaacatgggcctggttgtgtcagaagagtgctgccttcctcaagccccatggcanngatggac

SEQ ID NO: 101168 - DNA, 427 bp, Homo sapiens
  misc_feature (419)..(420): n is a, c, g, or t
gcggccgcggggccgaggagcctgggccgggccgggcggggactactccggagtcaggaggcagcagcggcggaggacgaggatctctggcagtcagcgccgctcggacgccgccggcaccatgggctgctgcaccggacgctgctcgctcatctgcctctgcgcgctgcagttggtctcagcattagagaggcagatctttgacttccttggtttccagtgggcgcctattcttggaaattttctacacataatagttgtcatattgggtttgtttgggaccattcagtacagacctcgatacataatggtggacaccgatctaatgacattcaatatctctgtacatcggtcatggtggagagaacatgggcctggttgtgtcagaagagtgctgccttcctcaagccccatggcanngatggac

SEQ ID NO: 101169 - DNA, 493 bp, Homo sapiens
gcggccgcggggccgaggagcctgggccgggccgggcggggactactccggagtcaggaggcagcagcggcggaggacgaggatctctggcagtcagcgccgctcggacgccgccggcaccatgggctgctgcaccggacgctgctcgctcatctgcctctgcgcgctgcagttggtctcagcattagagaggcagatctttgacttccttggtttccagtgggcgcctattcttggaaattttctacacataatagttgtcatattgggtttgtttgggaccattcagtacagacctcgatacataatggtgtatacagtgtggactgccctctgggtcacctggaatgtgttcattatctgcttttatttggaagtaggtggactctcaaagaaacaagaagaaagaagaaagaaagaaagaaggccaggggctgtggctaacgcctgtaatcctagcactttgggaggccgaagcaggcagatcacctga

SEQ ID NO: 101170 - DNA, 229 bp, Homo sapiens
tgtggtgccagatcttctccatgtcgtcccagttggtgacgatgccgtgctcgatggggtacttcagggcgacgaggcccagagcaagagaggcatcctcaccttctacaatgagctgcgtgtggctcccgaggagcaccccgtgctgctgaccgaggcccccctgaaccccaaggccaaccgcgagaagatgacccagatcatgtttgagaccttcaacaccccagca

SEQ ID NO: 101171 - DNA, 124 bp, Homo sapiens
aagagagagaatgagaatcaccggaatacgaaacttccctgttggacttcccaacattcttgaatgcaccaagatagcctcttgctgtgagattaataaatgaataaatgcctccatatttttc

SEQ ID NO: 101172 - DNA, 478 bp, Homo sapiens
aggagacagatgcaggcagggagcgggaggagggaatgggaatgagctgagcagcagcatcacagctggagggctggacatggatgaccagctcctcacttccaggtgtttccacatcaagcatcctgcagacagctaacaagttcattctacaaagtacagttctcaccactttatccttcctctgctcggaaacagtcaatggtttcccactgtccacaggggatgcttaacgcatgtgggttatgcagctagaaagacaaggcacaacctctttggtctctgcctcttttcatggcacagacaccaaaagccatctaatggatgaccagacaacatggagaaaagagctctcctagaaagccaaggcccagaagagtgaggagaaggcctgtgtccggcagggtctactgattctaagcctacgacatactgagaagaaaatcaactctctatcaaggaatgtgatagatgtggg

SEQ ID NO: 101173 - DNA, 623 bp, Homo sapiens
atgacaaaataataatattcttaaagagctagagaattaagagaggttagcgtgccctttcgctgaatttcctcagttgcgatatttttctttcatactgttttccaccataacaatatcccctgaggctagactcatatacttttagaataaaaggaaatttcattatcaagtggaacgaatgattcaatgctcaaatgtcctctcaaacacttgcaccaaatattcagttccctctgtgcttgaaagataaagatttattacctcccaaagctgctacttttccggtttgaactatactgattattagacaatgcttactgtgagttgaaatctgttttctggtagcttctccttcatcttagctatacctctttttttgttgttgttttttaattaagttttagggtacatgtgcgcaacgtgcaggttagttacatatgtatacatgtgccatgttggtgtgctacacccatcaacttgtcatttaacattaggtatatgtcctaatgctatcccttcccccttcccccaccccacaacaggaccagtgtgtgatgttccccttcctgtgtccatgtgttctcattgttcaattcccacctatgagtgagaacatgcgg

SEQ ID NO: 101174 - DNA, 621 bp, Homo sapiens
aacagaagttaggaggtctgcgtctgggtctcggctcaccctgggggccgcggccatggggcttagttcctagcctaggaagggaaactgagactctgggaggggcaggaacgcccccaaggtcacttggaaagtcgggcaggatgtgctgttagggggaagacccgggcagggtttttgttccccgctgacgacgcctcctttgtgtgttcgcgccgccgccccgccatcgtggggcctgcgagtttgccggggtgcgtgggccgcgtggcggggccttttgtaggtcgggaggatctgagtacgggtgcgggcctgaccgtgggggcgccgaggtcgcagtctaaaacttagtagggcctcgatttccgggcgcgcttccgggccccggctggtggttggtggaacgtgcgactgtgaggcttgcggcccagccctgcaccgctcgggcccttcaccgctctggcgcgcctatagacaggtgtatgaagattctcacgacccgaaacagagttgctagtaaacaccgcttttccgcctttgatccatcgagggaagagggaaaaggatagagcttgggcaagccgttttggtagggatttcagcttttgtctttcactt

SEQ ID NO: 101175 - DNA, 423 bp, Homo sapiens
ccaagtgtcctgtccatggctgcagtcattggccccatctcccactgatgttctctgaagccatgaggaagcagtgggactgcaaacatcccagcgctgtttttagtaatctaatgtttgcctgtactcatttcatctttatctcacctgagctttcgagataataattttatctcagagagagattgaagtccattctctacaaactttgaaacaaaattatattgttaggtttaagaaatatgatatacaataaagaggaagatgatagaattgttttggaggattttgcctaggctactctgttattaatgtggctgatatattaaatcgataagaactgataacaaaagtaatgttcataaaataaacttggctaagcataaaaaatgtaaaagaaattaataaagcaattctgtagaa

SEQ ID NO: 101176 - DNA, 272 bp, Homo sapiens
ccaagtgtcctgtccatggctgcagtcattggccccatctcccactgatgttctctgaagccatgaggaagcagtgggactgcaaacatcccagcgctgtttttagtaatctaatgtttgcctgtactcatttcatctttatctcacctgagctttcgagataataattttatctcagagagagattgaagtccattctctacaaactttgaaacaaaattatattgttaggtttaagaaatatgatatacaataaagaggaagatgataga

SEQ ID NO: 101177 - DNA, 316 bp, Homo sapiens
  misc_feature (34)..(34): n is a, c, g, or t
  misc_feature (37)..(37): n is a, c, g, or t
  misc_feature (40)..(40): n is a, c, g, or t
gcggccgcctactactactaaattcgcggccgcntcnacnggcatttgaaaggtttctcctgtttgttttcacacagggctgattctttttcatttctaaatagttccctgaaccatcactcttaaatattaattacatattaagtaaaatacctccctatttttgttattgtatagaaaataccttgacttggctgggtgtggtggctcatgcctgtaatcccagcactttgggaggccaaggcgggtgaatcacttaaggtcaggagtttgagaccagcctggccaacatactgaaaccttatctctactaaaa

SEQ ID NO: 101178 - DNA, 318 bp, Homo sapiens
aattgtggaaaaagaatcaccaaatttatttcctccatgaaaacaatgagaaaactgacaacaatatgataaataactctttgaaaattgtagaaattaagtcttacaacaaccaagagtaacatttatccaagaaagctggctgaataccaataagaacagcaagatttgtgatgttttaacttgccctggttgtatccccatttcttcagctctgagcataacagtcagtattcttgttaaaattcatcagtctagcagccactaaagatgtggttggagctctttaaagcctcatttttaaataagtgccttaaa

SEQ ID NO: 101179 - DNA, 540 bp, Homo sapiens
gcctaaaagccctttaggaaaagaattaaaagacaaacccccagaagaaagttctattgtgctatttactacctggcagggaatagggtcttgtgcccacctcattgaccgtcacttagaccaggtattaagcagaataattctctttgacaaacaacagccttatggaatccatgagaatgttcagggaaccctgacagagataagaattagtttccaagaataggaaaagatggtatggcaaatctttgcctttactttgatctgtggcaggaaactggtttttaagaaaatctgggttgttcctccacctccttttctttgtcttttatatttctgtgggtatgctggtttctagttatacacattaactgaacacctcatcactcaccaactctgcccctgtggctacagtttgtgtatgcctctctcctggagcagaggagatccttggtctgataacacactcagtcttcccaaagtcatggctctaagggaaacaagccacacacgaatccaacaggcttcgacagaggactt

SEQ ID NO: 101180 - DNA, 244 bp, Homo sapiens
cactcttcctccatcctgcctttccacagcagtcagtctggtccaagccaccatcatctgtcacccagactaccatagccatctcctaactggtcctcccacttgccgtctttattctgcacacagcagcctgagttcatacacacacgtgcattcattcatattttgcttaaaactgttcaatggcttcccatggaacttggagtctgatatcttcacaagtgtgtgcatggcccagacaatc

SEQ ID NO: 101181 - DNA, 398 bp, Homo sapiens
tctcatcattcctcaaacctagacctacttaatcagtgtgggctttaccaggattcctaagagagatgtttgaaaaaacattaaagtttgaaaagtattactttaaaacagtgacctattttcaatcttttggtatttgagttttcacttcaagtattaatgccctgatttactttcaagttctttctgtactttggaaaattatttttcttgtaagtatgccattgacaaattcactaacagatacaaattaaaattggtgttgttaaggcagcctatgaacatctctgcagtctataacagatcttactttcaaacgctttgttgagtgtcagtgctccagaaagtggattttatccactctcgggtaacttggagtatagaggttgccacatgaa

SEQ ID NO: 101182 - DNA, 525 bp, Homo sapiens
gctaattttgtatttttagtagagatggggtttctccatgttggtcaggctggcctcgaactctcgacctcaggtgatctgcctgccttggccttccaaagtgctgggattacaggcgtgagccactgggcccggccgagaaggaattttaaagtggagggataacatgaccagatttgaatttctgaaagatcgctctggctgctgatgtaccaagtgctgtggatggggcagaaatagctacacagagatcatcaggagagatggtgagaagtgatagggactggtctgggggagcagtgaaaatgtcgaaaagtggagaggtttcactagaagaggcaaaatctatgggacttggtgataattgaagtggaaagtgagaagaaagagtattggggatgatcttgttattggcatgagcagcttggtggatcatgcgattggtggcagggctagtttggggagatgataatgagttcgttgttggccacactgtgctttagggttatgtgagatgtccacatg

SEQ ID NO: 101183 - DNA, 405 bp, Homo sapiens
aataataaattctcattgaagaaggcagatagaaagtatgcattggtgatacagctaggagtaaactgtgttggcaataattgcaggaataatatcatctgattgaaaagtttttataaggccaggtacaggggctcaacgcctgtaatctcagcactttgaaaggccaagccaggaacatcacttgaactgttgacctcaggtgatccacccgccttggcctcccagagtgctgggattacaggcatgagccaccactcctggcccttatatttttcaaatatgttaaaggtatacataaccctcaacaacattttttgttaaatctctgctctttgctctttcttcccatctgtttcctcacatccagtctgctcttttttctctcttaactaaaaactctgt

SEQ ID NO: 101184 - DNA, 433 bp, Homo sapiens
agctctcttcatcccagcccttccactgagccttctggagcacacattttcattaggaaaaaaccttctatattgtcaacctcagcctccttgaatacccttgatctaacagaaacctgggtgtcccctgaggacagctctttctcagaaggcttttcaaatggtgacctcttagttctctctccacaagccacgtaccatggagatgactcttcattactgcttccaagtcatttctcctcaaacatcccagctaccttgaaatagcccatcagactactccatccatcaacgtttcttgctcgagtcatctgcagacatcaccatcactcctgctcattttctgataatctgagcacctagctcactgtctttccctccacactactcccgtgctcattttgtaaatttctacgtccctgcagacaaggca

SEQ ID NO: 101185 - DNA, 711 bp, Homo sapiens
tgagacagagtctccctctgtcattcaagctggagtgcagcggcgtgataatagctcactgaggccttggacttctgggctcaagcgatcctcccaccatagcctcctgagtagctgggaacacaggcatgccaccacactcagttaatttttattgttttgctgagatggggtcttgctatgctgcccaggctggtctcgaattcctggcctcaagcagtcctcctgcttcagcctcccaaagtactgggaatacaggtgtgagccaacatgctcagacaatgcaaacattcttaacgtaattttagcaaattgaatctaacaaaatagaaaaatgataattcaccatgaccaagtgaggtttattctaggaatgcaagattggtttaatattcaaaaattaatgaatataatcaactatagcagactaaaaaagaaaaacattgatcatctcaatagatgcagtaaaagaatttaacaaaatccaacaccttttcatgattaacaatactcaataaactatgattacaatggaacttcctcaacctgataaagggcatctagggaaaacctaacatcataatgaaaggtgagactggatgctatctccctaagagcaggaataacaataggatgactaatcctaccacttctattcaactttgtactgaaggttttagtcagtgcaataaggctggagaaggagcagga

SEQ ID NO: 101186 - DNA, 498 bp, Homo sapiens
aacaggtgctactttccatttagacttgtctgtaaaattagcctgtgaatactggcttgcctctgcaatcacttgcctaggtggggaggtgctgaaggagacaggtgtgtatacattcctttctttaaagaaggcttgttttcagttgaaaatgtggaaattaagactttcttgccttcaagaattatgatgttgtgggagtaaaaaaaaatcctaagggttaagggccagttctgccactttgttaagtgtcttcaactaagtcacttaactttctgaacctcagtctcctcacttgtaaaatggcaccataaatttttgccccacttatttcacaaggttgttgtgctgatccaagaaagaactcagatcttctggtttcatgcccatggtgtccatttcatccatctatcagtttttcatttctttattcattcatgcaacatgtattatatctcccaagggttagctaagtgaaaaatgtatgcatgttgggag

SEQ ID NO: 101187 - DNA, 666 bp, Homo sapiens
cgatctttcaactgcggttgaagacgagatcgctggaaggggagaacacacctactgcatgcgctttgttcccgctgagatgggcacaatgctgatgcattagtgtggttctccccttgcgctctttcaactgcggttccccaccttgaccacaaaacacagaaaattatttgaccatttttttgaattctcctaaatttagtacataactggtactattctagaatgcagaggagagaagttaattatttacattcactggatgccttaataaggcaaggttcttcaaagctggcccaaggatagtttttacaattttttatggttaaaaaatcaaaagacttatatatctagatgtgagtatgaaacgtatgttttattgtccataaagtttttattggaacacagccgtgcccattcatgtatgtattctctatggctgctttcccactacaactgcagagctgggtaatcgagacagagaaatgcagggctgaaactatttactatcttgccctttccagaaaaagcttgctggccactgcctcagaaccttaggttgtaagtctcacagaactggttgagaaaggatttgactctaaggaaaattactatttgaatttatttgatggtttattgagaaaatttgtttcatttccaacataa

SEQ ID NO: 101188 - DNA, 206 bp, Homo sapiens
aagtcagctccgtcctctggatggtcctcagctccctgtggaagagggagcagcctcttagagcctctggttgcagcggacagcatctgaggcactgagcagacacctgtccccatatcaagccattttcttgacatcctcctcgcccgctgtggagacggcatgtgtccaaggctgaggtgccccatcactcaggacaggtgggc

SEQ ID NO: 101189 - DNA, 605 bp, Homo sapiens
cacaacatcaggggcggcagtggcggcagcggcggcggcggcagcagcggcctcccctaccaggatccccacagtcaccattctgtccccagggggcaggcgagggggccgcggcagcgatggcagcggcggcagctggactaaacaggtcacctgcaggtattttatgcatggggtttataaggaaggagataactgttgcaagttgcatgacctctctgacagtccgtataatgtagtgtacaagagtttgcagccagggtactgtatttatggagactgctgcagatatgaacatagcaagccattgaaacagaaagaagcaactgctacagagctaactacaaagtcatcccttgctgcttcctcaagtctctcatggatagtcggaccacttgttgaaatgaatacgggtgaagctgagtcaagaaattcaaactttgtaactgtaggagcaggttcagagggctgggtgaatgctgttgagtttgttcctgggcaaccctactgtggccgcactgcgccttcctgcactgaagcacccctgcagggctcagtgaccaaggaagaatcagagaaagagcaaactgccgtggaaacaaaga

SEQ ID NO: 101190 - DNA, 247 bp, Homo sapiens
accccggccccgcccccgcgcgccgtccgtgaggtccccaccggccgccgtagccggaactgctgctgagggcggcgggccggcttcgctagggatgacagtgaagttgggcgacggcggcagcggggaggacgggctcaagaagctgggcaagcgggcggccgatgaggagtccctggaaggagaaggggccggcggcgcagacgcggccgaggagagcagcggcacaaagagggacgagaagacc

SEQ ID NO: 101191 - DNA, 425 bp, Homo sapiens
tgagacggggttttactctgtgtcatccaggctggagtgcagtcgttcaatccctgctcactgcagccttgacctcctgggctcaaacaatcctcccacctcagcctcccaagttgctgggattttaggcacacactaccatgcccagctaattttgtattttttgtagaaatggggattcgccatgttgtccaagctggtcgcaaactcctagactcaagcaatccacctgcctcagcctcctaaagtgctaggattacaggtattacccctggggaaagaatcttttaggttaccttgcaatgggaaggatagaggccggttcagttatctgactacactcatccagcacaactacaggaaatttaagatcattcatgcatgggaatgggcaggctgcacaggtaactccaactactcgaacc

SEQ ID NO: 101192 - DNA, 122 bp, Homo sapiens
tcccaggctcaagccattctcctgcctcagcctccagagtagctgggattacaggcacgcaccactaccaatcagccctttaatgcacctcactcttaaataggaacaaagattctcacact

SEQ ID NO: 101193 - DNA, 362 bp, Homo sapiens
tgggtcagcctggggtaaccaggactccaatagcagctgctgttccagatatgactacatgatcactgggtcatgtaggaattcatatgctgttgggatgtttggattttatccacagttgctggggggccagatcttttttattacaaggcatttcatttacttgttgaggtacttatttatacctgccttattccagaaaggattgtgttaagagtccacctgttaagtacagtgactagtacatagtatttgcttaggaaatatttgttgtatgaatgttgctcaataagccttccatattctttgtttttaaattggatatacaaaagtgttaattatggtgttgtccataatactaa

SEQ ID NO: 101194 - DNA, 361 bp, Homo sapiens
aaaatatatactgtttgttttgtggcctatcatatgttgtatcctggagaatgttccatttgcacttgagaaaaaaatgtatactctactgttgttgggtggatgttctatacattctgttaggtccagttggcctagagcattgttcaaactctattgtctcattgttctattcattataaaaatgtagtattgaagtctccagccattattttagaagtatctgtttcttccttcagttctataaatgtttgcttcatatattttggaactctggtatttgatgcttatatgcttataatcattatatcttcctgatgaattgacccttttattaatgtccttccaggctggagtgcag

SEQ ID NO: 101195 - DNA, 692 bp, Homo sapiens
gaggcctattttattcgatgattccattcgaatccattcgatgatgagtccatccatttcaatttcatgataattccattcgtttcaattcgatggtgtttccattcgattcattcgatgttgattccattagcttccgttggatgatgattccattcgggtccattcgatgatgatcacactggatttcattccataattctattcgattccattcggtgatgaccagggacccaacacttttctacccagtatttccctgcttcctgtctgtatcaggtgaacaaaagattataaggtgcaaattattgtcaatatttaagatgaggaaattttatgcttgaaagccagtatctctcaattattttggtagaaaacaacaacagaaaatcaagaaaagagcctgagttcttgcatgttaagagtcatttgatattaatataagccacccacccactatggatatagtacatgctcagctgttatataaacaataaggttgacagtcaattgttactcatagtaacatttgctgcattgttgttcctttagaaatgctagaaataaagtgaaatatttcctgtaattatgtctatgtacaaagagggaaaacaaagaaaaatagactgaaaattaccttttcatatgttcatgacttatttgacctaataaagtgctttgtctttaaagaa

SEQ ID NO: 101196 - DNA, 502 bp, Homo sapiens
caggtatgaccgtgcccagccttaaattttttattgagacatatatgataatatgtaaataacacaaattttaactctacagtttgatgagtttttacgtatatgtacaccacccagatcaagatatagagcatctccatttataaagttccttcatgctccttcccagccagcaattcttcttactgtcctgctgactcctgttttcaccttcatcaccatcagctcattttgcttgttcttgactcataaacagaatcatatagtaggtggttcgttcaatgtaggcagtctgtttttgctttaatcattacatgagtatacatccatattgtgtgaagcagtagttcttttgcattgctgtgtaatattccattgtataattgtataaatatatgttgtataaatgtaagtatagcacaatttattcttattggacatcttgtttatttctagttgttagctagtataaataaagcttctgtgagtactcttgtgtgta

SEQ ID NO: 101197 - DNA, 314 bp, Homo sapiens
taagagcagagagtgacagctgcttaacagctgtctcaacaatggattgcaacaatttgagagggaaaatctaaatctagactaaatctagactgcactaaaattcggggagtttttagaactggaaagaagggaatcgttttggcaacacatctcacaccaagcaagagtcagaggccaggagacggctggcacacaccaaggtgttaaggagggcaaaaccacacacaattcccttcggatttgatgaaaaagcaaatcggatttaaaagtcctcgatttcaagccagccgagccaaaggatgatctgggaa

SEQ ID NO: 101198 - DNA, 256 bp, Homo sapiens
cctccacttcccccacagagggctacctctggtcaagagcaaaagccagcaggtggcttctctgccctgagctcaagttacctccttagtcaccagacagaaatggacagtgagccctggcgaccggggatggcagatttagattttgagtgctctgcttttaggagaggcccgagtctcatgtgagtgggcgaaaaactccactgctcgtggcaatgagccctggactcagggagcagagttttgtttgggtttt

SEQ ID NO: 101199 - DNA, 112 bp, Homo sapiens
caggagagtgttggttgtaacgcaaaacgcactaacaggaatcatctgtacagagaaattcgaagcatgccttgcttctttctcttgcttttcctccacacctacacagcat

SEQ ID NO: 101200 - DNA, 238 bp, Homo sapiens
aagtatctgaaagatgtcactttacagaaatagtgtgtaccattctgacgttacaatggtggagttggtaggtgtgcccaggtcaagtagtggggctggctgcagctgcccagctggagacaatggggtacgcactagggtgacagcatggaggtggaaagaggaggacagatataggtcatgggaagaaaagaagacaggacctgctaacagactgaagaggagtgacgttcctcat

SEQ ID NO: 101201 - DNA, 354 bp, Homo sapiens
tacatttctctctttgtcccagagaaatcttagacctcagactcctgcctgtggggtgagagtgttttctccacccatccttcgctgtagggatctagagagaagctgccctccaactccccaggagtgatgtttgactgtcggaggcatcccctggtgtagcgctgtcccagggtgtgtgccctgctggcaatgtgtccccagggaaggaagaattggattgatgcttctccatccaagactgagccttgtcgacaacaggcaagtcagctgcagggttgcatggaggcgctgaaaagggaaggtgtgcaagagacccctgggttgcactgagccccaggacaccccagaggg

SEQ ID NO: 101202 - DNA, 539 bp, Homo sapiens
aaataaggcaccactgtccatggtgcagacagcttgttgacttgtacaagtccttttaatctaggaatgcagttttatactttttacatgtataaatgcatgtgtgcatgtgtatgtaaattcgacatatgtactgatctccacttggctaagagatcacccatgtgtttatgactatctctttgctctattttgaatgccatgttaatgcagcagtacagtgctgaggttacgtgcatgggctctggagccagactgcctaggcagaaaccctgtctccatccctcacttgcagagtaacctggcgtgagtaatataactatttcctccctgagtctcctccccctataaagccatcataacaattatacctgtctcatagggaagttgtgaggattaaatcagttaattcacggtaattcacttagaacatggcctgcctggtacatagtaagtgctgtgtaactgttatctcttattatcacagcaagaatgtctccattggaaaaatccttcaagtgtccctgatcctgcttgag

SEQ ID NO: 101203 - DNA, 538 bp, Homo sapiens
  misc_feature (529)..(534): n is a, c, g, or t
  misc_feature (536)..(538): n is a, c, g, or t
gtgtgtttttgcaactatgaagtgaatggtttcctggggaaaattgtgactttgtataactatttttgaaaccagaataaattatatttcacttgcatattcttaaattattaaaattttcagaagtcagtgatacagaaatactattttgcaatgttaatctgtttgagtctttggagaaagtggtttcattgtaggtacatgatgcactcttaatattttaaacaaatagttcactcttccatttaagggatatcagttccttgtataaaatgactggatatgtataaagcaattatgttgtcatgtgcctttaaccagctttagtaattactataatctcatatttatgatagttttgttaggtgacaggaccaaatgaaaatattttatgttttcccatcactttagattttatcattgtgtaaattactgggtttttagcattttctaatgtgaagttttaatcatttttaagtatacatattttttttctgtaccatttaaataaaatatttttataactttnnnnnnannn

SEQ ID NO: 101204 - DNA, 314 bp, Homo sapiens
tcatctgtaagataagtaatttaatacctgcacccccatcacatcgggatttttctggggatcaaatgcgttagataaattaaacttgaaagctttctttacaaattatttgaatgtagggcatttagtaattctcactactgttggcaacagggagaaattggcaagtttctagtggctggctggctagggtttgcatatcagaatccaactttcatattttatatcgttttcatattttccatctctttaatgcactaaagggtaatctcattgaacttatctctcgtcccctctgtttttctcctcgtatg

SEQ ID NO: 101205 - DNA, 268 bp, Homo sapiens
ataaattaaataaaataaaaaaactcttaagatttgagttttaccaatgaattcttcttaacaaaacaaaactttttatctaggttaaatgtagtaactcactaagtgattcctgagtatagatagatatttaatatgtagtggttaaacagcccatttctctgtatgtaggcttatgtcagcttattgcagcttaatgaataaaggacagtgattggagacatgcattaaatgtgtagctcttagagtgcaattctgtcttgggttt

SEQ ID NO: 101206 - DNA, 350 bp, Homo sapiens
aaaatttatatataaataaatacataaacaaactcaagtgtccaacagggctagataaggagcttacaaaaatgaagccagttgtgatgtgattcaatagggaataggtggggccttggcaaaccaaagaacatattctatctaaagtggatggccacaacttgctccagctgtggaaacttgggccatgtactgctagatctaaggattttcttttgagagatgctagatatatacattttttaaaaataaaattatcctgattttaacaacattgccttattatataaaacataccttggagggtgtgggtaagacacaatgtccttgaaattatatttcactgggtt

SEQ ID NO: 101207 - DNA, 424 bp, Homo sapiens
tttgagacggagtctcacgcccagcctggagtgcagtggcaccatctcggctcactgcaagccccacctcccgggttcacactattctcctgcctcagcctcccgagtagctgagactacaggcgcccaccaccatgcctggctaattttttgtatttttagtagagacagggtttcaccatgttagccaagatggtctcgatctcctgacctcatgatctgcctgcctcggcctcccaaagtgctgggattacaggcatgagccaccacacctggcccattttttaaaaatatatatacttctattaaatgccaagaatgatggatccaaaccaacaccaaagataaatgcacgttatcctgttcctggaggaaatcggctacacacattgtttacttcaaaccccagcacttgattcagttc

SEQ ID NO: 101208 - DNA, 305 bp, Homo sapiens
aggctggagtgcagtggcgcaatctgggctcactgcaagctccaccttccgggttcacgccattctcctgcctcagcctcccaagtagctgggactacagatgcccgccaccatgcccggctaattttttgtacttctagtagagacaggttttcaccatgttagccaggatggtctcgatctgacctcgtgatccgcctggctcggcctcccaaaatattgggattaaaggcgtgagccacctcacccgaccttcttatagtatatgttaaagaacccttggaataaaaaggaaatcataaaga

SEQ ID NO: 101209 - DNA, 586 bp, Homo sapiens
gcgagactccgtctcagaaaaaaaaacactactagcacatttttaaattacttgtagtgatctcatttgtaacacattacatttcaatcgtatactgcttttctaaagagtcactgctaagccctgaaattaactccaaatacctccctgggatacagtgccaaggaaggggcttccttgaacttcaacctctaaaagtaagcaagaattgagaaatatcttctgctttgaaaaatattcactccccaacgctaatacatcaattacatattatttgggggctaactaagctcctattttaaaatgtaaactgaagaaatcaggccagagtcattcccatcttagtgccaatcatataatcagataattagattgctctttccctaaagcctgtttagtttttttgtttgctggttttgttgttgttgggttttttaatttgtttttgttgttgttgttgttgttgttgttttgagatggatactcactgtgtcacccaggctagagtgcagcggcatgatctctgctcagtgcaacctccaactcctgggttcaagcgattctcctgcctcagcctcctgagtag

SEQ ID NO: 101210 - DNA, 421 bp, Homo sapiens
tgtatatggaggaaatcttgggtggcacgagccctgttttttgaagtcataattaaaagggctctgattcaagtgtctaggatgtttcctttattgttttatagatgaatgtggaaaaaaaattgacctttgttttggttttttgagacagagtctcgctctgtcacccagactgatgtatagtggcaagatcatagctcactgcagcctctacctctgggctcaagccatcctcccacctcagcctcccaagtagctgggaccataggcacatgccaccacgtccagcttatttatttatttatttatgagacagtcttgctctgttgcccaggctgtggcatgatctcggctcaatgcaatctccgcctctcgggttcaagtgattctcctgcctcagcctccaaagtagctgggacta

SEQ ID NO: 101211 - DNA, 136 bp, Homo sapiens
gaggctggaaaagcgggtctgtgccagaccataaaatgccttaaatttcatgccaaggatctgaagttttgcacttgctattggggattttgaaggattttaatcaagagaatactatgtttagcatttacctatt

SEQ ID NO: 101212 - DNA, 585 bp, Homo sapiens
attcgggtgggagtgaccaggtgccgtccatcacccctttctttgattaggacagggaactccctgaccccttgcgcttcccaagtgaggcaatgcctcgccctgcttcgggtcgtgcacggtgcgcgcacccactgacctgcacccactgtctggcactccctagtgagatgaacccggtacctcagatggaaatgcagaaatcacccgtcttctgcgtcgctcaggctcgaaagcactgtattttatggcgaaatgttgaaagctatgcttgaaatggaaataggtgcagtggatgagatactgtttgataacatgagaagaccaacaagatcagaacagaaaccctcaggctacaaatacatggaaatagcaaatagtgccaccacgcccagctaatttattttgtatttttcggggtctcaccatcttggccaggctggtcttgaactccttaccttgtgaaacacccaccttggcctcccaaactgctgggaatacaggcatgagccaccacaccgggccaatacatagttttttataaagagatattcgcctgtgaaagaaattgaatccatggttgtc

SEQ ID NO: 101213 - DNA, 106 bp, Homo sapiens
aggatccttttccggaggtgcactggctaagtgaagctacaccactctaaagggtgcagtgggcagcagcgccaggtcttaaaagactcggttggcttcaggtcag

SEQ ID NO: 101214 - DNA, 193 bp, Homo sapiens
agagagaaccagtggatagaatacagagcgagatcagatccccaggcacttcagataataaatgtattacataaagactataagtaggtttaaaaatgattcaaagcataaaattaggaattgaaaacataataaattatgacaatatataaggtaccatgaaaaaataaaatagagattttaaaaagaaaca

SEQ ID NO: 101215 - DNA, 298 bp, Homo sapiens
gggagaaggtggcaggcaagccaggggaggtaaaaggttggtatcggcggccaaagcaggactgaagatgtgtttgctgatgtgagcagagcaactgtcttatgcaccaacaggggtgtcttcataagagtcactggtgtgtgagaagcaagcactgggtatttcacatcaatcatctttaactctcataacagctctaaccagttaaatactagtatccccattttattttttcattttatttttgagacaggtctcactctgtcacccagactagagtgcagtggtgcaatcctag

SEQ ID NO: 101216 - DNA, 721 bp, Homo sapiens
gttattcgtccgttgataggctgccttcaccctttggccattgcaaataatgctgctataaacatgggtgtacaaatatcagaaaccctgctttcagttctttcagctatatacctagaagtgtaagtctatatcatagtaattctatttttaatatggggggacctccatactgtttttcatagcagctgcaccattttacattcccaccaatagtgcacaagagttctgatttttccacatcctcaccaacactcattttttttaaatagtaggtatcccaatgagtgtgcgttcatatcccattggagttttgatttgtacttttagagtctttaaattattactttttccatatcaaagtactttgtgggaagttggttattttacattctcataccatgctttgtattactttcccatttggatgcccttttcatccttcacctcatcctgtaaacccaaaatctaacttaaatcccaaatccaacttccactgtaaagcctttgctgacttctttacttcacattgatttctgaatttctaaaagttcctcattgtctaccacaaaactaagtatttgtttataagaaaaagctttatttagtcctatattattctctgattattccatatgttatcttccaaactagattgttaggtcttcaagagcagaagaaatttattttatacttataaacttcaagatttgctgaagta

SEQ ID NO: 101217 - DNA, 190 bp, Homo sapiens
ctttcctttcctgttcacacagtattcgattatttcaatggctactttcagaggatcagctagaggctgatgtgttgtttcaatggttatattatttatgaactgagagtagaagaaaaatttgagagcaggtttttggaaaaaatgaatttagacaaatatttagtaactgtatgatatataactcccc

SEQ ID NO: 101218 - DNA, 197 bp, Homo sapiens
ttccttataccagaagtatatagctgacaggacaaagggccccagctttgtaagtaatccaggtgaggataatagggacagagacccaggaagagtgggtgtaaacgacatctggttccaccgactgttcactatactcagccaattagtgtgatgaggaagtaacatgctaataaacagttctaacactggaatgg

SEQ ID NO: 101219 - DNA, 334 bp, Homo sapiens
cttctcccgcgacccgatacatatcgggttaacgagtaccaaactggccgcatccgggtttattcaatttggccacggcctgaggatgggagacccaaactctcgaatctgaccttcctttgtaaggtgggtagggcgggaggtgagattcccccatgatcaaagctgtttgcgtcccttcgtcaatcaaacttctggacatcgccaaggaggtcgcatgacctcaggatcttcattcttcagaagcaaaacaagttcatgaatcttgcaggcagcctccagggggcagaatgtgacgttaatcaattactagtgaattggtgaacaccctcta

SEQ ID NO: 101220 - DNA, 338 bp, Homo sapiens
tgagagaagctctcactctgtcacggctcactacagccttaacctctagggctcaggcaattttcccacctgagcccccgcaagtatgtgggaccgcggatgcgtgcaaccacacccagctaattctttaatttgtctatagaaatggggtctcgctttgttgcctagcctgtttataattgttttaaatatttcttttacattgagaaccacatcagacaatgttacctttttgcctcaaccatcaaacataatttagaaaactcgagaaaaggaatgtctccttgcatttttttctcttttttcagtttttcccttttgatgttgcaagattcctt

SEQ ID NO: 101221 - DNA, 815 bp, Homo sapiens
gttttctttatatttatctttcttggggttcactgagcttacaagtttatgttgttcaccattctcagtcagtttttggccattattcatttcttcaaatatttttttctactgccctttctcttctctttctggaactccagatttgtgacactttttgtttttgtttttgttttgtttatagttgcatcaagtccctgaggctctgttcatcttttgatgtatttttttctttctgaagttggctaatttctattgctctctcttcttgttcacatattgtctatcttcaaactgcactaaaccaacccagtggttttttattcagatattataattctctaatctgaaatgtccatttagtctttttatatagtgcatatttctctgctgagatttttaaatcttttccttcctcataagtatgttctcttttatgtccttgaacatagttgtattagctgcttaaattccttgtatgttaatttcaacatctggggtcctcccagggtaagtatccattcaaagtttcttgagcatggctcacacttccctgttatctatttatgtggcatacttttggattgtatcctagatactctgaatgaagcattgtaaagactttagattgtgttatcttcttcctaagagtactgatacttttccgttttaaaaaaattaagtcggcagggcatggtggctcacgcctgtaatcccaacactttgtgaggccgaggtgggtggatcacctgagatcgtgagttcgagaccagccgtctctactaaaaacacaaaattagccgggcatggtggca

SEQ ID NO: 101222 - DNA, 1441 bp, Homo sapiens
atgccatgtggcaaacaaggaaatttgcaagttcccggttccaaggtgttacctggcttgggagaaggttgtaaagaaatgtggcttcgaaaggtaatctacggaggtgaggtctgggggaagtccccagaacctgagttcccctcactcgtgaacctgtgccagagttggaaaattaacaatttgatgtcaactgtccacagtgatgaggctggtatgctgtcctactttctgtttgaagagctgatgcgatgtgacaaagattccatgccagatggaaatctgtcagaggaggaaaaattgtttctctcatattttcctttgcacaagtttgagctagaacagaacatcaaagaacttaacacccttgcggaccaagttgacaccactcacgagttgcttaccaagaccagcctggtggccagctcttccggggctgtttctggggtcatgaacatcctgggtttggccctagcacctgtgacagcaggaggcagtctcatgctctcagcaactgggacagggttgggggcagcagctgccatcaccaacatagtaacaaatgtcttagaaaatagaagcaattcagcagcaagagacaaagccagccgactggggcctctgacaacatcacatgaggctttcggaggaataaattggtctgaaatcgaggctgctggcttttgtgttaataagtgtgtaaaagctatccagggcatcaaggatcttcatgcctaccagatggccaaatccaactctggcttcatggctatggtcaagaattttgtggccaagagacacatccctttctggacggctagaggggtgcagagagcctttgagggcacaactctggccatgaccaatggtgcctgggtgatgggtgctgctggggctggcttcttacttatgaaagacatgagcagcttcctgcagagctggaagcacctggaggatggggcaaggacggagacagcagaggaactgagagcacttgctaagaagctggagcaggagctggaccggctcacccagcaccaccggcacctgccgcagaaggcgagccagacctgttccagctcccggggcagggctgttcgaggatcccgtgtggttaaaccagaagggtctcgctcacctctcccctggcctgttgtggagcaccagcctaggctgggccctggcgtggcactgaggacaccaaagaggacagtctctgccccaaggatgcttggccaccagccagccccaccagcaccagcaagaaaggggagacaggccccgggaagacaccgacaatgagaagagttggtcaccctgtcaccactgaaccttgatttaacagaggcaaaatgcaagtcttccctgaagaatactgggggtagggaaacttctagtggcaatgataaaaccagcagcaatgataatagaaggcaaaaat

SEQ ID NO: 101223 - DNA, 124 bp, Homo sapiens
acagccaactttcccggagcactgttatgtcttttcgggctgagatgactcaagaagaaatgtccctgatccttgtccatctccaggcttgggagaaggttgtaaagaaatgtggcttcgaaag

SEQ ID NO: 101224 - DNA, 368 bp, Homo sapiens
tggatactcacgaaagggagatgaaaagattgacaaaaatacatttaagcacaatcgactttaattcttggattgccatttaacttttcataagtttttcaagatgagtcggtgttttgccttttttgtcttctgatctcccagggattcacaccgggtatggattaatggggatatgatttgttatgagagacagtgagtaagatgggaatgaacacaaactttgaagcaagaaatccgagttccagtagtaaagccaagggagtgtaaaatcttgagttctttacctttctgtgcttcatctgtcaaacttggggcgtcattgccctataggagtgctgtgagagttatataaaagaaaatgaaaa

SEQ ID NO: 101225 - DNA, 367 bp, Homo sapiens
tgcggctggagagaggtgagtgcagccgaggctcggcggaggtgggcggaagggttgggggagtgctgtgtcgctggaggggaggaggagtgacccaggctctgagatccgggccacgctgtcccttgtgccggcgccagaggccgccgttgtctctgtgcctggctctaggaagggcgcttacggtattttgtctgttaaccgtaagccctcctctgttcacacggactgttccaaggcacagcacaactaaacacaacctgcccgcttcgcagacacacgccgcacacgcgctcccttggtgagcacagcagaagcagcattcggagacccgtacacccgaaaagcaaacgtcacacacccggtt

SEQ ID NO: 101226 - DNA, 512 bp, Homo sapiens
gtggggcgatagtgacatcatcccggagtcggtttttaagcggctgccggccgggaaccgggaagagaggaacagtcggaacgcggtggcgagtcgctgagcccgccgcggccccgagagcggctgcagccgccgccgcccagaaggagagggcgaggcgcgcctgagctgccgccgccgccaacggagtctcgggtgagccgggcagccgccgcgggccccggccggggccgggggcgcgggccacaggcccctgctccagccgccgcttgcagactgcgggcgccgatatcgcccgcgccccgctaggctgagcctcgggtcggccgaggagccgtggcagccgccaccgcccgagccgcgggcaagagcctccggaaccgctgccgcggacgcctggccgggccccgacgacgcacgttgcgcccccgggtcacctgatcacacaggacgattcttcaggctcactttcaagtgcttcgtggactgcttctgactgcgccgtctgtgag

SEQ ID NO: 101227 - DNA, 827 bp, Homo sapiens
tagtttgttgcagtgtatttttagattacaaaaaaagcaaagttttatcagtagtctcattaatcagtaaaacatttaaagtagttcgtttaaaagaaattttatttctagaatggaatgatttggatgtgacctgataaatacagtttgttattgtggtctcattaaattaatcagctttttcacactggggtaaagaaacagatgatgatactagggaatggaaacaaaattggaaacctgggttatttggggatttatattgtactctgcacagttgcccttttttttaggcgtgttccctggaaaagagggacggatgaacctggaagtaagtaaaagacattctaggtgtgtagcatcaaggcagttaatatccaagcatcagctttctctttatacatctacactgcatggcctgcaccaaataaggaactgaaccaggggtatgtttttacctccacagctgcctccttccatcagagcaccttgatgaacttaatgtctagtcacacgtcattggcatgttttctccccagcatttaattacaaagctgggaaacaaaagatgatagatacagttttactactgcatacaaacatttcttttttacattcagtattaacttatcaatataggagatgtgcatactatttcctgagctactgaagtttttttactctctctgttgataagttaatgacttttgctatattatatatttatatatatatatatatatatatttggtaagagaacataaaaacctaaaatttagtaacaaggggaaaataaagcatgatttggagatatgtttcaaattttt

SEQ ID NO: 101228 - DNA, 624 bp, Homo sapiens
gatgaagcctggaccttgttatcataacacagtatatttattcatttattccatcctagtatacacatcaagtagttttagaattgctaacccatattttgtgaaaaatacatttaccagaatataatgttggtctatagtgggttttttggtctttagtattacagtatataatcagaatactatttgccaaagttgcttagtttagttattttcttcacgacctgcttcagtgtggttaaattaatagggggaaacatcaattcctaaaactcaaaagcaaaatgaaacaattgaatctagctgtgtatcaagtgaatagcttataactcacagaaaaggattatttcaagggtctgtatttcatatgtttatacatttttatttctatataatttcattttgcaactccagtgtaccctttatccagattcaccagctgtgtttacattttgcctcgactctatcatttttgccctttctcactctctcctttgtgtctctgtccctttctttctctgagtacatgcatagacacacatcactttttgtctgagctatttgagagtaagttgcaggcattgtacccccttgtcccctaaatactttcagtgtgtatttcac

SEQ ID NO: 101229 - DNA, 462 bp, Homo sapiens
tgagacggagtctcgctcgcccaggctggagtgcagtggcgcgatctcggctcactgcaagctccgcctcccgggttcacgccattctcctgcctcagcctcccgagtagctgggactacaggcgcccgccaccacgcccggctaattttttgtatttttagtagaggcagggtttcactgtgttagccaggatggcctcaatctcctgaacctcatgatccgcccgcctctgcctcccaaagtgctgggattacaggcgtgagccactgcgcccggccaagaggtttaatttttaaattttattttttaatagtgtctcttatttggtcctgctgcacctatgttttagttgtctttcaacaactaggaaacatcttctgtgcccatataaatgtgagagaaacaaacatggtgtttgtcctcacatagcttataattgggctgacagcaactgaacatct

SEQ ID NO: 101230 - DNA, 312 bp, Homo sapiens
tgtggtgcagagagacagagagagagaaagagagagggagggttctgggggcagtggcatggacagatttgggtttctgaaagattgcccagctactgggtggagcatggattggaggtgggcaccaggaggctgttagttttgctggcacctagtaaagcagtgttgccctgaagaaaggggctaactggaaaattacttaagacagagacctaacaggacgtggtggttcctggaaggtgactctgacttctggtgtcaccatcttggctggctcctgggatggtaggaataggttgtggggaggatgag

SEQ ID NO: 101231 - DNA, 450 bp, Homo sapiens
atggaggttacaaatttccatttctatgttaacactatacaaatttataataaacttgataaaacctgttacaacccattttgattactcacacgacatattaaatttacaactttaattgtggctactttccatgctactgtatcctatgttctattgtactgtacatcaaaaaccatagctggccagccacagtggctcatgccagtaatcctaacactttgggaggcaaaggtaggagggtcccttgaggccaggagttgagactagcctgggcaacatagtgagacccgtctgtaaaaaaattcaaaaattagccaaacgtggtggtgcatgcctatagtcctaactactcaggaggctcaggtggaaagactgtttgagcccaagagtcaaggctgcagtgggctataatttataattgtacggctgacagagcaagactctgtc

SEQ ID NO: 101232 - DNA, 425 bp, Homo sapiens
ctttcatcctcagttttccactgctttccctaacggaccttgatggtagcctgctatggcagaatcaggaccaaaagggtccccaggtgcacatgtccccattcttttgcatcccagcctggctgctgagatggtgtggcccagaggcatctgggctgtttctatgctcatatcacgtacacagaacagagtagggaggcgtgagatgaatgagatttgagctccaatagttgccaacacaaaacaagccgtgaattactctgagtcactctgaagcaataatacacagctcaaaggactggacacaatgaggcagaatgaagtaacgcagcatctcctgctgccgcttccctgagccaccggctttaaaggcaactttcttcccttggcagaagggtgaggagagtgttgactactgtgacaga

SEQ ID NO: 101233 - DNA, 436 bp, Homo sapiens
tagctgggattacaggcatgtaccaccacacctggctaatttttgtatttttagtagagactgggtttcaccacgttggtcaggctggtctcaaactcctgacgtcaagtgatctgaccaccttggcctcccaaagtgctgggattacaggcgtcagccacgtgcctggctgcaatctgttactgtgaccttgacagggttacaacctttacattctactttataactacagtttctgcagttctggatttaagtggatttaatgtattcatcagcagtcctcttccaatagctttccattcctgagttcttagttggctatattgtatggtcaagaaattttttcaagaaacgtcgcaagtgtttgagaatggagtatatacttgttgtcatcgtggacagtcagcttagctgggcttaaaattcatgggacaca

SEQ ID NO: 101234 - DNA, 332 bp, Homo sapiens
accatgtgaacctgtgattttgtgtcagagtgagcactactaaatctcattttcttccctgtcttctttttcatttccaaatctgcccagaagacagtaaaagctcattaatttgaaccctgctaatttagaatatgtaacatttcctccaagctcaccatgaaggaggaatttgtgaaacaaattaatagtgtgaacataattagaaaagatgagtcttgtagtgttgggaggtacctggaggtgatccagtccttttcattggtggcttgtttcttttcaaatgaggaaatcgaggcccagtgaggttctgtggctcttccacactcaca

SEQ ID NO: 101235 - DNA, 159 bp, Homo sapiens
agagataaggaaaacaacgtgtgtgtgaaccaaacaggactatcgacagagacagcataaaaaggaacaaaacagaaatcctggagcttttaaaaggtacaatgacaaacatgaaaagctcatgctagcagttcaatagcacatctgagcaggcacaag

SEQ ID NO: 101236 - DNA, 484 bp, Homo sapiens
gaaaattctgtctgaccgtgaacaagccactgtaaacaaatccgaaagatatacaccttcaaacagttctcagatgcatgctgtccctgggtggggctgttgaatcccactgtgggagctggaatgtcaatcagaattatcaaggatactatttattggcatgagtgtgttcttgtaagcacttacccttcctatctagttgctcgaaactgccagcaagttttgtttggggcaattaaaatgctatgtgaccccttagaaatttctgtcttgagggtgttcaaatttttaaagatacagaatattttgaggttttggaataaaaagcacttgttaatatataaaagaaactgtgggcatatttcctttcttccatgaaatacgcttagcctgcttatatcctttttaaaccaaggatatgaataaatctgcccaaatattttctttgggatgggaatcattctctaagtagatgatgttttaa

SEQ ID NO: 101237 - DNA, 743 bp, Homo sapiens
atctgtgcttggctgggggtgacccggagctccctcccaccaaccttcccagccgggctccctcgcagcccggagccaagcctgtgcctgccaccatttcctggcagtgtgcttagctgtgacagtttctacgtctgtagaatggggatgaaaacagcacctgctgcccagtgtgggctttcgcggtctcatgaagggtggtggcggcgtgcgctgcatgcctagcagcagcgctgtttttctcattagcacttagctccgtctcctttgccttccattgtcgccgccttcctttggccacaggagcctctgcggccagccttcccgttgcatttccatgttgttccttgttccggggaggcccctttgctgccctgcgccgcgctccgcccctcttcccgtcctgcgatgaggccctggcccccggcatcgccacgcggatccgcgcctctggtttgcagtgggtgggggccgcagtcagactcccgccctgagccccgctttccctcgcgttgcctgcccagccgggctgatgaccgacctcggcggctaaacgccttctccagctgaaacagagtccagagttccactgtttaacaaggaggaattggcaaagcagaactgtcacttggaaaatgctgttttcatgatctctttgagttttcactgtttttaatgcaagctcggaatcaatatttagttttgagtgtggagaatagattgttttttcttttatatatata

SEQ ID NO: 101238 - DNA, 704 bp, Homo sapiens
agtgtgtcccaaaatgggggctgctccctttgacctgtctccaagactgaagagaacagggaccatagctgtacctatcctgcgagggacaaaggaacaagcttttgttaattcaagcgattgagatttgggggtttgttaccacagtgtaatttggcataagctgactggcatacggtggagcatcccagatgagggcaagctcccagggcctaacagagtgagtggctggagtatgtgaaggtgaaattctttgacatgaagtggttaaggtcccacgaggccgtggtgttagatgggtcattcatgtgatgttgttatcatccaggaagctggtaggaggtaggaacccaaagtctgtaatgaacaagggaaagtgtgagcaaagtcagcagatgacagcagtaaaggaggagtaaaggggagtatagatctaaatatatatatgtatatgtgtgtgtgtgtgtgtgtgtatgtgtgtgtatatatatgcagagatttggtatatatatgtgtatatatatatgtgtgtgtatatatatgtgtgtgtgtgtgtatatatatatatgtgtatatatatatatgcagagatttggaagtgtggaagaataggggtctgagtgcagtactggggaggccccataccctatcctgaaagcacatgaggtatgggaaagtgaccaccaagatcctttggagggaaa

SEQ ID NO: 101239 - DNA, 180 bp, Homo sapiens
aagataataaacgtgcgtcgtcttaagcaactgagattgcgggaatctgttagcagcagcaagaggagcggaatgctccacctatcctaagcatgctccagggagaggggcttgattgaagacctggagctgaccagcgtggcgcgtagcaccccatcagccttgccacaagcagggtcc

SEQ ID NO: 101240 - DNA, 388 bp, Homo sapiens
gaaatataccccattttatagctatttggcatattatccagtcatgtctcaatggtgtttagtgtattctgcactactctgaaatttaaccacctggaagaagttatgaataagaaaaaaaattctctgtcaattatttctaaaggtcatagagttaatgactagctggaaggttaattagattctgaaaacctcttcatatcaattaaatctcttatctttatgttttagtaaataaactgaataactatttagagctactgttctagggtaagaaacgttgtaaacagtaaaactacacaatgggtgtttgggttttttcctcacattaaaaaaaaaaatagttatagcaggcatggtggctcacacctgtaatcccagcactttg

SEQ ID NO: 101241 - DNA, 887 bp, Homo sapiens
gatatttagttataacagagactaaagaagaaagacgcttactgaataaggtgggatccaacaagagtgtagtatggaatgcaatagcttatgaattactttttttctgagggagctcaacagaatgacacctaagaaagggaaagtctttgacacttggtacgtttgtgatttttggtcattacttgaaaattaataagtttgaaatcactactcttagaaatggaagaaagtgatgactctaatcagcctatctcagcgtgtaggcaagaaattcgaaagagaagatgacccagcaaaccaatggtaggcaaatcccagcaaactgatgtaatagagaaaaagaaacacatggccataccaaaatcatctagccccaaagctacccatcgtattggtaatacttctggaagcaaaggcagctactctgccaaagcctatgagtctattagagtatcttctgagcttcagcaaacttggacaaagagaaagcatggacaggaaatgactagtaagtctctccagacagacaccattgtagaagagaaaaaagaagtcaagttagttgaggaaaccgtggtacctgaagaaaagtcagctgatgttagagaagctgctattgaattgccagagagtgttcaggatgtagaaattccaccaaacataccttcagttcaactaaaaatggacagatctcagcagaccagccgtacaggatactggaccatgatgaacatcccccctgtagaaaaagtggacaaggaacaacagacatactttagtgaatcagaaatagtggttatttccaggccagatagttcttctacaaagtcaaaggaagatgccctgaaacataaatcgtcgggaaagatttttgctagtgaaca

SEQ ID NO: 101242 - DNA, 347 bp, Homo sapiens
taccgtataaaaggcgaaacagtatacctgtagagagcacttaccatgaatggagcttgcaggagtagaagttgctctggatgagtcagtgagtgagtggggagtgaatgtgaaggtctaagacattactgtacaccactgtagactgccatagccttcacaaatactgaactaaggatatactcagtttataaaaatattattctttcttcaaaaataaattaacctggctgggggtagtggctcacatatggaatcctagcactttgggaggctgaggcgggaggatcgcttgagcccgggagttcaagaccagcctgggcaatatagtgagaccctgtctctac

SEQ ID NO: 101243 - DNA, 139 bp, Homo sapiens
cccccaggccctggtccttggcagattttattgatcaactggagcaaactgcatggtccacgccagggctggcctgcatggaaggagccggagcatgtgcttagacaaccctggatggagcagctggggaaccagggag

SEQ ID NO: 101244 - DNA, 258 bp, Homo sapiens
cctcactgtaaattcagattcatcctttattgagcacctactatgtgccaggcattgggttgagtgctggcgataaagtaatgagcaagcccttatcttgatgaacagttacggaataaaatagacctgcagaaataaacacgcaattcacaactgaggtgagcatggttggtgggggaatggagagcacataataaagggtgtggcatggttgggggcatcagtgaccttctccctgagaaagagacacttgagtga

SEQ ID NO: 101245 - DNA, 180 bp, Homo sapiens
attcaatagggaataggtggggccttggcaacatcaatttgtagtatccctgccaattgatactacaacatcaatttgtagtatccctgccaaaatttaactatggaaaatagttaaattttaatatgcacacatctgtggttgtggttatacagatatatatatatatatatatatata

SEQ ID NO: 101246 - DNA, 333 bp, Homo sapiens
tacatgtctgagttatttgcatattactttcaggaatgcatttcattcacgatttctgggggaagggtgtctgggcttcggagtctcttggctgactaatctcacgaatttctgtgcaggatttcagtcactgcccccctcccttttctcaggcctgggatggtgcctgtctagcctcttggggaggtttttagcttgaaggaattgttatttgctctccaaggagaataccaggtgaaaatggcccattctgtggtggctaatggcctgattgatgagtcatgctcacagaactgctggggcctgggcctggctgctcacacggacttaccc

SEQ ID NO: 101247 - DNA, 497 bp, Homo sapiens
ggtcggaccacatggctacggagctcttgaaataaatgtggccatgtgtggcttttagcttctatattggatagctccactgtagaacattttaaacatcactgcaagttctgttggacagtactgctttagcaagcaggtgaaccttttggctcccacttcggcttttttgaggagttggtaaaatatgaccattaagcataactttggagttatgctgacttcagattctgattctggtttctcaaatcctgcctgacattgaacaaacaacttgccttcagtttcatcatctgtaaaattgagataataatagcccctcacagacttataaaatattatatgagagactgtattagatatatgtggttagtacttcatatggtttggctgtgtcctcacccttctcatcttgaattgtagctcccataattcccacgtgttgtgggaggcacccggtgggagataactgaatcatgggggtggtttcccccata

SEQ ID NO: 101248 - DNA, 362 bp, Homo sapiens
tactgactgccagggcacttgggaatggcaaggaaaccgttaccattactgagtttagtaatggtaatggttctcttgctatacccagaaaacgtgccaggaagagaactcaggaccctgaagcagactactggaagggagactccagctcaaacaaggcaggggtgggggcgtgggattgggggtaggggagggaatagatacattttctctttcctgttgtaaagaaataaagataagccaggcacagtggctcacgcctgtaatcccaccactttcagaggccaaggcaggaggatttcttgagcccaggagtttgagaccagcctagacaacatagtgagactcagtccctaatatta

SEQ ID NO: 101249 - DNA, 241 bp, Homo sapiens
tgagtggagggtgacatgatcagattttgcgtgaaaaacattacattggctgcttggtggagaatggacagggaatgagggttgagaggaagaggcaaggggcaagagttaggagtctctgcctgcggtccatgtgatgtgtggtgatagctggattagggtggtgtctgtgagaaggtgtgaagaaaggaattaagagacctgtccagaggcagaatcacaggctttcaggaagaggagg

SEQ ID NO: 101250 - DNA, 417 bp, Homo sapiens
tctacgaccaaatgacagcttcagacttggagaaaatatttgcaaatcatatatctggtaagtctagtattcagaatatatcaaaagctcaatgataaaaaagacctgattaaaataaataaaccaattaaaaagtgagcaaaggacttgaatagacatttctccaaagaagatatacaaatagcccagaagcacatggaaagatgctaacatcattagtcattagggacaaacaagtcaaaaccgccatgaaataccacttcacacacactaggatggctacaatttttaaaaaattgaaaataacaagtgtttctgaggacatggggaaattagaaccttcctatagtgctggtgggaatgtaaaatggtgcagccactgcagaaaacagttgatggtatttcaaaaagttaaac

SEQ ID NO: 101251 - DNA, 590 bp, Homo sapiens
cacagaaccatacaactttcaatattgtcaaacacaccaagtaatttatcacatcatatatccccaccttcctctttctgttttcttataacatatcctcttataatttcctgaaaaggggtggacagaaggtaaatactttgtgattttgcttctctgaaaatgttagcattctaccttcacatgtgattgatgctttgactagatacacaaatctacaggaaatacttttgcatcagaattttgaaagcattattccactgtcttctagcttccaaccagaaggtgagtctaatacagcttgaatcctgttcctcagtacacatagtagggatttcttgcactcagtaatatctggtttgcctgttctgtttgggcatcagggaggactgcacatcccaactccctagcactgaggaagattcataggactgatgctagccagggccaaagcatttaagagaaagtttaagttttttacaccttatcccaccacaggaactctagaagctgtgtgttgagacagcaacatcataagatagtaaagactccatctgtctagatctctgagtgacaatatggagcagagt

SEQ ID NO: 101252 - DNA, 553 bp, Homo sapiens
tattgctcctttgtgaagtactggaacatgttctgtgttacacagtacccccccttacccatgcttccactttcctaggttttaattacccacagtcaactgtgatctgaaaatattagatgagaaattccagaaataaacaatttgtaagtttcagattgcatactcttctgggtagtaccatgatgaagtctggtcgtcctgctgtgtccagcccgggatgtgagtcattcctttgtccagcatgtccaagctgtgtggcacgtatgggcaggaaaaagcatagcatatacggggttcagcaccatccacggtttctgacgtccacatggtggggggagggggcgcttcttgaaaccctcatggatgagggggactactgtgaaccaaaagcttaatttaaagaggtgaccacagactattattgcactatttcagggatttagttatctttttgaattgtaaacagataatcaagaacaaacattccggaagatgtttcttgtttcctttgctttttattttcttctgatgcttcttggtgtcttttctt

SEQ ID NO: 101253 - DNA, 452 bp, Homo sapiens
aggactgatgggtgggcttccagaaagttcttaaaagtcatcccttcctccacgccccacaaagcctcagttgtccaagtttgtggctctggtttttctctctcatccctccctctgctcttcagtcagcaggatggggaaggagccttcttgagacactgagcataacagtgtcaccctcaggatagtgaagggtggagccgggggtggaagttgcagagcctgggacacctgccttggctgcaacctctgcactgcttttatttatctacttatttttatagagttgaggtctcactatgttgcccaggctggtctcaaactcctaggctcaagtgagctccggccttggcctcccgaagtgctgagattacaggcatgagccaccgcaccacctgcctgtcttactgtgtgagaaaaaaaataaacggtgatgtgattaaaacactaga

SEQ ID NO: 101254 - DNA, 419 bp, Homo sapiens
cggccgcggcggcgctggggaagcggtgaagaggagtggcccggccctggaagaatgcggctctgacaaggggacagaacccagcgcagtctccccacggtttaagcagcactagtgaagcccaggcaacccaaccgtgcctgtctcggaccccgcacccaaaccactggaggtaattagacctgggaaagcagggagggcagggacgtgcacacgaggaagagacaggcacgtgtgtagtcagacagacagacagacacgcatccacccacagaagcacagagacgcatagagagccagagatattgctagagataaagacacagagaataaaggagtgcccccagatttagaatgcaatgaatgtgagagccaaggggtgaggaccagacgggcgactatggaggaggggagcttgt

SEQ ID NO: 101255 - DNA, 2186 bp, Homo sapiens
caagtgtttgtgagtctgtgtgtctgagtttgcaagtgagtgtgtgtctgtgtgccgggcgttgtgtctgattgggcaaggttccaggggtgctcgcttgagtcctgagctgggacaacgccttgactcttcttctttaagacctccaagcctcagggactctgggaatcaaggggtgtttcttcttgttttgtttgaggaggaatgagaagggtcctgatcgatctgcccaccggagcctccgggcttcgacatgctggaggagccccggccgcggcctccgccctcgggcctcgcgggtctcctgttcctggcgttgtgcagtcgggctctaagcaatgagattctgggcctgaagttgcctggcgagccgccgctgacggccaacaccgtgtgcttgacgctgtccggcctgagcaagcggcagctaggcctgtgcctgcgcaaccccgacgtgacggcgtccgcgcttcagggtctgcacatcgcggtccacgagtgtcagcaccagctgcgcgaccagcgctggaactgctccgcgcttgagggcggcggccgcctgccgcaccacagcgccatcctcaagcgcggtttccgagaaagtgctttttccttctccatgctggctgctggggtcatgcacgcagtagccacggcctgcagcctgggcaagctggtgagctgtggctgtggctggaagggcagtggtgagcaggatcggctgagggccaaactgctgcagctgcaggcactgtcccgaggcaagagtttcccccactctctgcccagccctggccctggctcaagccccagccctggcccccaggacacatgggaatggggtggctgtaaccatgacatggactttggagagaagttctctcgggatttcttggattccagggaagctccccgggacatccaggcacgaatgcgaatccacaacaacagggtggggcgccaggtggtaactgaaaacctgaagcggaaatgcaagtgtcatggcacatcaggcagctgccagttcaagacatgctggagggcggccccagagttccgggcagtgggggcggcgttgagggagcggctgggccgggccatcttcattgatacccacaaccgcaattctggagccttccagccccgtctgcgtccccgtcgcctctcaggagagctggtctactttgagaagtctcctgacttctgtgagcgagaccccactatgggctccccagggacaaggggccgggcctgcaacaagaccagccgcctgttggatggctgtggcagcctgtgctgtggccgtgggcacaacgtgctccggcagacacgagttgagcgctgccattgccgcttccactggtgctgctatgtgctgtgtgatgagtgcaaggttacagagtgggtgaatgtgtgtaagtgagggtcagccttaccttggggctggggaagaggactgtgtgagaggggcgccttttcagccctttgctctgatttccttccaaggtcactcttggtccctggaagcttaaagtatctacctggaaacagctttaggggtggtgggggtcaggtggactctgggatgtgtagccttctccccaacaattggagggtcttgaggggaagctgccacccctcttctgctccttagacacctgaatggactaagatgaaatgcactgtattgctcctcccacttctcaactccagagcccctttaaccctgattcatactccttttggctggggagtccctatagtttcaccactcctctcccttgagggataaccccaggcactgtttggagccataagatctgtatctagaaagagatcacccactcctatgtactatccccaaactcctttactgcagcctgggctccctcttgtgggataatgggagacagtggtagagaggtttttcttgggaaagagacagagtgctgaggggcactctcccctgaatcctcagagagttgtctgtccaggcccttagggaagttgtctccttccattcagatgttaatggggaccctccaaaggaaggggttttcccatgactcttggagcctctttttccttcttcagcaggaagggtgggaagggataatttatcatactgagacttgttcttggttcctgtttgaaactaaaataaattaagttactggaaaaaaaaa

SEQ ID NO: 101256 - DNA, 2071 bp, Homo sapiens
cggccgcggcggcgctggggaagcggtgaagaggagtggcccggccctggaagaatgcggctctgacaaggggacagaacccagcgcagtctccccacggtttaagcagcactagtgaagcccaggcaacccaaccgtgcctgtctcggaccccgcacccaaaccactggaggtcctgatcgatctgcccaccggagcctccgggcttcgacatgctggaggagccccggccgcggcctccgccctcgggcctcgcgggtctcctgttcctggcgttgtgcagtcgggctctaagcaatgagattctgggcctgaagttgcctggcgagccgccgctgacggccaacaccgtgtgcttgacgctgtccggcctgagcaagcggcagctaggcctgtgcctgcgcaaccccgacgtgacggcgtccgcgcttcagggtctgcacatcgcggtccacgagtgtcagcaccagctgcgcgaccagcgctggaactgctccgcgcttgagggcggcggccgcctgccgcaccacagcgccatcctcaagcgcggtttccgagaaagtgctttttccttctccatgctggctgctggggtcatgcacgcagtagccacggcctgcagcctgggcaagctggtgagctgtggctgtggctggaagggcagtggtgagcaggatcggctgagggccaaactgctgcagctgcaggcactgtcccgaggcaagagtttcccccactctctgcccagccctggccctggctcaagccccagccctggcccccaggacacatgggaatggggtggctgtaaccatgacatggactttggagagaagttctctcgggatttcttggattccagggaagctccccgggacatccaggcacgaatgcgaatccacaacaacagggtggggcgccaggtggtaactgaaaacctgaagcggaaatgcaagtgtcatggcacatcaggcagctgccagttcaagacatgctggagggcggccccagagttccgggcagtgggggcggcgttgagggagcggctgggccgggccatcttcattgatacccacaaccgcaattctggagccttccagccccgtctgcgtccccgtcgcctctcaggagagctggtctactttgagaagtctcctgacttctgtgagcgagaccccactatgggctccccagggacaaggggccgggcctgcaacaagaccagccgcctgttggatggctgtggcagcctgtgctgtggccgtgggcacaacgtgctccggcagacacgagttgagcgctgccattgccgcttccactggtgctgctatgtgctgtgtgatgagtgcaaggttacagagtgggtgaatgtgtgtaagtgagggtcagccttaccttggggctggggaagaggactgtgtgagaggggcgccttttcagccctttgctctgatttccttccaaggtcactcttggtccctggaagcttaaagtatctacctggaaacagctttaggggtggtgggggtcaggtggactctgggatgtgtagccttctccccaacaattggagggtcttgaggggaagctgccacccctcttctgctccttagacacctgaatggactaagatgaaatgcactgtattgctcctcccacttctcaactccagagcccctttaaccctgattcatactccttttggctggggagtccctatagtttcaccatcctatgtactatccccaaactcctttactgcagcctgggctccctcttgtgggataatgggagacagtggtagagaggtttttcttgggaaagagacagagtgctgaggggcactctcccctgaatcctcagagagttgtctgtccaggcccttagggaagttgtctccttccattcagatgttaatggggaccctccaaaggaaggggttttcccatgactcttggagcctctttttccttcttcagcaggaagggtgggaagggataatttatcatactgagacttgttcttggttcctgtttgaaactaaaataaattaagttactggaaaaaaaaa

SEQ ID NO: 101257 - DNA, 1458 bp, Homo sapiens
acccacgcgtcgcggacgcgtgggtcgacccacgcgtcggtttcccccactctctgcccagccctggccctggctcaagccccagccctggcccccaggacacatgggaatggggtggctgtaaccatgacatggactttggagagaagttctctcgggatttcttggattccagggaagctccccgggacatccaggcacgaatgcgaatccacaacaacagggtggggcgccaggtggtaactgaaaacctgaagcggaaatgcaagtgtcatggcacatcaggcagctgccagttcaagacatgctggagggcggccccagagttccgggcagtgggggcggcgttgagggagcggctgggccgggccatcttcattgatacccacaaccgcaattctggagccttccagccccgtctgcgtccccgtcgcctctcaggagagctggtctactttgagaagtctcctgacttctgtgagcgagaccccactatgggctccccagggacaaggggccgggcctgcaacaagaccagccgcctgttggatggctgtggcagcctgtgctgtggccgtgggcacaacgtgctccggcagacacgagttgagcgctgccattgccgcttccactggtgctgctatgtgctgtgtgatgagtgcaaggttacagagtgggtgaatgtgtgtaagtgagggtcagccttaccttggggctggggaagaggactgtgtgagaggggcgccttttcagccctttgctctgatttccttccaaggtcactcttggtccctggaagcttaaagtatctacctggaaacagctttaggggtggtgggggtcaggtggactctgggatgtgtagccttctccccaacaattggagggtcttgaggggaagctgccacccctcttctgctccttagacacctgaatggactaagatgaaatgcactgtattgctcctcccacttctcaactccagagcccctttaaccctgattcatactccttttggctggggagtccctatagtttcaccactcctctcccttgagggataaccccaggcactgtttggagccataagatctgtatctagaaagagatcacccactcctatgtactatccccaaactcctttactgcagcctgggctccctcttgtgggataatgggagacagtggtagagaggtttttcttgggaaagagacagagtgctgaggggcactctcccctgaatcctcagagagttgtctgtccaggcccttagggaagttgtctccttccattcagatgttaatggggaccctccaaaggaaggggttttcccatgactcttggagcctctttttccttcttcagcaggaagggtgggaagggataatttatcatactgagacttgttcttggttcctgtttgaaactaaaataaattaagttactggaaaaaaaaa

SEQ ID NO: 101258 - DNA, 131 bp, Homo sapiens
cggccgcctgccgcaccacagcgccatcctcaagcgcggtgagcctggctgggcgggtcggcgctgccgcggaggctagggggtgggcggcagggcgaggcgcgcggaggcgggaagggatggtttcgcgg

SEQ ID NO: 101259 - DNA, 2145 bp, Homo sapiens
cggccgcggcggcgctggggaagcggtgaagaggagtggcccggccctggaagaatgcggctctgacaaggggacagaacccagcgcagtctccccacggtttaagcagcactagtgaagcccaggcaacccaaccgtgcctgtctcggaccccgcacccaaaccactggaggtcctgatcgatctgcccaccggagcctccgggcttcgacatgctggaggagccccggccgcggcctccgccctcgggcctcgcgggtctcctgttcctggcgttgtgcagtcgggctctaagcaatgagattctgggcctgaagttgcctggcgagccgccgctgacggccaacaccgtgtgcttgacgctgtccggcctgagcaagcggcagctaggcctgtgcctgcgcaaccccgacgtgacggcgtccgcgcttcagggtctgcacatcgcggtccacgagtgtcagcaccagctgcgcgaccagcgctggaactgctccgcgcttgagggcggcggccgcctgccgcaccacagcgccatcctcaagcgcggtttccgagaaagtgctttttccttctccatgctggctgctggggtcatgcacgcagtagccacggcctgcagcctgggcaagctggtgagctgtggctgtggctggaagggcagtggtgagcaggatcggctgagggccaaactgctgcagctgcaggcactgtcccgaggcaagagtttcccccactctctgcccagccctggccctggctcaagccccagccctggcccccaggacacatgggaatggggtggctgtaaccatgacatggactttggagagaagttctctcgggatttcttggattccagggaagctccccgggacatccaggcacgaatgcgaatccacaacaacagggtggggcgccaggtggtaactgaaaacctgaagcggaaatgcaagtgtcatggcacatcaggcagctgccagttcaagacatgctggagggcggccccagagttccgggcagtgggggcggcgttgagggagcggctgggccgggccatcttcattgatacccacaaccgcaattctggagccttccagccccgtctgcgtccccgtcgcctctcaggagagctggtctactttgagaagtctcctgacttctgtgagcgagaccccactatgggctccccagggacaaggggccgggcctgcaacaagaccagccgcctgttggatggctgtggcagcctgtgctgtggccgtgggcacaacgtgctccggcagacacgagttgagcgctgccattgccgcttccactggtgctgctatgtgctgtgtgatgagtgcaaggttacagagtgggtgaatgtgtgtaagtgagggtcagccttaccttggggctggggaagaggactgtgtgagaggggcgccttttcagccctttgctctgatttccttccaaggtcactcttggtccctggaagcttaaagtatctacctggaaacagctttaggggtggtgggggtcaggtggactctgggatgtgtagccttctccccaacaattggagggtcttgaggggaagctgccacccctcttctgctccttagacacctgaatggactaagatgaaatgcactgtattgctcctcccacttctcaactccagagcccctttaaccctgattcatactccttttggctggggagtccctatagtttcaccactcctctcccttgagggataaccccaggcactgtttggagccataagatctgtatctagaaagagatcacccactcctatgtactatccccaaactcctttactgcagcctgggctccctcttgtgggataatgggagacagtggtagagaggtttttcttgggaaagagacagagtgctgaggggcactctcccctgaatcctcagagagttgtctgtccaggcccttagggaagttgtctccttccattcagatgttaatggggaccctccaaaggaaggggttttcccatgactcttggagcctctttttccttcttcagcaggaagggtgggaagggataatttatcatactgagacttgttcttggttcctgtttgaaactaaaataaattaagttactggaaaaaaaaa

SEQ ID NO: 101260 - DNA, 2056 bp, Homo sapiens
taggagcccgaagaagggcgtcacttggttccccaagcgagccgtcctattcctgaacccgcatcaagtctcccgtcccgcaggtcctgatcgatctgcccaccggagcctccgggcttcgacatgctggaggagccccggccgcggcctccgccctcgggcctcgcgggtctcctgttcctggcgttgtgcagtcgggctctaagcaatgagattctgggcctgaagttgcctggcgagccgccgctgacggccaacaccgtgtgcttgacgctgtccggcctgagcaagcggcagctaggcctgtgcctgcgcaaccccgacgtgacggcgtccgcgcttcagggtctgcacatcgcggtccacgagtgtcagcaccagctgcgcgaccagcgctggaactgctccgcgcttgagggcggcggccgcctgccgcaccacagcgccatcctcaagcgcggtttccgagaaagtgctttttccttctccatgctggctgctggggtcatgcacgcagtagccacggcctgcagcctgggcaagctggtgagctgtggctgtggctggaagggcagtggtgagcaggatcggctgagggccaaactgctgcagctgcaggcactgtcccgaggcaagagtttcccccactctctgcccagccctggccctggctcaagccccagccctggcccccaggacacatgggaatggggtggctgtaaccatgacatggactttggagagaagttctctcgggatttcttggattccagggaagctccccgggacatccaggcacgaatgcgaatccacaacaacagggtggggcgccaggtggtaactgaaaacctgaagcggaaatgcaagtgtcatggcacatcaggcagctgccagttcaagacatgctggagggcggccccagagttccgggcagtgggggcggcgttgagggagcggctgggccgggccatcttcattgatacccacaaccgcaattctggagccttccagccccgtctgcgtccccgtcgcctctcaggagagctggtctactttgagaagtctcctgacttctgtgagcgagaccccactatgggctccccagggacaaggggccgggcctgcaacaagaccagccgcctgttggatggctgtggcagcctgtgctgtggccgtgggcacaacgtgctccggcagacacgagttgagcgctgccattgccgcttccactggtgctgctatgtgctgtgtgatgagtgcaaggttacagagtgggtgaatgtgtgtaagtgagggtcagccttaccttggggctggggaagaggactgtgtgagaggggcgccttttcagccctttgctctgatttccttccaaggtcactcttggtccctggaagcttaaagtatctacctggaaacagctttaggggtggtgggggtcaggtggactctgggatgtgtagccttctccccaacaattggagggtcttgaggggaagctgccacccctcttctgctccttagacacctgaatggactaagatgaaatgcactgtattgctcctcccacttctcaactccagagcccctttaaccctgattcatactccttttggctggggagtccctatagtttcaccactcctctcccttgagggataaccccaggcactgtttggagccataagatctgtatctagaaagagatcacccactcctatgtactatccccaaactcctttactgcagcctgggctccctcttgtgggataatgggagacagtggtagagaggtttttcttgggaaagagacagagtgctgaggggcactctcccctgaatcctcagagagttgtctgtccaggcccttagggaagttgtctccttccattcagatgttaatggggaccctccaaaggaaggggttttcccatgactcttggagcctctttttccttcttcagcaggaagggtgggaagggataatttatcatactgagacttgttcttggttcctgtttgaaactaaaataaattaagttactggaaaaaaaaa

SEQ ID NO: 101261 - DNA, 410 bp, Homo sapiens
atgctggaggagccccggccgcggcctccgccctcgggcctcgcgggtctcctgttcctggcgttgtgcagtcggtgagcagttccccttgtctcccaggccatagaaacaccgacccggggtggggagagttggaggggtctggaccgcagaccccagacgccttcttggttcccagggctctaagcaatgagattctgggcctgaagttgcctggcgagccgccgctgacggccaacaccgtgtgcttgacgctgtccggcctgagcaagcggcagctaggcctgtgcctgcgcaaccccgacgtgacggcgtccgcgcttcagggtctgcacatcgcggtccacgagtgtcagcaccagctgcgcgaccagcgctggaactgctccgcgcttgagggcggcggccgc

SEQ ID NO: 101262 - DNA, 721 bp, Homo sapiens
ccacccacccaaaaggagagcagccaatctggggtcccaagtttaatggaggaagagaatttacccagaatagtttgttcatattcacacagtggttttaaaaacaaaaaaattgattctgctccagaatattctaggtgcattttctgaccttctttttctattgcagattaagaaatggggccaggggagggaaggggggtgtgatttcttttcaggttattttttaatatttatttttaaacaaattccattatttggaggcttctggtgtttagacttcaaatctactaatcttagtccataattcactcatgggacagtccctaaacatttttccagagacagttctgagacagggtttgtttaaaactctgtgacaaggtgagaaaagatctataagtcagagaaacaagactccatcatctctacaaaaaaattttttaaattattaggtgcgcgtggtggcacatgccaatagtgccagctactcaggaggcttgaggtgggaggactgcttgagtccaggagtttaaggctgcagagagctatgattgagccactgccctccagcctgggttacagtgagacactgtctctaaaaaataacaaaatttggggtcaagtgtggtggttcacacctgtaatcccagcaggaggatcgcttgaggccagaagtttgagaccagcctaagcagtatagcaagacccagtctctaca

SEQ ID NO: 101263 - DNA, 335 bp, Homo sapiens
aaaaaaatcgatgccaagtcaaacataaaattatagaaatctaccataggattatataaagagaccaattttatttagattgctagttttaaatttagtctctatctagatttctgagctctgggcagagcccacactgaaaccctggttctccaaagagaaagatatcatgggcctattccgaagagactaggccatgtagtgcttttacagtgcattttgttacaaagacttttctgtaagtctctaaactatgtcctttcttaaacacccaagagcagcccctgtggtaataactattttagtaaaaaaaacaaaaaaaaaaaaaacaaagg

SEQ ID NO: 101264 - DNA, 262 bp, Homo sapiens
cccactgcagtctgtggatggggagaggagggaagggaggaggggcatgtctcagaaagagaagaaagataagcaatccagtaggtgcccactactggaccctatgggcatgagatgagcccatgcccttttcgttggtcattgctttagtagtagcggaataatgaacactcacagactcttgtgtttctcctgaccttcattgctattttccgtgaagtctgctcatatagcaggtgacatgttcagatggccattttct

SEQ ID NO: 101265 - DNA, 177 bp, Homo sapiens
agaaaatgctgagataggagctgccaatggaccaagagaaaaattgacagtgtgccgaggccttcctcctgtgacataacttcagcatgcagaagagggcgatggtgtgtgtggctctctttggagaagaagcaagtgcatttgtctttgtcgttcggatggctggattcataacag

SEQ ID NO: 101266 - DNA, 304 bp, Homo sapiens
catgagtttttgatatggtttggctctgtgtccccatccaaatctcatcttgaattgtaatccccatgtgtcgggagaggggcctggtgggaggtgattgaataatgggggcagacttcccctgctattgtcatgatagtgagtgagttctcaggagatctggttgttcgaaactgtgtagcacttcccctttcacttgtactctctcatgatccacaatggtaatatgtgcttgcatccctgtcaccttccaccatggttgtaagttccctgagtcctcccattcatgcttccttgttaagcc

SEQ ID NO: 101267 - DNA, 407 bp, Homo sapiens
tgagacagtctcactcaggtgcccgggctggagtgcagtggcaagatctcagctcactgcaacctccacttcccgggttcaagcagttctcatgcctcagcctcccaaatagctgggattacaggtgtgcgccactgtgcctggcaaatttttgtattttcagtaaagacagggtctcaccatggtggctaggctggtctcaaattcctggccccaagtgatccacccgcctcggcctcccaaagtgcatgagacaccacacctagccaaattttccagtttctatagaattgtgtaaatatactaataaagcaggaatataacacacttaaggaatatatcacactttattagttaacttagaggcaatgggatgaaaggcagaccctgtaaaggtcatgagatgc

SEQ ID NO: 101268 - DNA, 1002 bp, Homo sapiens
ccaggttcaagtgattctcctgcctcagcctcctgagtagctgggattacaggcgcttgccaccacgcctggctaatttgtttgtaattttagtagaggcagggtttcaccacgttagccaggctggtctcgaactcctgacctcaggtgatctgcacgccttgacctcccaaagtgctgggattacgggcgtgagtccccacgctcagccactgtatcctttactcagtgtcatcaagttcaaagctctgaccaccctggtttctctgccaaagcctcatctacttccagctgggctttgaacttgtggtttttaagtgctggtttctctgctgcttttggaaaatagtgaccatcatgctggaatgtgctgacgcagactgggtgctggaagagacaagctccctctttgctctcattggccaaagatgttgctaataaccctgtgatctaggcttccttctaggatgatagcctctgacaggcaccatgccaggaggaaactagagcgtctttatcactgaaagatagcacgtttctagccacaggttctgaagttgatgtgaggttaaaatccaagaacctttgatagttttcagccaagatagtaatcagaaagtagatgaacgcagagactggggttgggacacgtggtcgggatccggggagggctctttcctaagctctgcagttagaatcctgtgaaggacgcagctgatagagtacaacggctttcgggatgtcggagattccccataggcaccctcaatgagcccatgaggtgagagacacctattggggcttagggaaactcccatagggggggggtagcgagggcgatgaacccaagcaccagggggccgggtacaatctagccacattgcaaacgacagaagaaggcacactggggggcatggtacacccgaaagcaggccgccggacaacaaaaaagaggacgaaggagaggaaatggtaagacgggggacccaggagcaccagcaa

SEQ ID NO: 101269 - DNA, 402 bp, Homo sapiens
cctgcttataattccaacactttgggaggtcaaggtggaagaatcaaatctccttgggtgttgtggtacatgtctgcagtccaagctacttgggtggctaaggtgggacgattatttgagcccaggaggttaaggctacagtgagctgtgatatgccactgcacttcagtctgagcaagaaagcataactttgtctcaacaaaaatgaacaataccacaggaaagacagaaccagaaaaaaaagaagcaaacttaaaatggacagaaaactacaaatgtacaatagtaactgcttacctatcactaccttacaaataaaaagattaaagtatctactaaacagatactgctgtacactgaatgtcatctccaaaatttaggataaaatttaatagccaacat

SEQ ID NO: 101270 - DNA, 379 bp, Homo sapiens
tggtgagggcctacttccctattcatagatagtaccttctctctatgtccttacatggtggaagggacaaggtagctctctggggcctcttggataaagtcaacaatcccagtcatgagagctatgccctcatgatctaatcacctctaaatgccaccacctccaaataccattatactggtgattaggtttcaacatatgaatttgggaagggcacaaacattcagatcatagcaatatgtatgtgatgtccaagcgtggtgccaggaacatagcaggagctcagtaaatcagtaaacagtagctataagataagtgagggaatggaacagggagttgggaaagtttattctcatatgcttcctggctttttgcagtt

SEQ ID NO: 101271 - DNA, 461 bp, Homo sapiens
tcttcttcttcgcctttctttccccctgttgaataccttctgtgtttctggaatttcagaaacatatactgccaaacttctactgtcccatcttccagaaaggggtaaagggaagagtcaagaaacaggccagagctagagttcattccttctgtcatgtgaggatgagactacaactcagacctcctgatacccatacttggaggatctccctactcccacatgagttgttctcctaattgtgttaggaataatcacagccacaaacggatgatatcagaggtgtcaaacagtaaggcaggagcatctctcagaggaaaacattcactgaacctgcctagcagagctagtttatgtcatgtatcacaccattaagctttggagcaggaagggccctcagagattacctagctcaatacccttgaggaaagggtgaactgaaacccagaaagaagagactt

SEQ ID NO: 101272 - DNA, 420 bp, Homo sapiens
  misc_feature (386)..(386): n is a, c, g, or t
accacccagatcaataaactgactcatctgatcttatggccccaaccggggaactgactcagcgcaagaggacagcttccactccctatgatttcatctccaacatgaccaatcagcactccccactttccgaccccctacccaccaaattattcttagaaacccctgatccccctacagggagattgatttgagtaataataaaactatggtctcctgcacagccggctctgggtgaattcttgcttctctattatagttcccttgtcttgataaatcggctctgtctagacagctggcaaggtgaatcccttgggtggttacaaattcacataaaaactacctcagaggagtgtcaaaggttgagcctaaacaatagacatcgnacccagatgaccaatacaaaggtgttaaattatt

SEQ ID NO: 101273 - DNA, 344 bp, Homo sapiens
catactcatcataaagatctttacctttattatttatagctgcatattgttttactgtatggatacaggtttatgtaatcgaattaaaacaaaaacctgccgggcatggtgactcacgcctgtaatcccagcactttgtgaagccgaggcaggtgtatcacctgaggtcaggagttcaagaccagcctggccaacatggcgaaacctcgtctctactaaaaatacaaaaattagctgggcgtggtggcatgcacctgtaatcccagctactcaggaggctgaggcaggagaatcacttgaacccgggaggtggaggttgcagtgagccaagatcgtgccactgc

SEQ ID NO: 101274 - DNA, 352 bp, Homo sapiens
atcttgcatctgcctacaccatccagcaaccatctgaaccttcaccttcctgatcttgcatctgcctacaccatccagcaaccatcggaaccttcaccctcctgatcttgcatctgcctataccatccaacaaccatctgaaccttcaccctcctgattttgcatctgcctacaccatccagcaaccatcggaaccttcaccctcctgatcttgcatctgcctacaccatccagcaaccatctgaaccttcgccctctggaggacccttctcagagccctcgtgtccaccctgttatgtgggcctccatctctgcagactcataagctggggccaggaaagggttccctccc

SEQ ID NO: 101275 - DNA, 154 bp, Homo sapiens
tcacacaagacccatcctttcctctctacgggctggcttctccccaccacccgccacaatacttcccagcataagtccctctgaaagttaacaaatattaaccagagagagattaattaactggttgacagtatttcaggatcctgcgtgagag

SEQ ID NO: 101276 - DNA, 357 bp, Homo sapiens
tctatgtaaattaactgcaaacatttgagtttgcaacccccagttttagccattaaattgttctaactcttgttatcaaagacaattgttttggctgggcgcggtggtgcacgcctgtaatccaaacactttgggaggccgaggcggatggatcacttgagctcaggacttggagaccagcctggacaacatgttgaaaccttgtctctactaaaaatacaaaaatcagccaggcatgttggtgtgcaactgtggtcccacctacttaggaggctaaggtgggaggattgcttgagcctcgggggcagaggtagcagtgagctgagatggtgccactgcactccagcttgggcaaca

SEQ ID NO: 101277 - DNA, 340 bp, Homo sapiens
aatttcttagttcactgcctgacatgtaataagaatatacggtcaatgagtgttagatttgatgatggtggtgatgatgacgattatctttaattatttggttcttcatggagcttagactttagtagagacatcacataagtttccatggagctattgaaggtctttaagtagattaatgactaggttgtgatgacctttgatgcctcctttttcacatctccccatctacaactagactctacaactagttgagttgtccttgatacgtcttatagatcaatcctttcttctccaataccactgagaatccccccattcatctaaaatgtaatgttta

SEQ ID NO: 101278 - DNA, 347 bp, Homo sapiens
ccttctctactcaacccatccaaaccctgtaagtgaagtgtaaagaatgcaacacagatcttcacaaagactacctaccaaaacaaaccccaaccagaaaagcattggggttactatgcaaagggatccctcagggataaaacaggaagaggggctcactgcatttcctctcaagggctcctgcttcaaccccacctatgtatcacaattcttttcctcttcagtattaaccccctacctcattaatttcctccactccaaccagtgggcagcaatgtccaacagagcacaatacatttaaaactgtttagaatggttgtcttgcacttttctcaccttgtcttctt

SEQ ID NO: 101279 - DNA, 401 bp, Homo sapiens
tggcaagcatgttctagtatttgcatggctcctagccctcatctccatttctctgcacagatgttaccttccccatgaggtctgccttatacatgaggcctgtattacaaactgcaactccccattccccaaccccgttgtttcttctctccagaacactaggcaccatctgatctactatgccttttccttattgtcctaatgtattgctggtcttcttcaccaaaatgtcagctccctgaggccagagatttgtgtctgttctgtccactgctatatgcccagcacctagaacagtgcctggcccagtgaagagtgaataaatgaactggacccagggaagaaacagacttgcccccaggccactcagagagtgagctgtgcccatacccgctcctggg

SEQ ID NO: 101280 - DNA, 400 bp, Homo sapiens
attttatttctttttaaggctgtgggtcatcttattgctgcagtcctaaaggaaaatggtttttcagaaaagattcaccaatctacaaatcagactcctgctttgaacttgctgtgggagaagtgttgcagtgacaatgtagtggttcgaacagcctgctgtgaaggtctggtggcactcgttgctcaggatcatgcagagttcagctatgttctcaatgggatactcaacttgattccatcaaccagaaatacacatggcttgataaaagccattatgcacttactacaaatgcaagctcttaaggaaggacaaggtggggaaaagaatattcagagtatatataccattagaaatcatcctcatcctttgataactgtgcttgacacagacctgattt

SEQ ID NO: 101281 - DNA, 365 bp, Homo sapiens
tttttggagatagagtctcactctgttgccgaggctggagtacagtggtgcccatctcagctcactgcaacctccacccacccccaggttcaagcaattcttgtgtctcagcctcctgagtagctgggattacaggcacccaccaccacacctggataatttttgtacttttagtagagaccgggtttcgccatgttggccaggttgatctcaaactcctgacctcaggtgatccgcccgccttggcctcccaaagtggtgggattacagatgtgagccactgcacctggcctagtccattcatcttaaccactatgttagaaaagaaagcaaactcctggtgagaaaatattgcggccttcttt

SEQ ID NO: 101282 - DNA, 171 bp, Homo sapiens
gctgtgcaagatgcttttgcgtgtctatggtgctgctgatcaggcttgatctccttatgggttctagatatttctttttcatcagaactctctgccctgtgttacattcactcaaagcttcaggatgatgtcatggatcctgcttaagaaacttcagaaataaaagcccat

SEQ ID NO: 101283 - DNA, 757 bp, Homo sapiens
gtattcttagtagagaagaggtttcaccatgttggccaggctggtctcaaactcctgacctcaggtgatccacctgcctcagcctcccaaagtgctgggattacaggcatgagccactgcacccggccgaaaacattaagagtaggtggatgttactttggacaccaaatgaagaagtgtgccgagctgaaagagaaaaggagaagaaaatggacatgacatttacggggttcctcttgcagagagagaaccgtgtagaaggtccacacccgccgtatcctactgcacggtgctggaaggcacatggaagactattgcagcccaatcttctcatgacaaagacaggaaaatggagccctctaagagaaagtgactgatccacccttatgctcttaaatggaatgaggcagcaagaggccagattctgccggagacagagcagagagccaaaccatcgccacttattggtgcatgaacctgggcaaggcaggggtatccctgagcctcagcttccttgtttgcaaaatggtgacatgcctacttccagagctgttgttaggttaatgatgacgcagtttaccatatgccaggcacatagtaggcactaaatagttgcaattattagccctgagcaaacattgctcagccattcccttgtaaagcctattctcaaaccaactttccatgtggacgttcaatcatctttctggatgacctcgccttacccattgcctcagattctgtgtgtgtgtgtgta

SEQ ID NO: 101284 - DNA, 614 bp, Homo sapiens
agttccaacccctttgcggggtccaagggctcctggaggaggagatgacttctggggcacagcaaaccaagatgtgtgctccccagagctgacttggaagctgtccggcccctctgcattcaccccagctgcccatgtacaccaggcagcaggagggacagccactgcaggctgccagcctgtcctttgctgtctgtgtctgtgtcaagagtgaatgaagtgataaaaccaggagagcagtgtgctgtgaaaaagttaaagcctgacccaagctcagacagaggaagcaggagccacctgaacaactgaagggtgcagacacccagaagctggttttgtaaataaatcgtgcaccttggcgctggtgcactaattggaaaaaaaaaaaaaaaaaaaaaaaaaaaaaaaaaaaaaaaaaaaaaaaaaaaaaaaaaaaaccgggggaattattatattggggggggggaaaaaaggggtagaaaaaggggaaagtgtggaaaaaagggtggtttgagggcacacgtttttttggtacaaagggggaaaaatgaggggggctccctattaagaggaggagaaaaaagggggaaaaaagaaggaataactgatttaga

SEQ ID NO: 101285 - DNA, 449 bp, Homo sapiens
cgcagcctccgcctcccaggttcaagcaattctcctgtctcagcctcccaagtagctgggactacaggtgcatgccaccactcccggctaattttttgtatttttagtagagatagggtttcaccatattggtcaggctggtctcaaactcctgacctcaggtgatccacccgccttggcctcccaaagtgttgggattacaggcatgagccaccacgcccagctgatagcttatctttacaggtacagggcaaaggacagagcttatctttacaggtacaggacaaaggacagaactcaaagtcatccctctgctcccctgagacaaatgcatatgtaattgcttcctctccgctatatttatgtaatctcatgtaaaaatgcaggttgaagggaattctctggggctttggggaatttagtgcgtgagagagggaatgatggggatc

SEQ ID NO: 101286 - DNA, 270 bp, Homo sapiens
cagctagagttgagttgtaggatggtttctgtgaaactatgtgttcataattcaaaacaaatttattacctggcatttttgcactgaatgtgtttaaagagttaattgatcagtgttagccttctgaaagatgtcatcgttttttattttttcttttcgaaaaagagtcttgctctgttgcccagactggagtgcagtggcatgatttcaactcactgcaacctccgcctcctgggttcaagcgcttctcgtgcctcagcctcctgagta

SEQ ID NO: 101287 - DNA, 882 bp, Homo sapiens
ggaggtggtgtcagtgaacttaaggtcagtcttctccagagcccatcgtctggtctgcaccagcaaagatgtgcagagaatgagcactcgcttcttggttcccaccacacagcctttcagcataacagagttattggtcacttcaccatagtggacaaagccacccagaaggtcgatgctcttgtcagacaggtcatagtccgtggaggcattgttcttgatcggtttgctgtcctcagtaaggtagccctggtcaatcttacagatcttcttgttgatctcagtgtggtgatggtcgcctttctgcccagcacatgccatggagaaggccacatggtcaggatgccatgccccaatccaggccaccttgcacaggcctcggtgggtcttgtggggcagcttcttggtgtgccaacaactggtgacccctttgtagcctttgcccttggtcaccccgatgatgtcgatcatctcgtccagcccaaacgcttggttcacaggtacctgctgctgtagcccctcctgggctcagtccagcttctcagccatggtgcctccgttcacttggatctccatcagctgggccttcttctggcgcagaggaagtaggcgcgtctgggtgtgggcagcgaggtgggtgacttggcagtgcttcctcatgctgctgaagtcttctccagctgcttcttgccatcctcatcctgccatttcttgcagtacttggtaaaggccttcttcctagatttatgccggttgttagagaaacaccttttgcactcatcgttgatgtgctcagcaaagatggccttgaaggtccggaggcctcaaggggtttccacgtagcccgcaatgcccacaaccaccataggtggtgtctccaca

SEQ ID NO: 101288 - DNA, 464 bp, Homo sapiens
ccaatgatcacagcacacgttgagcctgccgagagtctctcttggggcaagacatctagaagtgctagggaacgcagtcccacaattccaataaccaactgcagacagaactatatagatgagtatcacgcttaggtttcccacgcccacccccatctgtgaagtcaaacagcctgttgtcaataccagaagagacaagtttgtacatcacaaaagacaagcaagtccccaatctaattatgccagccactttagaaggagagcaaagacagcagacactctgggcaatgaattaccctaagtctcagcatcaagcctgcactcatctcctgggtccccaaataactcaccactggtcagaaggatggatgggcccttccaaatcacagcctgggctgtctgaggacagctctcccaggaatcatctctacccacctaggacgtgagtggagtcaataaataag

SEQ ID NO: 101289 - DNA, 886 bp, Homo sapiens
atctcaaatgagataatatcaataaagacctcctgtcgtctctacccaagaaataaactaaaggaaggcagtgtccttgcaggcattttgacatcagggatgggcaaaaacatacatccatttaagaattctagaatcagagactaggaagagttgaaacaaccttacagatcacttgatgcactttatatagacccaggggagaaacaaaaagaccaactactaaagctgctaaaacaagataaagcatactgcaagggaaaggctggagcagttcactggctgaagttataaactccatcaagagacacacaatcagatggcacaactgtcttcagtgggtcacagttttccaaatacaaaggcggtgcctaccgaagctctgggattctggaaaatatactggacttggagtaagacaatctcagtccatgttcctagttctaggattttacggcataacacttggcttttagggcattgtattttctttatagtaacatggtattaaaatgatgcctatcaacaggcttgtcaggatgagtcaacagcatattagatgggaaaacaccataaagtacaaaaggcttgttatcgtcagtctcctttggttgttatatcggttaagaggactaattgtttgcctctctccaagttcagaactaattcaacatgcatagaggagtcagaaggtgggatccaaacatttatgtttatttacctagtttaacgttcggcatcataaggaacttggcttgaacttataagcttcccaactggtatctataacacaactattgttctcttatcctgccctttctccttgattatactaataagcttgggaaagaagaaattcatgacaaaagcataccttggaactcct

SEQ ID NO: 101290 - DNA, 783 bp, Homo sapiens
atctcaaatgagataatatcaataaagacctcctgtcgtctctacccaagaaataaactaaaggaaggcagtgtccttgcaggcattttgacatcagggatgggcaaaaacatacatccatttaagaattctagaatcagagactaggaagagttgaaacaaccttacagatcacttgatgcactttatatagacccaggggagaaacaaaaagaccaactactaaagctgctaaaacaagataaagcatactgcaagggaaaggctggagcagttcactggctgaagttataaactccatcaagagacacacaatcagatggcacaactgtcttcagtgggtcacagttttccaaatacaaaggcggtgcctaccgaagctctgggattctggaaaatatactggacttggagacaaatcagaataaaacaattcaactttcaaggtattaaaaggattcaccaactcctatctcttaacacaatggccaaaaaactgctggactcaaggcacagtcatgtattcctggcataaggcctgcctgggtgttctaactcaatgagccccacatgccagactatttccacagagctgatatgggacaggaagggctaaggaacttcaaaactaatagtttggtgcaactgatatggacctgtgcagtcactgaccacatgtagcactgagaacttgaaatgttgcaagtgtgactgaggaagtgaattattaaaacttatttttaactaaatttaaaaggtgatagctaattcagtcactagaaa

SEQ ID NO: 101291 - DNA, 461 bp, Homo sapiens
cataatgttttcatcttccccaacagaaattctgtacctattaaacactaactccctgatcccctcttcccctagcccttggcagccaccattctattttctgtctcttatgaattttgctactcttagtgcctcatataaatggaatcatgcaaaatatgtcctttcgtatctggcttatttcacttggcttaatatcttcaaggttcatccatgttgtaccatttgtcaaaatttccttcctttttaaggctgaaatatttcattgcatatatataacacattttgtttacccattcatccactgatggacatttgagttgtttccatgttttagctattgtgaataatgctgctatgaatattggtgtacaaatatcttgatattggtgaattctacaatatgtaaaatatacctcaatatagttattttaaaataaaacatcaattctaaaaaatta

SEQ ID NO: 101292 - DNA, 342 bp, Homo sapiens
ggcgggcactctactctgctagctctcgtggatttagcgtgatagtaataaatccattctcacactgctataaagaactacctgagactgggtaatcttttagaagaagaaaggtttaatcagaggcctcaggaaacttacaatcatggcagaaggccaagggaaagcaagcacgtccccgcggcaggagtaggaggaagagagagagcaaagaggggaggtgctacacacttatatacaagcagatctcaggagaactctttcgcgagacagctctagggtgatagtgctaaaaccattacaaaccactcccatgatccaatcacctcctaccaagcccct

SEQ ID NO: 101293 - DNA, 346 bp, Homo sapiens
ggagagatgcttctagcggacaacacaattatggtttcatcgacttagaagatgaggctaccatatggctgtttggggctccttgtaccactgcagcaatgtgcagaggagggggtgaccttgctggcagaagggactgatcctgattaccaaggggaaagtgggatgctgcacagggaggcaagcaggactatgtctagagcccaggagattctcgggagggctttagtgccaccatgtccagtggtaaaggcaaggggaagtacagcaaccaaaaacactgcaactccaaaaaatgacagcactgtggaaaattcagacccttcaggaacgaaggcttgggtca

SEQ ID NO: 101294 - DNA, 183 bp, Homo sapiens
catttcctactttttttttttacatcaagctgcactaagacaaccatacatagtgaaactatcatcatctaatggcattttcattttaatttgagatcacagtttaagcaaaataagtgagagtattacataaattttttttttttttgagacagtcttgctctgtcacccagactggactga

SEQ ID NO: 101295 - DNA, 236 bp, Homo sapiens
aggccctttggcacaactgtcatcgatttttcatatgctgttcatgattggtgtccttgccccacactggaccccacattagactgtcagctctgtggggtgaggaccatgctggttgatgagccgagaagtagacgacatctgagatctgcctgaccagaccccattcacttgaggaactagccttccctctctcattctcaagccaggtgattcacaaggaaccaacccatctc

SEQ ID NO: 101296 - DNA, 791 bp, Homo sapiens
tgactgtgcactctgggacaggttccttaaccattctgagccttggtgtttttcatcttaatgatgtggctaagaactgtacctactccatagggtgactgtgggctttaaatgaatttatccccacaaaacacttaccatgtccctggcacactgtaagagatcaataaatgttagtatttgtgatttaggggtccagagctggagctgtagagtgccccattgggtcagcaggccagctctctggacacagggacaattgtcgtattgcagacctagagaagagggcagtatttcttccaaggaccttgcctgaagggcctgttcaccagttggaagaatcatgtagggaagagagctctgagctgggagtcctgggttctagtccagatcctgccactcactcactgcctgagtggccatccctttctgaacctgtacttctgcatcccccactgtgccctccacggcctttgctgtgaggaaccagtaaggtaacatatgtcaaagtgctgagagattgttattagcaagtcacaaagatttgtataagagagatttacttttctttccctcacggaatttgagcctgactgtctacccagggcactgttcagggtggaatctcatggtctgtggaagggaaacaacttttctctgctctaatcccataacccaaggacagaataccttatgcatcccctcttggggatctctgctcaacttctcttgcttccctgacgctccccgccccctggctatatcgtgcccttgtaatcctggcccagaga

SEQ ID NO: 101297 - DNA, 196 bp, Homo sapiens
tgggggacgacgtatgcaacttactctcaaataatttggcaaaaaatgcagtagtaaagcaaatgtgactagaagaaatgttaacaattggtgaatctgagtaaagggtaagaaaattgtacaatttttgcattttttataagattaaagttatttcttttttttattcttgttttcttgagatggagtctcgctc

SEQ ID NO: 101298 - DNA, 276 bp, Homo sapiens
aaaatttgctatccccttcacagtgtgggagctgtcactgggaagtggttgcccagtcaaaattttccctttccaagcctttccaaccttgtatcacatgtggccttgtgagtagttctccccaatagaatgtcagtgagaatgactgaatgccaacttccaggttaaggttcctcagaagcagcaggtaaggtatgttcatgctctttccccagctgctagaggactccaaggcccacattatggaaggtcaccaaatgatcaagaatgccttca

SEQ ID NO: 101299 - DNA, 722 bp, Homo sapiens
actaccctaaactctgttttatttatttatttatttttatgttttcagttttttttgagacagagttttgcttttgtcacccaggctggagtgcagtggcgtgatctcagctcactgcaacctctgcctcccgggttcaagcaattctcctgcctcagcctcccaagtagctgggattacaggcacatgtaccaccacgcctgggtaatttttgtattcttagtagagacagggtttcactatgttgaccaggctggtcttgaactcctggcttcaagtgatccatccacctctgccttccaaagtgctgggattactggcgtgagccatggctcccggctcctaaactctgttttaaagatgtcttgcagaaatagacatgaagaaatccatgagaaatacaagagcagatgatacaaagttgggcaaagaaataagtaaaaattatgatgtcataacctgttgatttaaaaaatagtggtaagaatattaacgctgtgaaacaaaacgcctagaggactgggttgggaggggccagggagcacattgccgttccatcctatctggggaggaatatagatgcttgtcagtgggcattttgatagaaaatatctaagtatatatgctaacaattcaagagtctccttaagaataaaaatagcatgtatatacctgaaaaaaaatatgacaaatctttattttgggcatggtggctcaaactt

SEQ ID NO: 101300 - DNA, 261 bp, Homo sapiens
tatttgtttatgttttaatttcaacttttatcatagattaaagggtacacatgcaggtttattacatgggtaaattgcatcaccctgaggcttgggatcccaatgatcccatcacccagggaataagtataggacgcaacaggtggcactccagcccatgccccctgctcccttccttccccatctagtgatccccagtgcctattgttcccatcttcgtgatcatgtgtcttcaacgtttaggccccacttacaagtgat

SEQ ID NO: 101301 - DNA, 304 bp, Homo sapiens
caggctcattttaggagaactcagtttccaacacgtacaagtgaagggagagacatttccttaacgtgacaaagatgcatccagcctgcaatcacccagaccagggggcccgctgctgcagccacaacaacgctgcttcccgccaccaaactgacgattatcgcaacctaacaaatcacattaacatcctttcgtataaatgagctggtattaactgaagtaatattgatattttggtgcaaattacactttcacattaaaaacagaagaaaatttcatcaaaagtcgacttattcaaatgaac

SEQ ID NO: 101302 - DNA, 241 bp, Homo sapiens
cacagattttttttttttatatggcagtgtggagagggagaagaactcgtttggctggaacaaaggtctgtgccgtggagtggggtgggcaagatgcatggagaggctggaaggccagcttagaaaagccgaaatctggccgggcacagtggctcatgcctgtaatcccagcactttgggaggctgaagcaggtggatcacctgaggtcaggagttcaagacgggcctggccaacatggca

SEQ ID NO: 101303 - DNA, 405 bp, Homo sapiens
ggctcagtttccggttcttgaactagactttcctactgagtgtcacatgaaaaaaaacaaacaaaaaagactgaggcacagggacaaaggaaagagtatttagctggcacactctcaccttagttctccatctaccttaaaatgtcccgggggcagagggtgcttgttacaatgaggattctcggtccacaccctagatctgtggactcagaatctttggagggaaactcaggaatcagcctgtaaacaaatatccaagatgattttcgtggcccacctgggatccaaccatatgcccccaagaagcaagatccctgccccagttagagaacctacttttttccccagattccatttctcttgtattcattcttgccttgtttcttcattagcatttcatgttaa

SEQ ID NO: 101304 - DNA, 1401 bp, Homo sapiens
attccgtttccggccgttcccacccctgttttcggtcggcccgggtgttctgcaagctggtcaaaaaggggaagcggcccagatatgttaagttctatggccgctgcagggtctgtgaaggcggcgttgcaggtggccgaggtgctggaagccatcgtgagctgctgcgtggggcccgagggacggcaagttttgtgtacgaagcccactggcgaggtgcttctcagccggaatggaggccgcctcctggaggcgctacacttagagcatcccatagccaggatgatagtggactgtgtttccagtcatctcaaaaaaacaggagatggtgcaaaaacatttattatctttctttgccatttgcttagaggacttcatgcaatcacagacagagaaaaggatcctttgatgtgtgaaaacattcaaacccatggaaggcattggaaaaattgttctcggtggaaatttatttcccaggctctcctaacgtttcagacacaaatattagacggtattatggaccagtacctaagtagacactttttgtctatcttttcgtctgctaaagagagaacattgtgtaggagctctttagagttgctcttagaagcatacttttgtggaagagtgggaagaaataatcataaatttatttcacagttgatgtgtgactactttttcaagtgtatgacttgtaaaagtgggattggtgtatttgagttagtggatgaccattttgtagagttgaatgttggtgtcactggccttcctgtttcagattccaggatcatagctggtcttgtgcttcagaaagatttttctgtgtaccgcccagcagatggtgacatgcgaatggtgatagtaacagaaaccattcagcctcttttttccacttctggatcagagtttattctaaattcagaagcacagtttcagacatctcaattttggattatggaaaagacaaaagcaataatgaaacatctacatagtcagaatgtaaaattgctcatatctagtgtgaaacaaccagatttagttagttattatgcaggggtgaatggcatatcagtggttgagtgtttatcatcagaagaagtttctcttatccggaggatcattggtctttctccatttgtaccaccacaggccttttcgcagtgtgaaatacctaacactgctttggtgaaattttgtaaacctcttatccttagatccaaaagatatgttcatctaggcttgataagcacatgtgcatttataccacactctatagttctttgtggaccagtgcatggtctcattgaacaacatgaggatgctttacatggagcacttaaaatgcttcggcaattatttaaagaccttgatctaaattacatgacacaaaccaatgaccaa

SEQ ID NO: 101305 - DNA, 750 bp, Homo sapiens
acccctgttttcggtcggcccgggtgttctgcaagctggtcaaaaaggggaagcggcccagatatgttaagttctatggccgctgcagggtctgtgaaggcggcgttgcaggtggccgaggtgctggaagccatcgtgagctgctgcgtggggcccgagggacggcaagttttgtgtacgaagcccactggcgaggtgcttctcagccggaatggaggccgcctcctggaggcgctacacttagagcatcccatagccaggtacccgcgtcccacacgctaacccgtagccgggcaccccaggcagcctctgtggagctcttgtcccatcctgaggcgatgcgtacttagaaagactgacctcgggtgaaaccgctgtatgctcggaattagagccctgcccaagggaacactcctgcaccccaaatcttaccaattctcaagaccacttctccccactccacccaacggtggaatcttggaatagagcagagttttttccaagaaaggaaaaaactaaggatgtatccaaggaacaatattctcattttatgcttatggctgtgtaaacatggttttaagatgtgggaagccagccttctgaaaatgagttgctttatttcttttttgtacaggatgatagtggactgtgtttccagtcatctcaaaaaaacaggagatggtgcaaaaacatttattatctttctttgccatttgcttagaggacttcatgcaatcacagacagagaaa

SEQ ID NO: 101306 - DNA, 1429 bp, Homo sapiens
  misc_feature (22)..(22): n is a, c, g, or t
  misc_feature (35)..(35): n is a, c, g, or t
gcgatctttgggttcaaccatnattgaaaaccccncgtggtggtttattacacagctgtcggcgaatccggatgggtgtctgccaagcttgttcaaaaggaacggcccagatatgttaagttctatggccgctgcagggtctgtgaaggcggcgttgcaggtggccgaggtgctggaagccatcgtgagctgctgcgtggggcccgagggacggcaagttttgtgtacgaagcccactggcgaggtgcttctcagccggaatggaggccgcctcctggaggcgctacacttagagcatcccatagccaggatgatagtggactgtgtttccagtcatctcaaaaaaacaggagatggtgcaaaaacatttattatctttctttgccatttgcttagaggacttcatgcaatcacagacagagaaaaggatcctttgatgtgtgaaaacattcaaacccatggaaggcattggaaaaattgttctcggtggaaatttatttcccaggctctcctaacgtttcagacacaaatattagacggtattatggaccagtacctaagtagacactttttgtctatcttttcgtctgctaaagagagaacattgtgtaggagctctttagagttgctcttagaagcatacttttgtggaagagtgggaagaaataatcataaatttatttcacagttgatgtgtgactactttttcaagtgtatgacttgtaaaagtgggattggtgtatttgagttagtggatgaccattttgtagagttgaatgttggtgtcactggccttcctgtttcagattccaggatcatagctggtcttgtgcttcagaaagatttttctgtgtaccgcccagcagatggtgacatgcgaatggtgatagtaacagaaaccattcagcctcttttttccacttctggatcagagtttattctaaattcagaagcacagtttcagacatctcaattttggattatggaaaagacaaaagcaataatgaaacatctacatagtcagaatgtaaaattgctcatatctagtgtgaaacaaccagatttagttagttattatgcaggggtgaatggcatatcagtggttgagtgtttatcatcagaagaagtttctcttatccggaggatcattggtctttctccatttgtaccaccacaggccttttcgcagtgtgaaatacctaacactgctttggtgaaattttgtaaacctcttatccttagatccaaaagatatgttcatctaggcttgataagcacatgtgcatttataccacactctatagttctttgtggaccagtgcatggtctcattgaacaacatgaggatgctttacatggagcacttaaaatgcttcggcaattatttaaagaccttgatctaaattacatgacacaaaccaatgaccaa

SEQ ID NO: 101307 - DNA, 349 bp, Homo sapiens
tccaaacacactaactttttattcaatttgattcaaaataataatattaatctaatagtgaaatagtgatataacatcaatcaacatttagagtattttatgtttcaaagtatggctcaggaacacccattgctaaatgcacttagacataacaagacagtattttttattggcatcattgacacctatgaacaatagcctagtaaatagattaaggtttaaccttccttttctttggtggctgtttagagactttaaaagaacagataactcatttcaacaggaatctactactgatatttacctctacataatctttagctaagacttggaatgccaaaaacaagct

SEQ ID NO: 101308 - DNA, 727 bp, Homo sapiens
gcagaataagggacatgaggtgcaagggagacagcctggagggtcggcagggtggctgtcgggtaccagcaggccacacagggccttgtgggttggagaacagatgagccaatttatgcctgtttttctggcataatcatggtaccgtctttactctcacaaaggaagaaaagttctggtttggatgataaattgcatggccatggagaggagtttagattttgttcttctagagatgggagccgctgaagggctgaggatggttcgtttgccatcaaatgcttaggttgtaagcttaggtgccttctggccttggggcagaagctgactgtgggtggcagtggacacggagcccgagggaaggctcctctgctccactggagacacgagggtggccccactttggggacggggtggacatgcggagaggattctgacggcggagcggcaggatttcctggtggactgggcgtggagctgaatggaagacggggcacaaaggaccacagggtttttggccaaagctgcaggaaagaggaaactgacatcagctgagacggggaagatggggagggggcagggaggagccacagttctgctttggatacacaagttgtagatggccttcagatatccaaggggaggcgtccaggaggtagttgggtttccaagtctggggttggaggggcaggtccaggctgcctgagggtaggggtagcatttaagg

SEQ ID NO: 101309 - DNA, 236 bp, Homo sapiens
tgtctcaaaaaaaaaaaaaaggaaaaaagaacaattgcctagatgtggagtctacagcctcaaagatacaggatattcaaggaaattcagataattacaaacctaaaaggttagaaaaaacaaaacttaagaaactacttacagggtgcagtgcaccagcatggcacatgtatacatatgtaactaacctgcacattgtgcacatgtaccctaaaacttaaagtataataataaaa

SEQ ID NO: 101310 - DNA, 835 bp, Homo sapiens
agcagttggcccttagatcatgagaccagcctaagtgcccaaggaaatggaacagcagggagggggagggacatcacatccactatcaaaacttcttgttagtctctggcttccacatcctttcccaaaacttcagcccaattcacagccgcatttttccatctctttgccattcctccatgggagagctttctgttggtacaggaatagctgagaagtgggaaagatcaagggtagtaagagctgcccccgataatctacagaaagctttgctggaatgaggttgtgcatctctgaacctgagctagatttgttgggtcagggaccatacttatttactggcccaagaattagaagaggaggtgtctaagaaatgcttgttgaatgaataaataaacagccgagtgagtgtttatatgagcctgaaaactgcctgcaccagcacaaaagtaaagccccaacaccctcaggtcacacctactggaaaaatatatgtcagccccagaaaaatgtgggcaacatgaggcaactccggagcaacacaggaaactgccctcctcttctggcccctcttccactgtgatgctcaaagtctgtgatgaccaagtctggtcatctaatcagcaggatataagagggtcattcttcactgcggccattccagtttcctggaaacttggctttctcctgaccgtttccccatgagcacggtggtgacaagcttgagctctgacatcagaaagtccccagtttgaaacctctagcttcttactcgctagctatgagactttgggcaaattaatctctaaacctcaatttctcaatctgtaaaatg

SEQ ID NO: 101311 - DNA, 265 bp, Homo sapiens
aaaatgcataggaccatctagatttgcagcagtaagattccctatccaggcatactcaagtccccaggctcacgcctttaataacaagaaactgtacgtcaagaccgattcatgtgaggaggtattcacttaaatctttagacttactattgtaagagtggggtcagttatttgaaagatgtgggtatttacaatgctaaggacagagtaaaggcaaaattaaaaaggtcagaaatcacttttctggtgaggctgagacatcatg

SEQ ID NO: 101312 - DNA, 670 bp, Homo sapiens
ctttgcccttctgcatttttgattcttttgtgaaccctcttgcacacttgcttttgcacacgcgcccccccccccagcattttcagtgctctccggaagccttgtttctcccctttaataatgttcttgcgcaccatgacatggctgcacaccgcatcttgtcttttctacctggatgagagctctaccacttctttccttttgcacactcatctcattccatgcactcttgggctgtaactgtcatttcttttcctgacacgcttattttttattcctgttgacaagcagctcttgcggccattctcattcggattctcttacctccttaagctctttctcttcctggtgagagaagaccctatgcacactggcttcctgctcaccatgcttccacactcgagcctctccctgcctccagccctcacccttcctcacatcctccctcttctgtctttcctgggccatctgtccatcccttttgcacgaagattgccctctcctaacctgtccactccaagaagctccctctccctccagcatggctgttccttcccgcacgcttcctctctccgcttattcccggggcttgggaatgttaagccacccctccccctgaaaagccccctcccctgctgtgggtaaaggggggagggcgttgccctcaggt

SEQ ID NO: 101313 - DNA, 455 bp, Homo sapiens
tcagggcacaaaagatcatttatttttccaattgtgaagtgaacattagataaaattatttcatttcagattttttgaaaaggtaaaaataataaggaaaataccctctcgaaaaggctttttatttcgtttactgaaagcttccaataacgtgcctagttttaaactaggttactgttatttatcacataatcatccccacaggtttgatcaccactaatttgcagatgcggaaactgacaagctcagagaggctctcggttgccttttgggaagtggccaaggcgcgatttgaatccaggtctcttacctccagtttctgagacctttctagacaccaaggttatctcttcaaatactgctgcaagtaaacagctgtgtgagtatctagacttttgaagttagcagactctagggaataggtagaataaaatatatgggtatgtgttcgcggg

SEQ ID NO: 101314 - DNA, 265 bp, Homo sapiens
ctttagaatttttttttcttaaaaaggtaattcagggcatatatcatatattatcagagactccccagtaggacatagagcagcatcctgtgatcaaacatcttagtatttctgcagcaaaatgtcatgaatagtcacactaggtagaataaagattataaactgcttcatgttcgttcaagactggtttgcaacaaatagttcatgtcagaccagggtttttgccagaaaactgtgggcctagaacaagtagatggtacatcaa

SEQ ID NO: 101315 - DNA, 343 bp, Homo sapiens
tattatggttttagtgtctaggaccgtaaagtcatgacagtgactcctctcttcagccccagttcgtagcagagggcccggcgcagcccaaagcaggcacccggatgtttggtgaattaggggaagtttttcctgtcccggagccgtaatgtggtacttgtgattttccttgttggaaggcacagctatgtctgccaagaaagacaaggcatgtagtcaccatgctgctgcctcacacagacattttttaagccaggacttctggagaaggaagcagaaaggaaggcaacttgctctttggcccatggagtttcagcagttgcaggaagttggctggggtgtg

SEQ ID NO: 101316 - DNA, 400 bp, Homo sapiens
tatgcacatgaaagccacatccataatcattttattattgtgtctactccgtagggcatcacactagacactgggctacattaaagtctcaagtcacagtattaatcttcaagaggcttccggtttaactaaagcactggtaacaagcataaagaaacctgcacttgactaaatctggaacttcattagatgagccacagagaaagtgaacagcttctgtaaaccacaataattgggcaaaatggacattaaggctcaggccatagatttgatttttgaaaaacaaaatagattaaaaatctattcttggccaggcgtggtggctcacgcctggaatcccagcactttggggaggccgtagcaggcagatcatttgaggttaggagttgagacgagccta

SEQ ID NO: 101317 - DNA, 266 bp, Homo sapiens
tgtaagtcagatataaaacttgttgttaagtcagtactttttgaaataggtagactaagcatcattttatatttgttttcagggaacaagttcatttgataaagtgcatttgagctacttgtcattaagttttttttgttttttttttgtcgtttttttacttgtcattaagtttaaaaattactatgtttagtatttggtcaatttgatatcttaaattgttgaggattgcattttttaaatcactcacattgttcaattatcat

SEQ ID NO: 101318 - DNA, 556 bp, Homo sapiens
caactagtcttctaaattagaacttaaacacaatgaccagatatgaccctgcaacagagcatgcccttctgcattgagcatgcaatcatgaatcacaggctctactgaccaagaacaaatcacagactcagagagcatcataaaaaggcctagacccacgatgcccagagactccaggctcaacccacattgatgctggcccttcagccatgagactccatttgcttctccttattctccttcttttttcaattctcttatccccagaacagatgtctgcaacatagtagaagatcaaattggtgcctgccgaagaaggatgaagtgctgtagagcatggtggattttaatgccaattccaacaccacttatcatgtcagattatcaagaaccccttaaacctaacttgaaatgaaactgaaacaaaataaaaatacatcaaaagtgaagttatttgcatctaagaatattaaaatatacatattaagtacttccatcttgataaccgtcttgcattttcacttatcaacataaatgaataaatactaatttcaaa

SEQ ID NO: 101319 - DNA, 215 bp, Homo sapiens
ggagtccatggctgtgtgcattagcagtggcagtggcagtggtagcagtagcagtggcagtggtgacatgtggcagtggaagtagcagcggcagcggcataggcagtggcattagcagtggcagtggcagtggtagcagtagcagtggcagtggtgacagtggcagtggaagcagcggcagcggcaatggcaggtggcattagcagtggcagtgg

SEQ ID NO: 101320 - DNA, 888 bp, Homo sapiens
  misc_feature (549)..(549): n is a, c, g, or t
  misc_feature (686)..(686): n is a, c, g, or t
agccacagagctcctgatcctggcccatcattgcttcaccctgacgtgccacatggagggcatcatccgagtcctacaggccgcccacatgctcacagataaccacctggcccccagtgaggagtatgggctggtggtacggctcctcactggcattggaaggtacaacgagatgacatacatatttgatttgctgcataaaaagcactactttgaagtgctaatgaggaagaagttggatccgagtggtaccctgaaaacagccctgctggactacatcaaacgctgccgtcctggagacagtgaaaagcacaatatgattgccctgtgcttcagcatgtgccgggagattggcgagaaccacgaggcagctgcccgcatccaactgaaattgattgagtctcagccctgggaggacagcctcaaggaagggcaccagctgaaacaactgctgctgaaggccctgactctgatgttggatgcagcagagagttatgccaaggactcctgtgtgtgacaggcccaacactgtcagcggctcaccaagtngataactctgcagattcactttctgaacactggccaaaacacaatgctcatcaacttggggccggcacaagctgatggactgtattctggccctaacctcggtctccaggcttctattgaggctgatgcctacgatnttggtccaaaattgggctgacattttataccacccagtgattcttaaaggagactttaataacttggaagaatttaagcagcaacaggtatttatagtcattatatttcgaaaaaactgcaataatataacacacatcacctactgactgtgtatgggaactatgagaaataccacatattgtgagaatgttacctggttac

SEQ ID NO: 101321 - DNA, 672 bp, Homo sapiens
aattgtacacaagaagaaatgaaaagaagtctgctaggaatccttgcagactaaaaggagatacatgagagagactttctttctgtctctggacattgtcatctgtctggagtacctagaactgcagcagtcttcatagaatcatgagagtaagcttttgtgttttagataaagtggcagatctgatttgttgatagcaattccctggagtgttgcattgagaagattctgaggccttggtctactatctgtgactgccatggaatcctgagtggagcgaaattaagttcccagacttgttataccctcctgacttgttctccccttccttgggaagggcatctgttccaggcaggtaacacctgtcatcctggctggtctagctgtgttctcgtcacccatgccggcacagtaccttacacgtaagaagagctcagaaattctttgctgaattcattcattttgaggcataaaatccaatcttcctgaagataagtcctttccactgaactggtggggtgtggggaaaggggttgctggtacttcatctggggaccccgaagggaccaggatatgagttggctagaaaaggggcaggtaagtatggggctttcccacccacagtagtcctgcttcatgttcttctttcacaattatttgacagggcacccc

SEQ ID NO: 101322 - DNA, 142 bp, Homo sapiens
atcctgggctcaagcaatcttcccccctcagccttccaagtagctgggactccatgtgcatgcccgcatgcctggatagtttttattttattttttctttgtagagacagggtcttgctatattgcctaggctgctctcgaa

SEQ ID NO: 101323 - DNA, 753 bp, Homo sapiens
tgaaagaatagttaacatttgaacaactgaattggaagctatgaacatggttttgttttaaaagagcttaaaatgtttcaacctccttaattaaacttaactttagacacaattattgataatagttctttagtataatacttcacatgcatttaacaattcgtttcttttccttcacagatggaggaattaaatcccaagcatcttctaactagggctagccattttgagaaacagtgtttttatttttgtttaatttgcattcagtttatgagatatacttcttgtcactgctgttaatcatttttattaagaaaatgcagcaaaatgcacaaataattatacagatactgttttttagataaacatgttgacagattggaactaaactttttgctggcaggcagtgttggtatatgtgaggaaatcagtttgccccctccggatgggtgctgtatttagattggcataaaattatttcttctagtcaggagaaaaatttcattatcttacatttactagttgtagtaagacatagaaagttgaatttaaagtagaatttatcccccaaaacaaagaaaaaattatgtacattcagatgatttttactgcataaaataaggaataatgaggttaacaaaaagttcgtgtgttagaaaataactattttcgtcactccaacatcatatgatcttagaatatttcttgttaatgtaatagcagataataaaaaaattaagcagaaaatttctg

SEQ ID NO: 101324 - DNA, 1221 bp, Homo sapiens
actggtcggcccacggggtaggcggggaggcggaagcgggcggcgctacggctgactgggaaatgtcagccgctggactgtagacggattttcctttctcgggagcccgcaggccttctggtgatcgccagcgctgtcgtctctgagcgtggatcccagaacctggacagctgtggcggccgccgtttcccggtcccgtccagacgctgtctggcgagatcggacggtgagcctaaggcggaacgcgtgaggcgcttttgagtctggggtccggggccgagagcaggcggaaagagaggggacccggcagaccccgagtggccgccgctgcggggcccaagtccttggctgctgagtggtgacagtagcccagcccgccggccagatatggtccagacctgtacatgaataactttggttagtcagagtgaaatattcaataatgagtggtgcagctttgggacttgagattgtttttgtcttttttctggcattatttctacttcatcgatatggagactttaagaaacagcatagacttgtgattattggaacactgcttgcttggtatctctgctttcttattgtcttcatactgcctctggatgttagtacgacaatatacaaccggtgcaagcatgctgctgcaaattcaagccctcctgagaatagcaacattacaggattgtacgcaactgctaaccctgttccaaggtatttcctttttttaaaaaaatatataaacattgtaggggacacattgtttaaaaattgaaagtttttaccatccagactttatatttatgtaagttatcctcattctctactaattctccccacctctattctttcctagtagacttttcattacatcatattctaattaaatctaatttttaatatttattggtccacaaagcccttcagtagacggtagtgagaaacttgaagaagtcctgattttttagtcctggttcttctttaccaagtatgtaatttctaaaacctgtttttcctctcagcctatctcagatttaaaaacgtgggatgtattttcacttttgcctaatttacaaggttataataaagacaagtatttctgaacttatggtattcctttcatattgcacatccttcaaaagcattatagatttacataaaaaattaataaagttcaaattgtccaaagattatattgaattcatatcgaacttttaagta

SEQ ID NO: 101325 - DNA, 576 bp, Homo sapiens
agacgctgtctggcgagatcggacggtgagcctaaggcggaacgcgtgaggcgcttttgagtctggggtccggggccgagagcaggcggaaagagaggggacccggcagaccccgagtggccgccgctgcggggcccaagtccttggctgctgagtggtgacagtagcccagcccgccggccaggtgagaggctgcgaactgctggcgtcgcacctgttcgtccttttgccaggaagcttcttcctccgtcggggagaaggcggccctaagaattgggtctgtggacgggatccttcctttatctgtaaaataacgcacaacagctaaacacgccgttggaacgagagacaatggtttaattttaggggagccggagaccccagcgggtcctgtgtggtgggaaggctgcgcatgcccttgcagccttgacaggtctcataaatagcaacatgggaataaatgaaaggactgtattttgcaacgagctttacccgtgcacgcagggggcctccagcaaagccatttggttgcttgctgtcgctcagctggctacgtgtgtttgcgtcgccgcctaa

SEQ ID NO: 101326 - DNA, 819 bp, Homo sapiens
actggtcggcccacggggtaggcggggaggcggaagcgggcggcgctacggctgactgggaaatgtcagccgctggactgtagacggattttcctttctcgggagcccgcaggccttctggtgatcgccagcgctgtcgtctctgagcgtggatcccagaacctggacagctgtggcggccgccgtttcccggtcccgtccagacgctgtctggcgagatcggacggtgagcctaaggcggaacgcgtgaggcgcttttgagtctggggtccggggccgagagcaggcggaaagagaggggacccggcagaccccgagtggccgccgctgcggggcccaagtccttggctgctgagtggtgacagtagcccagcccgccggccagatatggtccagacctgtacatgaataactttggttagtcagagtgaaatattcaataatgagtggtgcagctttgggacttgagattgtttttgtcttttttctggcattatttctacttcatcgatatggagactttaagaaacagcatagacttgtgattattggaacactgcttgcttggtatctctgctttcttattgtcttcatactgcctctggatgttagtacgacaatatacaaccggtgcaagcatgctgctgcaaattcaagccctcctgagaatagcaacattacaggattgtacgcaactgctaaccctgttccaagccagcatccttgtttcaagccatggagttacattcctgatggaatcatgccaattttctggagggtagtgtattggacgtcacaatttttaacatggtaagttac

SEQ ID NO: 101327 - DNA, 1124 bp, Homo sapiens
actggtcggcccacggggtaggcggggaggcggaagcgggcggcgctacggctgactgggaaatgtcagccgctggactgtagacggattttcctttctcgggagcccgcaggccttctggtgatcgccagcgctgtcgtctctgagcgtggatcccagaacctggacagctgtggcggccgccgtttcccggtcccgtccagacgctgtctggcgagatcggacggtgagcctaaggcggaacgcgtgaggcgcttttgagtctggggtccggggccgagagcaggcggaaagagaggggacccggcagaccccgagtggccgccgctgcggggcccaagtccttggctgctgagtggtgacagtagcccagcccgccggccagatatggtccagacctgtacatgaataactttggttagtcagagtgaaatattcaataatgagtggtgcagctttgggacttgagattgtttttgtcttttttctggcattatttctacttcatcgatatggagaacaatatacaaccggtgcaagcatgctgctgcaaattcaagccctcctgagaatagcaacattacaggattgtacgcaactgctaaccctgttccaaggtatttcctttttttaaaaaaatatataaacattgtaggggacacattgtttaaaaattgaaagtttttaccatccagactttatatttatgtaagttatcctcattctctactaattctccccacctctattctttcctagtagacttttcattacatcatattctaattaaatctaatttttaatatttattggtccacaaagcccttcagtagacggtagtgagaaacttgaagaagtcctgattttttagtcctggttcttctttaccaagtatgtaatttctaaaacctgtttttcctctcagcctatctcagatttaaaaacgtgggatgtattttcacttttgcctaatttacaaggttataataaagacaagtatttctgaacttatggtattcctttcatattgcacatccttcaaaagcattatagatttacataaaaaattaataaagttcaaattgtccaaagattatattgaattcatatcgaacttttaagta

SEQ ID NO: 101328 - DNA, 280 bp, Homo sapiens
catctttaccccctttgtgatcttacatatgggagaactgaggcacagaaataagttaggacagccagcaaacttgcatcagtataaatacaaagaagggaagggaggaacatgcttgaaaggggtgtgctggtctcagagggttaggtttctcagttggctgggcatcagctggccatgctttagttatttgatgggaggaaaaataagtgggaggtgaggagtaactcctgggctctgatgagtattctaggcaagtacagatctggaaagcctgtat

SEQ ID NO: 101329 - DNA, 395 bp, Homo sapiens
aaatggggtctcgctgcatcacccaggctgtagtgcagtggcgtgatcatgtctcactgcagccttgacctccccaggctcaggtggtcctcacaccttagcgacctgagtagctgggaccacaggtgcgtgccaccatgcctggctagctttttgtagacacagggttttgccatgtttcccaggctggtcccaaactcctagactcaagtgatctgcccaccttgttctcccaaagtgctaggattacaggcgcgagccaccattcccggcccctgagtagcttttcttgcaaaggcagaagtatcttttttgggggattttgaagaatgtttttccagacttattgttcctcccatttcctgtatgctatacatgtgtatacacacgtttcc

SEQ ID NO: 101330 - DNA, 193 bp, Homo sapiens
caagagttctagtctctccatatcctccataaatcatttgtcatttcctggggttattttgtttttttcttgtttgtagtatattttcccataacttcacttaccgtcatccttgaatcttaaactagttatatagttcagctctgcaaaatcaagttacctcatagcctagtcagaaatagaaacaagttcc

SEQ ID NO: 101331 - DNA, 285 bp, Homo sapiens
tcacctgtgaagatggtaattcctaccagtgctacagatgtcactgcaaatggacaagccaagtctagaagacgctaggtcgggattggacagccagaggctggaagatgattctaagaccaatgaaacagaaagggaagcatatcacaaaccagagccagacactctgctaggttctgaggattcagagaatgaattatttcctttccactaagaagtcggttagaacttcaatcgagagaacacacagagcaaactgggtgatcaacctgccttgtgaaaaca

SEQ ID NO: 101332 - DNA, 273 bp, Homo sapiens
aactcctgttcctcatcctgctcctgccagtctgatgtcaccacaatttgattacctctgggccagagagctcactacctaccatgcaggtattttgactcatctctcattgtttttctccctgcttactctgggggacttgagtcttcattataaacagccctgattttctagcaaagggttaatatttactaacaacataacaatcgcaatagcgactcctatgagttgagcacctgctgtcagtgaggtggtcagctaagtcctgtaatg

SEQ ID NO: 101333 - DNA, 342 bp, Homo sapiens
tttttaaacacctgtctaaatttttaaacaccttgactaaattatttaatatttctgttccagtttccttatttgcaaaatgaggataattgtactaattgtgagaattaagtgattatgcatgtaaagtgtttgcagcagtgtacttaccagacaagtgccccaaaaatgtttgtcttatctactttaattccctgtaaataccttgcttttggcctggtgctgtggctcatgcctggggtcccagcaccttgggaggctgaggcaggaggatcgcttgagcccagtagttggagaccagcctaggcaacatagtgagaccttgtctctagaaaaaaataa

SEQ ID NO: 101334 - DNA, 130 bp, Homo sapiens
aggcagaacccaacgagggccctgggacagcctggagggagtttcagaagacgaatagatagtaggacagaggggaagccgtgtcttctctaggtgcttgtctctagaatctggccagcacctgtcatat

SEQ ID NO: 101335 - DNA, 349 bp, Homo sapiens
aaagtgctgggattacaggcatgagccaccgcacccagccagcatttataattttaacataatggctaatactcacgaggggaagagatttttgaacatttttaaataatagagacagagtcttgctgtgttgcccaggctggtcttgaacgcttgactttgagccatcctcccaccttcgcctcccaaagtgctgggattgtaggcgtgaaccattgcacctggccctggggaagggatttttgtatttattaagcgtttagtacgtatcattgctttatagccctgttattctatggtctctacaataaccttattcatttagtttttcttctttcaacaaagaatt

SEQ ID NO: 101336 - DNA, 186 bp, Homo sapiens
taaattcgcggccgcgtcgacccaggatggtctcaatctcctgaccccatgatcctcccccactcagcctcccaaagcactgggattacaggcatgagccaccacgcccagcccttctaaagtattttaaattctagttttccaaagatgggaatgtgaattgtcttgtaaagtataaccgtctcc

SEQ ID NO: 101337 - DNA, 408 bp, Homo sapiens
gtcagggctatgttagttctactgggagaccacaaaatgacatggtccatcctcctccttatccaaagatgcatggttaaaataatatagattaggaatcatcgttacctccaaacagttaattcaattcaaatttttagcccagactggtttttaaagacattttctgccaaaattttttggaagtaaacacattaagggtaggtgtggagaacgattaatggattcatttttatactcacatctgttttggaaatatattttatgcaataaagcataaactaacaggtatacttataaatgtctggttttagaaacactaaaagatctccaatcttagaagccttaatttgaaattctgctttatcgcctgaactagtgactaactgtatagcatctcatgaagtg

SEQ ID NO: 101338 - DNA, 402 bp, Homo sapiens
actgcgcacctgcaacactgcttacacttgatacacttatgagatgtgcgtgatctctgactttccccttccttccagaattatcttttcatctcgattagatgctttctaactgtaatgaactgtggttaactcctgatagtcatccgccctgacgtgtttagtccaagctggttgtagaagatactatccctttctgacaatcagtagttgccatggaaatgaatgggatgtcacccaaacaacacttttggccaaaatattagattctatccttacctgatggtccagcctcagttcatctcagctggtctcctttgaaactatcaaagcaaatgctctctattttttccagtgagaaacatataccacgaatgaaacatttttgggtcctgatcatgt

SEQ ID NO: 101339 - DNA, 275 bp, Homo sapiens
tcggccttcaaaagtgctggggttacaggcgtgagccaccgtgcccagcccatccacactttttttgtgagttttacctccagggccttgaccaagatcccacagtgaatattggagaaaaatccccatgtgcttctggcaagggggccagaagggaaccattttgaaatacatcagtcagggcattctgttcttgacaaggccctaccctcagtagaaagtgaccagagcctgactgacctgatggaagggaaagaaccaactctagccagccc

SEQ ID NO: 101340 - DNA, 320 bp, Homo sapiens
ctgactatacgacatcccatacatgggacagacctaatacaatgaatctgaggaggctactcagatagacagtcccaccctcacacgattctttacctttcacttcatctgcccttcattattgcagccctagcagcactccacctcctattctagcacgaagcgggatcaaacaaccccctaggaatcacctcccattccgataaaatcaccttccacccttactacacaatcaaagacgcattcggggagggtgggaggggactcccagggagcggggcttgtgctggactttgcaggatgccagacttttggcaggg

SEQ ID NO: 101341 - DNA, 781 bp, Homo sapiens
ggaaatttcactgttatgagtaactaatctactttaagcagtgggtgagggtgcgtgtatccatgcatatgctaacgtgtgtgtagtagtattttcactacttggcatgcacctaaaatatgtatttgcaacatcatatttttactgttatttactgaacacctggtgcttgtacaacctgtcctaagtgctcaagaaacataaattgtgatctctgttgtaaagagccagccagcacatctgggaaacaaaacataacatgtttccttctctcagccaattgagagaaggaaaaccccgggccaaaccgagcaggaggtgcaatagtgaccattataggcattcagaagaagggaaataaagtctccaggagaagatgggtctttggatgtagaagagtgagatatctgagaaaaaaagagagcaaagactcaggagccggaaggccatggggagtttgcttagcacctggcctctgtggaggtcaaagcaatttcctcccaccttcatttttctatagtctgctagggtctcggaatatttatcgtgagtaaggatatcttatttcagagagaggacaatcaaggtgctgagatttttaaaggagggttcagataaaagtaaattaagctggccaggcatggtggcttaagcctgtaatcccagtgctttgggaggccgaggcaggtggatcacaatgtcaggagatcgacaccatcctggctaacacagtgaaaccccatctttactaaaaacaaacagaaaaaattagccaggtgtg

SEQ ID NO: 101342 - DNA, 401 bp, Homo sapiens
gcgtgagccaccgcgcctgacccataagcaccagttttacctgaaaagtaactactgggaaacttcaagttcctggtggtgaattcaaattttccaaaattccaattgccacttgaaagaaaatgacttttatcattggcaacaaatactgttagaagttctttcttgtaatgccaagttccattcattcacttttgagaaaatgtctgccagatacccaagtcttaatatgttcattcaacatatttcagcatatgtctgtcagccattttattcaagtaaaaattgtattccatgaaaaaagtagccaggtcagctttacggctgaattgagtgcttgtcctcagaacaacagtcctatttccatatgcagcagacatgtactctgactgtgaacgatt

SEQ ID NO: 101343 - DNA, 187 bp, Homo sapiens
gcagcagtgtcagggaatccatactctttattttaattcagcccatgtcgaagctatttagtttgagaaagatacacttaaccatcacaaaagcagcctggaccgcgggagggcttttgaatcatcttttcaaggcaaaatagctttcggaatatccaaatggctaattttgtccctaatgttaccg

SEQ ID NO: 101344 - DNA, 2316 bp, Homo sapiens
cgggagcgtgcgaggagctggctcggttatttcggagcgagagccgaggccgggggaagttcctgcggagtgctcaagggcagaagaggtgccgcgtcccgaagaggggaagcggagaagtttgctgctgcccgggtcgcctcgcgacgctgagagaatcgcccagccctccgcagccgcccagcgagaaccggagctgcggccccgcaccggcgtgagtccagctgagctgacacgccgagccggttgtgcctttccgagggaggaatgtgccgtggaatccaaactttggaaaacgtcccacccgaattcccagcgagcagcaaggagaccagagcgtcgatggagccaccgttagttgcgggagggctgtccccaagaggaattcatcactgtcgtccgctgggagggaccaaccttgaaatggggttggtggagagagggatagagaagagccggcgtgcttataaataacaaaacttagctatgaacccttccgattcccaagtggggaagatggggtaaaattctaagtgacttctcgctccgaagagggataccacaaaaagcggagcgcagggtacttggcgtataataagccatcaataatttatgggtgaaattgagagccaaatataagatgataaactgaagaataaaaacagctgacaaatactgtatagaaaagattgcgttggaatcataactgtggattggaagtgatgttaaggattattggattgagtatttgtagctgaatttctgctggcatttctatcagtggggaaagccctcacagctccataggtaatttttgttaggggaggaagaagtgttgttctgtcacccacccccaggcaaagagtcgctgatctaattctccatttctttctttctttcctttctttctttccttccttccttccttccttccttccttccttccttccttccttccctccctccctttcctttcctttcctttcctttctttcctttctttctttgaaacggagtttcgttcttgttgcccgcgctggagtgcagtgcagtgctgtgatctcggctcattgcaacttccacctcccgggttcgagggatcctcctgcctcagcctcccaagtagctgggattacaggcgcacgccaccgcacccgggtaattttgtatttttaatagagacggggtttcaccatgttggccaggctgtttgaactcctgacctcaagtgatccgcccgcctcggcctctcaaagtgctgggattacaggcgtgagccaccaagtcctgcctaatctcctttttatagttgaggaaagctagtaacttgactgaagtctcatatattagagctgtaactgaagtttttaagtgtctcaattctgcaactattcgtttttctatcacatcactgtttggcatatatatagcgggaaaaggaaaggctggaaattagttgaccacacactgattaagcttgaaacatatttctactggagaaaaaaaggtactgtaattttggcataggcatcacatattgctggagtggaaagacccatgcactcaggtcctgctttctataatctgtgacctcgggccagtcactccatttctcctgaactagatcactgatgatctgttgaaagaaaaaatatggctagtaatgccttaattatctcacagaggttttacatggagcaaaaagacaatgtatttttaaatgtactttgttgaaggtgtgtgttgtcgagacaatacagcagtgaagagaaggcatgcaaagctgtcttgttggagtctggctaaagagcaccaaagcagcctgttgtgggatgtcctctgggggccacctggacttgctatgttaacatggagggactaggcaggggtatgaagaaggaagcccagcagagcaggaggcagcagcaacaatgagagattggttatccatatgacttggatctgtgtccccacccaaatctcatgttgaattgtaatccccaatgttggaggtggggactggtgggaggtgactggatcatgggggtggatttcttatgaatggtttagtaccatccactttgtattgtccccgtggtaatgagtgagttcttaagaaatctggtcattgaaaaatatgtggcacctcctccctctctcttttgctcctgccccggctatatgatgcaatttgtcttcagccatgattgtaagtttcccgaggcctccccagaagctgagcagatgccagcatcatgcttcctgtacagcctgccttccatgagccaattaaacttctttcctttacaaattaca

SEQ ID NO: 101345 - DNA, 528 bp, Homo sapiens
tcacagcataagtgtcctccacatatgatgtacgcctgtaaatagttactgagctcctttgatctggccccacacacagcttcctttggggtctgtcccctgctctccgttacccgcgtggtagccatctgagcactggctcttcctggcttcactctctggcatcaaaacttatcagtcctacatctcagtcttttgcaaggtgacacttatctgattacctaattcacacgaaggtgttaatggtggtaatggcatagtatttattaccccaggggacccagaacggtggtatcaaaacatatcattccccagtggtttaaaactctggtagctttccagggagtccaagtggagtccagtctccttagctgagttcacagggccccgtctgcacgacttggcttctgtcggcttccctagccctgacttcccaagccttagtcatcaccctctctcccacccagggctcagcacagtacctggaacagtcaagccctcaataaatgtttactgagtgcattaaaa

SEQ ID NO: 101346 - DNA, 322 bp, Homo sapiens
ctttagcgtgttacagctgttcagctgtatcaggccctttattcttctgttttcttctagcaggagccatgttaaaggctcactcaccccttctccccatgatccttcttaaaatatccactttaaaagggaattgttatggaagaggtacaattgttagaataatcttctggtacagtagaaagctgggaggcttctgggctcttttctggcctttacaaactttgagccttaagcattttacttctctgaagctcaatttgctcttgatcagaagagcagagtaactgtggttctccgacagccgtgagagtcccgtgag

SEQ ID NO: 101347 - DNA, 194 bp, Homo sapiens
cctctgggcccctcaacccctacacttccttctaacacagccctgacttcatggggctgtcactgggtgttcatagatttgtcacccctactacattgaactcctggagggcagacagggccaagtgcccccttgtattccccagtgaccagcacaggatttggcctgctagagaagtctaaaaccttgattcc

SEQ ID NO: 101348 - DNA, 430 bp, Homo sapiens
tgaaacattcaagcaagagaatataataaaacaaacaaattcaatgtgatttttcattttcttaccgtttgctctgtttgttgaatgtcttttgctgtggttttcaccgaagcatttgacaggtcacacatggagcaaaggagatctaggtaggtccttgcctgctcttgcaaagctctgaagtgtttgacctggaaaaggcagttatcagagtgaaagagatgcatcagctatttagatagcaaatacttgtatcatttggaatattctgttgacatttcaaaaatagtcttgctatgctcagtgttttcaccattgtgttcaagtgacatatattagtgactcacaggaaaaaatttaaatcaccaatggggatttatttgtccaccatttgcttctccttgtaagtaaagtattctgtatggtctgg

SEQ ID NO: 101349 - DNA, 859 bp, Homo sapiens
cttcacaatagccaaaatatggaattaactgaaaagtccatcatggataaagaaaatgtggtatacaaaatggaatactattcaattataagaagaatgaaatcctgtcatttgcatcaacatggatggaactggaggtcattatgttaagtgaaaaaagccatgtgatgtcccgctcctgctttgccttatgccatgattggaagcttcctgagaccactccagaagcagatgccactatgtttcctatacagcctgcagaactctgagccaatgaaacctcttttcatataaattacccagtctcacatatttctttatagcagtgcaagaatggtgtcatacaccttggttggaagacagtgagatttctggaaccgttccctgaactggaatcttcaagtaattatttactctcaatcctcataacctgactggctaccaataataggacgttaaatcctacttcttagctgtttctgccatgccatacaaacctggatcaggctttttatcatctcagtctggactataaatcctctctgcttctgcttctctctgctctcatccatttttcaaacttgggaaaataaaactctttttttctgctaaggtttttttttaaattattattatactttaagttttagggtacatgtgcacaatgtgcaggttagttacatatgtatacatgtgccatgcaggttagctcagttggttagagcatggtgctaataaaaattttattgaaagcatacttgtccaaaggcaatgtcctaacttactagtttgcattcaaattcttctctaatcaatctctaacaatattttagttttttctattgccatattcctacca

SEQ ID NO: 101350 - DNA, 2576 bp, Homo sapiens
gggctcgggcgtgcggaggacccggagctaaggcgcccgaacccgcggcggcggtggggacgatgtggttctttgcccgggacccggtccgggactttccgttcgagctcatcccggagcccccagagggcggcctgcccgggccctgggccctgcaccgcggccgcaagaaggccacaggcagccccgtgtccatcttcgtctatgatgtgaagcctggcgcggaagagcagacccaggtggccaaagctgccttcaagcgcttcaaaactctacggcaccccaacatcctggcttacatcgatggactggagacagaaaaatgcctccacgtcgtgacagaggctgtgaccccgttgggaatatacctcaaggcgagagtggaggctggtggcctgaaggagctggagatctcctgggggctacaccagatcgtgaaagccctcagcttcctggtcaacgactgcagcctcatccacaacaatgtctgcatggccgccgtgttcgtggaccgagctggcgagtggaagcttgggggcctggactacatgtattcggcccagggcaacggtgggggacctccccgcaaggggatccccgagcttgagcagtatgaccccccggagttggctgacagcagtggcagagtggtcagagagaagtggtcagcagacatgtggcgcttgggctgcctcatttgggaagtcttcaatgggcccctacctcgggcagcagccctacgcaaccctgggaagatccccaaaacgctggtgccccattactgtgagctggtgggagcaaaccccaaggtgcgtcccaacccagcccgcttcctgcagaactgccgggcacctggtggcttcatgagcaaccgctttgtagaaaccaacctcttcctggaggagattcagatcaaagagccagccgagaagcaaaaattcttccaggagctgagcaagagcctggacgcattccctgaggatttctgtcggcacaaggtgctgccccagctgctgaccgccttcgagttcggcaatgctggggccgttgtcctcacgcccctcttcaaggtgggcaagttcctgagcgctgaggagtatcagcagaagatcatccctgtggtggtcaagatgttctcatccactgaccgggccatgcgcatccgcctcctgcagcagatggagcagttcatccagtaccttgacgagccaacagtcaacacccagatcttcccccacgtcgtacatggcttcctggacaccaaccctgccatccgggagcagacggtcaagtccatgctgctcctggccccaaagctgaacgaggccaacctcaatgtggagctgatgaagcactttgcacggctacaggccaaggatgaacagggccccatccgctgcaacaccacagtctgcctgggcaaaatcggctcctacctcagtgctagcaccagacacagggtccttacctctgccttcagccgagccactagggacccgtttgcaccgtcccgggttgcgggtgtcctgggctttgctgccacccacaacctctactcaatgaacgactgtgcccagaagatcctgcctgtgctctgcggtctcactgtagatcctgagaaatccgtgcgagaccaggccttcaaggccattcggagcttcctgtccaaattggagtctgtgtcggaggacccgacccagctggaggaagtggagaaggatgtccatgcagcctccagccctggcatgggaggagccgcagctagctgggcaggctgggccgtgaccggggtctcctcactcacctccaagctgatccgttcgcacccaaccactgccccaacagaaaccaacattccccaaagacccacgcctgaaggccactgggagacgcaggaggaggacaaggacacagcagaggacagcagcactgctgacagatgggacgacgaagactggggcagcctggagcaggaggccgagtctgtgctggcccagcaggacgactggagcaccgggggccaagtgagccgtgctagtcaggtcagcaactccgaccacaaatcctccaaatccccagagtccgactggagcagctgggaagctgagggctcctgggaacagggctggcaggagccaagctcccaggagccacctcctgacggtacacggctggccagcgagtataactggggtggcccagagtccagcgacaagggcgaccccttcgctaccctgtctgcacgtcccagcacccagccgaggccagactcttggggtgaggacaactgggagggcctcgagactgacagtcgacaggtcaaggctgagctggcccggaagaagcgcgaggagcggcggcgggagatggaggccaaacgcgccgagaggaaggtggccaagggccccatgaagctgggagcccggaagctggactgaaccgtggcggtggcccttcccggctgcggagagcccgccccacagatgtatttattgtacaaaccatgtgagcccggccggcccagccaggccatctcacgtgtacataatcagagccacaataaattctatttcaca

SEQ ID NO: 101351 - DNA, 2627 bp, Homo sapiens
gggctcgggcgtgcggaggacccggagctaaggcgcccgaacccgcggcggcggtggggacgatgtggttctttgcccgggacccggtccgggactttccgttcgagctcatcccggagcccccagagggcggcctgcccgggccctgggccctgcaccgcggccgcaagaaggccacaggcagccccgtgtccatcttcgtctatgatgtgaagcctggcgcggaagagcagacccaggtggccaaagctgccttcaagcgcttcaaaactctacggcaccccaacatcctggcttacatcgatggactggagacagaaaaatgcctccacgtcgtgacagaggctgtgaccccgttgggaatatacctcaaggcgagagtggaggctggtggcctgaaggagctggagatctcctgggggctacaccagatcgtgaaagccctcagcttcctggtcaacgactgcagcctcatccacaacaatgtctgcatggccgccgtgttcgtggaccgagctggcgagtggaagcttgggggcctggactacatgtattcggcccagggcaacggtgggggacctccccgcaaggggatccccgagcttgagcagtatgaccccccggagttggctgacagcagtggcagagtggtcagagagaagtggtcagcagacatgtggcgcttgggctgcctcatttgggaagtcttcaatgggcccctacctcgggcagcagccctacgcaaccctgggaagatccccaaaacgctggtgccccattactgtgagctggtgggagcaaaccccaaggtgcgtcccaacccagcccgcttcctgcagaactgccgggcacctggtggcttcatgagcaaccgctttgtagaaaccaacctcttcctggaggagattcagatcaaagagccagccgagaagcaaaaattcttccaggagctgagcaagagcctggacgcattccctgaggatttctgtcggcacaaggtgctgccccagctgctgaccgccttcgagttcggcaatgctggggccgttgtcctcacgcccctcttcaaggtgggcaagttcctgagcgctgaggagtatcagcagaagatcatccctgtggtggtcaagatgttctcatccactgaccgggccatgcgcatccgcctcctgcagcagatggagcagttcatccagtaccttgacgagccaacagtcaacacccagatcttcccccacgtcgtacatggcttcctggacaccaaccctgccatccgggagcagacggtcaagtccatgctgctcctggccccaaagctgaacgaggccaacctcaatgtggagctgatgaagcactttgcacggctacaggccaaggatgaacagggccccatccgctgcaacaccacagtctgcctgggcaaaatcggctcctacctcagtgctagcaccagacacagggtccttacctctgccttcagccgagccactagggacccgtttgcaccgtcccgggttgcgggtgtcctgggctttgctgccacccacaacctctactcaatgaacgactgtgcccagaagatcctgcctgtgctctgcggtctcactgtagatcctgagaaatccgtgcgagaccaggccttcaaggccattcggagcttcctgtccaaattggagtctgtgtcggaggacccgacccagctggaggaagtggagaaggatgtccatgcagcctccagccctggcatgggaggagccgcagctagctgggcaggctgggccgtgaccggggtctcctcactcacctccaagctgatccgttcgcacccaaccactgccccaacagaaaccaacattccccaaagacccacgcctgaaggagttcctgccccagcccccacccctgttcctgccacccctacaacctcaggccactgggagacgcaggaggaggacaaggacacagcagaggacagcagcactgctgacagatgggacgacgaagactggggcagcctggagcaggaggccgagtctgtgctggcccagcaggacgactggagcaccgggggccaagtgagccgtgctagtcaggtcagcaactccgaccacaaatcctccaaatccccagagtccgactggagcagctgggaagctgagggctcctgggaacagggctggcaggagccaagctcccaggagccacctcctgacggtacacggctggccagcgagtataactggggtggcccagagtccagcgacaagggcgaccccttcgctaccctgtctgcacgtcccagcacccagccgaggccagactcttggggtgaggacaactgggagggcctcgagactgacagtcgacaggtcaaggctgagctggcccggaagaagcgcgaggagcggcggcgggagatggaggccaaacgcgccgagaggaaggtggccaagggccccatgaagctgggagcccggaagctggactgaaccgtggcggtggcccttcccggctgcggagagcccgccccacagatgtatttattgtacaaaccatgtgagcccggccggcccagccaggccatctcacgtgtacataatcagagccacaataaattctatttcaca

SEQ ID NO: 101352 - DNA, 439 bp, Homo sapiens
ccacatgtgtatagtgaggagcatctgggtgcactggcctgcagggttgctgtagggaggagggaggaaggctctgctctatgcaatgcccggccccagccgtgtgtggggaagacagcgggggctgagaatcagaatcaggagcaggggaggagagtggcagacactccacagaccctgacccagcagaggtcatggaatcttgactcagatgctgtggggcggggagatggaggccaaacgcgccgagaggaaggtggccaagggccccatgaagctgggagcccggaagctggactgaaccgtggcggtggcccttcccggctgcggagagcccgccccacagatgtatttattgtacaaaccatgtgagcccggccggcccagccaggccatctcacgtgtacataatcagagccacaataaattctatttcaca

SEQ ID NO: 101353 - DNA, 3761 bp, Homo sapiens
gggctcgggcgtgcggaggacccggagctaaggcgcccgaacccgcggcggcggtggggacgatgtggttctttgcccgggacccggtccgggactttccgttcgagctcatcccggagcccccagagggcggcctgcccgggccctgggccctgcaccgcggccgcaagaaggccacaggcagccccgtgtccatcttcgtctatgatgtgaagcctggcgcggaagagcagacccaggtggccaaagctgccttcaagcgcttcaaaactctacggcaccccaacatcctggcttacatcgatggactggagacagaaaaatgcctccacgtcgtgacagaggctgtgaccccgttgggaatatacctcaaggcgagagtggaggctggtggcctgaaggagctggagatctcctgggggctacaccagatcgtgaaagccctcagcttcctggtcaacgactgcagcctcatccacaacaatgtctgcatggccgccgtgttcgtggaccgagctggcgagtggaagcttgggggcctggactacatgtattcggcccagggcaacggtgggggacctccccgcaaggggatccccgagcttgagcagtatgaccccccggagttggctgacagcagtggcagagtggtcagagagaagtggtcagcagacatgtggcgcttgggctgcctcatttgggaagtcttcaatgggcccctacctcgggcagcagccctacgcaaccctgggaagatccccaaaacgctggtgccccattactgtgagctggtgggagcaaaccccaaggtgcgtcccaacccagcccgcttcctgcagaactgccgggcacctggtggcttcatgagcaaccgctttgtagaaaccaacctcttcctggaggagattcagatcaaagagccagccgagaagcaaaaattcttccaggagctgagcaagagcctggacgcattccctgaggatttctgtcggcacaaggtgctgccccagctgctgaccgccttcgagttcggcaatgctggggccgttgtcctcacgcccctcttcaaggtgggcaagttcctgagcgctgaggagtatcagcagaagatcatccctgtggtggtcaagatgttctcatccactgaccgggccatgcgcatccgcctcctgcagcagatggagcagttcatccagtaccttgacgagccaacagtcaacacccagatcttcccccacgtcgtacatggcttcctggacaccaaccctgccatccgggagcagacggtcaagtccatgctgctcctggccccaaagctgaacgaggccaacctcaatgtggagctgatgaagcactttgcacggctacaggccaaggatgaacagggccccatccgctgcaacaccacagtctgcctgggcaaaatcggctcctacctcagtgctagcaccagacacagggtccttacctctgccttcagccgagccactagggacccgtttgcaccgtcccgggttgcgggtgtcctgggctttgctgccacccacaacctctactcaatgaacgactgtgcccagaagatcctgcctgtgctctgcggtctcactgtagatcctgagaaatccgtgcgagaccaggccttcaaggccattcggagcttcctgtccaaattggagtctgtgtcggaggacccgacccagctggaggaagtggagaaggatgtccatgcagcctccagccctggcatgggaggagccgcagctagctgggcaggctgggccgtgaccggggtctcctcactcacctccaagctgatccgttcgcacccaaccactgccccaacagaaaccaacattccccaaagacccacgcctgaaggagttcctgccccagcccccacccctgttcctgccacccctacaacctcaggccactgggagacgcaggaggaggacaaggacacagcagaggacagcagcactgctgacagatgggacgacgaagactggggcagcctggagcaggaggccgagtctgtgctggcccagcaggacgactggagcaccgggggccaagtgagccgtgctagtcaggtcagcaactccgaccacaaatcctccaaatccccagagtccgactggagcagctgggaagctgagggctcctgggaacagggctggcaggagccaagctcccaggagccacctcctgacggtacacggctggccagcgagtataactggggtggcccagagtccagcgacaagggcgaccccttcgctaccctgtctgcacgtcccagcacccagccgaggccagactcttggggtgaggacaactgggagggcctcgagactgacagtcgacaggtcaaggctgagctggcccggaagaagcgcgaggagcggcggcgggagatggaggccaaacgcgccgagaggaaggtggccaagggccccatgaagctgggagcccggaagctggactgaaccgtggcggtggcccttcccggctgcggagagcccgccccacagatgtatttattgtacaaaccatgtgagcccggccggcccagccaggccatctcacgtgtacataatcagagccacaataaattctatttcacaccccttgtgccgggctcagtctagcccctgggaggcggctggggtctggcgccgccctgcgcagcccgcgcccacgtcagacgtgaacatcaatttgcttcgaaagccaagggtaaagaggcacgatctgatttatcagtttctaggaaacaccctctgggaggaaggcaggcagcgcccgccggagaccttacaaccgcccgctaaccggggaggggggccggtaggggcgcctcgggtctcaaggcgccgggagggtctgcgggccctgaaggtccctgggtccgagccacaagtcggggcagaagtgaggccgagctcgcggaaatccctcagtgatcaccgaggtctgggccgagggcggcgtcggcggcgtcagcggcggcgctggggaacgcaggccccgtgcgggcggctgcgcgcgaagccggctttgcagacgcagcggaaggagccgctggtgttcacgcagcgctcgctcttgcacagcagcccgcgctggttcagctctcggcactcgtcgatatccacgcagcgggcgcgggaggcgtcgagctggaagccgccgggacactcgcacacggcgccgcccggccgcggcacgcagcggccactcacgcagcgacactcgtctgaatcctcctctgaactgtcctcatctcttgggggctttccccaacagcagggggcttgtgtcccagaaggaattgctctcgctctgcgatgtcgggcaatgggaccccgcgccgcgcggcgggcacggtcggcattgggcgccccagccgcggccctggcggcagcagcagtcgtcgaaggtgagggcaggcccggccagggggccagcgcacatgccgtcctctccgcgctggctccagcacacgtcgcgccgctccggggcacgctccatctcttccgggctcaggcactggcgctgcgcgggactgtactcggcagggggcgtgcaggcacagcggtagccccgcgcgtgttctcacacactccgttccggcagttggactcgtccaggcactcgtccacgtccacgcattccagcaggttcccgtcgtagtagaagccctgcttgcagtagcactcgtagccaggctgcgtgttcacgcacttgccctccttgca

SEQ ID NO: 101354 - DNA, 3794 bp, Homo sapiens
gggctcgggcgtgcggaggacccggagctaaggcgcccgaacccgcggcggcggtggggacgatgtggttctttgcccgggacccggtccgggactttccgttcgagctcatcccggagcccccagagggcggcctgcccgggccctgggccctgcaccgcggccgcaagaaggccacaggcagccccgtgtccatcttcgtctatgatgtgaagcctggcgcggaagagcagacccaggtggccaaagctgccttcaagcgcttcaaaactctacggcaccccaacatcctggcttacatcgatggactggagacagaaaaatgcctccacgtcgtgacagaggctgtgaccccgttgggaatatacctcaaggcgagagtggaggctggtggcctgaaggagctggagatctcctgggggctacaccagatcgtgaaagccctcagcttcctggtcaacgactgcagcctcatccacaacaatgtctgcatggccgccgtgttcgtggaccgagctggcgagtggaagcttgggggcctggactacatgtattcggcccagggcaacggtgggggacctccccgcaaggggatccccgagcttgagcagtatgaccccccggagttggctgacagcagtggcagagtggtcagagagaagtggtcagcagacatgtggcgcttgggctgcctcatttgggaagtcttcaatgggcccctacctcgggcagcagccctacgcaaccctgggaagatccccaaaacgctggtgccccattactgtgagctggtgggagcaaaccccaaggtgcgtcccaacccagcccgcttcctgcagaactgccgggcacctggtggcttcatgagcaaccgctttgtagaaaccaacctcttcctggaggagattcagatcaaagagccagccgagaagcaaaaattcttccaggagctgagcaagagcctggacgcattccctgaggatttctgtcggcacaaggtgctgccccagctgctgaccgccttcgagttcggcaatgctggggccgttgtcctcacgcccctcttcaaggtgggcaagttcctgagcgctgaggagtatcagcagaagatcatccctgtggtggtcaagatgttctcatccactgaccgggccatgcgcatccgcctcctgcagcagatggagcagttcatccagtaccttgacgagccaacagtcaacacccagatcttcccccacgtcgtacatggcttcctggacaccaaccctgccatccgggagcagacggtcaagtccatgctgctcctggccccaaagctgaacgaggccaacctcaatgtggagctgatgaagcactttgcacggctacaggccaaggatgaacagggccccatccgctgcaacaccacagtctgcctgggcaaaatcggctcctacctcagtgctagcaccagacacagggtccttacctctgccttcagccgagccactagggacccgtttgcaccgtcccgggttgcgggtgtcctgggctttgctgccacccacaacctctactcaatgaacgactgtgcccagaagatcctgcctgtgctctgcggtctcactgtagatcctgagaaatccgtgcgagaccaggccttcaaggccattcggagcttcctgtccaaattggagtctgtgtcggaggacccgacccagctggaggaagtggagaaggatgtccatgcagcctccagccctggcatgggaggagccgcagctagctgggcaggctgggccgtgaccggggtctcctcactcacctccaagctgatccgttcgcacccaaccactgccccaacagaaaccaacattccccaaagacccacgcctgaaggccactgggagacgcaggaggaggacaaggacacagcagaggacagcagcactgctgacagatgggacgacgaagactggggcagcctggagcaggaggccgagtctgtgctggcccagcaggacgactggagcaccgggggccaagtgagccgtgctagtcaggtcagcaactccgaccacaaatcctccaaatccccagagtccgactggagcagctgggaagctgagggctcctgggaacagggctggcaggagccaagctcccaggagccacctcctgacggtacacggctggccagcgagtataactggggtggcccagagtccagcgacaagggcgaccccttcgctaccctgtctgcacgtcccagcacccaggtacccagcacaggtctggcgagagggtagagatggtggacctcagccagaagtgggccccactgcagcccacacttctctttacagccgaggccagactcttggggtgaggacaactgggagggcctcgagactgacagtcgtaagtgcttcccctgggtgggctgaagactagggctccccgactagcccgcccctacaggcccccggcaggcactggctggagagctgagaccggggctccccttcctgacgccaggacaggtcaaggctgagctggcccggaagaagcgcgaggagcggcggcgggagatggaggccaaacgcgccgagaggaaggtggccaagggccccatgaagctgggagcccggaagctggactgaaccgtggcggtggcccttcccggctgcggagagcccgccccacagatgtatttattgtacaaaccatgtgagcccggccggcccagccaggccatctcacgtgtacataatcagagccacaataaattctatttcacaccccttgtgccgggctcagtctagcccctgggaggcggctggggtctggcgccgccctgcgcagcccgcgcccacgtcagacgtgaacatcaatttgcttcgaaagccaagggtaaagaggcacgatctgatttatcagtttctaggaaacaccctctgggaggaaggcaggcagcgcccgccggagaccttacaaccgcccgctaaccggggaggggggccggtaggggcgcctcgggtctcaaggcgccgggagggtctgcgggccctgaaggtccctgggtccgagccacaagtcggggcagaagtgaggccgagctcgcggaaatccctcagtgatcaccgaggtctgggccgagggcggcgtcggcggcgtcagcggcggcgctggggaacgcaggccccgtgcgggcggctgcgcgcgaagccggctttgcagacgcagcggaaggagccgctggtgttcacgcagcgctcgctcttgcacagcagcccgcgctggttcagctctcggcactcgtcgatatccacgcagcgggcgcgggaggcgtcgagctggaagccgccgggacactcgcacacggcgccgcccggccgcggcacgcagcggccactcacgcagcgacactcgtctgaatcctcctctgaactgtcctcatctcttgggggctttccccaacagcagggggcttgtgtcccagaaggaattgctctcgctctgcgatgtcgggcaatgggaccccgcgccgcgcggcgggcacggtcggcattgggcgccccagccgcggccctggcggcagcagcagtcgtcgaaggtgagggcaggcccggccagggggccagcgcacatgccgtcctctccgcgctggctccagcacacgtcgcgccgctccggggcacgctcggccgggctctcggggagctggcaatcgcggccggagggcccgggcacccagggcgggcgacactcgcagcggtaggagcccggcaggttgacgcagcggccagggcggc

SEQ ID NO: 101355 - DNA, 3520 bp, Homo sapiens
ccggccacacaacagctctgggaccatctcaggccccgctgccctcccctaggccacaggcagccccgtgtccatcttcgtctatgatgtgaagcctggcgcggaagagcagacccaggtggccaaagctgccttcaagcgcttcaaaactctacggcaccccaacatcctggcttacatcgatggactggagacagaaaaatgcctccacgtcgtgacagaggctgtgaccccgttgggaatatacctcaaggcgagagtggaggctggtggcctgaaggagctggagatctcctgggggctacaccagatcgtgaaagccctcagcttcctggtcaacgactgcagcctcatccacaacaatgtctgcatggccgccgtgttcgtggaccgagctggcgagtggaagcttgggggcctggactacatgtattcggcccagggcaacggtgggggacctccccgcaaggggatccccgagcttgagcagtatgaccccccggagttggctgacagcagtggcagagtggtcagagagaagtggtcagcagacatgtggcgcttgggctgcctcatttgggaagtcttcaatgggcccctacctcgggcagcagccctacgcaaccctgggaagatccccaaaacgctggtgccccattactgtgagctggtgggagcaaaccccaaggtgcgtcccaacccagcccgcttcctgcagaactgccgggcacctggtggcttcatgagcaaccgctttgtagaaaccaacctcttcctggaggagattcagatcaaagagccagccgagaagcaaaaattcttccaggagctgagcaagagcctggacgcattccctgaggatttctgtcggcacaaggtgctgccccagctgctgaccgccttcgagttcggcaatgctggggccgttgtcctcacgcccctcttcaaggtgggcaagttcctgagcgctgaggagtatcagcagaagatcatccctgtggtggtcaagatgttctcatccactgaccgggccatgcgcatccgcctcctgcagcagatggagcagttcatccagtaccttgacgagccaacagtcaacacccagatcttcccccacgtcgtacatggcttcctggacaccaaccctgccatccgggagcagacggtcaagtccatgctgctcctggccccaaagctgaacgaggccaacctcaatgtggagctgatgaagcactttgcacggctacaggccaaggatgaacagggccccatccgctgcaacaccacagtctgcctgggcaaaatcggctcctacctcagtgctagcaccagacacagggtccttacctctgccttcagccgagccactagggacccgtttgcaccgtcccgggttgcgggtgtcctgggctttgctgccacccacaacctctactcaatgaacgactgtgcccagaagatcctgcctgtgctctgcggtctcactgtagatcctgagaaatccgtgcgagaccaggccttcaaggccattcggagcttcctgtccaaattggagtctgtgtcggaggacccgacccagctggaggaagtggagaaggatgtccatgcagcctccagccctggcatgggaggagccgcagctagctgggcaggctgggccgtgaccggggtctcctcactcacctccaagctgatccgttcgcacccaaccactgccccaacagaaaccaacattccccaaagacccacgcctgaaggagttcctgccccagcccccacccctgttcctgccacccctacaacctcaggccactgggagacgcaggaggaggacaaggacacagcagaggacagcagcactgctgacagatgggacgacgaagactggggcagcctggagcaggaggccgagtctgtgctggcccagcaggacgactggagcaccgggggccaagtgagccgtgctagtcaggtcagcaactccgaccacaaatcctccaaatccccagagtccgactggagcagctgggaagctgagggctcctgggaacagggctggcaggagccaagctcccaggagccacctcctgacggtacacggctggccagcgagtataactggggtggcccagagtccagcgacaagggcgaccccttcgctaccctgtctgcacgtcccagcacccagccgaggccagactcttggggtgaggacaactgggagggcctcgagactgacagtcgacaggtcaaggctgagctggcccggaagaagcgcgaggagcggcggcgggagatggaggccaaacgcgccgagaggaaggtggccaagggccccatgaagctgggagcccggaagctggactgaaccgtggcggtggcccttcccggctgcggagagcccgccccacagatgtatttattgtacaaaccatgtgagcccggccggcccagccaggccatctcacgtgtacataatcagagccacaataaattctatttcacaccccttgtgccgggctcagtctagcccctgggaggcggctggggtctggcgccgccctgcgcagcccgcgcccacgtcagacgtgaacatcaatttgcttcgaaagccaagggtaaagaggcacgatctgatttatcagtttctaggaaacaccctctgggaggaaggcaggcagcgcccgccggagaccttacaaccgcccgctaaccggggaggggggccggtaggggcgcctcgggtctcaaggcgccgggagggtctgcgggccctgaaggtccctgggtccgagccacaagtcggggcagaagtgaggccgagctcgcggaaatccctcagtgatcaccgaggtctgggccgagggcggcgtcggcggcgtcagcggcggcgctggggaacgcaggccccgtgcgggcggctgcgcgcgaagccggctttgcagacgcagcggaaggagccgctggtgttcacgcagcgctcgctcttgcacagcagcccgcgctggttcagctctcggcactcgtcgatatccacgcagcgggcgcgggaggcgtcgagctggaagccgccgggacactcgcacacggcgccgcccggccgcggcacgcagcggccactcacgcagcgacactcgtctgaatcctcctctgaactgtcctcatctcttgggggctttccccaacagcagggggcttgtgtcccagaaggaattgctctcgctctgcgatgtcgggcaatgggaccccgcgccgcgcggcgggcacggtcggcattgggcgccccagccgcggccctggcggcagcagcagtcgtcgaaggtgagggcaggcccggccagggggccagcgcacatgccgtcctctccgcgctggctccagcacacgtcgcgccgctccggggcacgctcggccgggctctcggggagctggcaatcgcggccggagggcccgggcacccagggcgggcgacactcgcagcggtaggagcccggcaggttgacgcagcggccagggcggc

SEQ ID NO: 101356 - DNA, 3581 bp, Homo sapiens
gggctcgggcgtgcggaggacccggagctaaggcgcccgaacccgcggcggcggtggggacgatgtggttctttgcccgggacccggtccgggactttccgttcgagctcatcccggagcccccagagggcggcctgcccgggccctgggccctgcaccgcggccgcaagaaggccacaggcagccccgtgtccatcttcgtctatgatgtgaagcctggcgcggaagagcagacccaggtggccaaagctgccttcaagcgcttcaaaactctacggcaccccaacatcctggcttacatcgatggactggagacagaaaaatgcctccacgtcgtgacagaggctgtgaccccgttgggaatatacctcaaggcgagagtggaggctggtggcctgaaggagctggagatctcctgggggctacaccagatcgtgaaagccctcagcttcctggtcaacgactgcagcctcatccacaacaatgtctgcatggccgccgtgttcgtggaccgagctggcgagtggaagcttgggggcctggactacatgtattcggcccagggcaacggtgggggacctccccgcaaggggatccccgagcttgagcagtatgaccccccggagttggctgacagcagtggcagagtggtcagagagaagtggtcagcagacatgtggcgcttgggctgcctcatttgggaagtcttcaatgggcccctacctcgggcagcagccctacgcaaccctgggaagatccccaaaacgctggtgccccattactgtgagctggtgggagcaaaccccaaggtgcgtcccaacccagcccgcttcctgcagaactgccgggcacctggtggcttcatgagcaaccgctttgtagaaaccaacctcttcctggaggagattcagatcaaagagccagccgagaagcaaaaattcttccaggagctgagcaagagcctggacgcattccctgaggatttctgtcggcacaaggtgctgccccagctgctgaccgccttcgagttcggcaatgctggggccgttgtcctcacgcccctcttcaaggtgggcaagttcctgagcgctgaggagtatcagcagaagatcatccctgtggtggtcaagatgttctcatccactgaccgggccatgcgcatccgcctcctgcagcagatggagcagttcatccagtaccttgacgagccaacagtcaacacccagatcttcccccacgtcgtacatggcttcctggacaccaaccctgccatccgggagcagacggtcaagcactttgcacggctacaggccaaggatgaacagggccccatccgctgcaacaccacagtctgcctgggcaaaatcggctcctacctcagtgctagcaccagacacagggtccttacctctgccttcagccgagccactagggacccgtttgcaccgtcccgggttgcgggtgtcctgggctttgctgccacccacaacctctactcaatgaacgactgtgcccagaagatcctgcctgtgctctgcggtctcactgtagatcctgagaaatccgtgcgagaccaggccttcaaggccattcggagcttcctgtccaaattggagtctgtgtcggaggacccgacccagctggaggaagtggagaaggatgtccatgcagcctccagccctggcatgggaggagccgcagctagctgggcaggctgggccgtgaccggggtctcctcactcacctccaagctgatccgttcgcacccaaccactgccccaacagaaaccaacattccccaaagacccacgcctgaaggagttcctgccccagcccccacccctgttcctgccacccctacaacctcaggccactgggagacgcaggaggaggacaaggacacagcagaggacagcagcactgctgacagatgggacgacgaagactggggcagcctggagcaggaggccgagtctgtgctggcccagcaggacgactggagcaccgggggccaagtgagccgtgctagtcaggtcagcaactccgaccacaaatcctccaaatccccagagtccgactggagcagctgggaagctgagggctcctgggaacagggctggcaggagccaagctcccaggagccacctcctgacggtacacggctggccagcgagtataactggggtggcccagagtccagcgacaagggcgaccccttcgctaccctgtctgcacgtcccagcacccagccgaggccagactcttggggtgaggacaactgggagggcctcgagactgacagtcgacaggtcaaggctgagctggcccggaagaagcgcgaggagcggcggcgggagatggaggccaaacgcgccgagaggaaggtggccaagggccccatgaagctgggagcccggaagctggactgaaccgtggcggtggcccttcccggctgcggagagcccgccccacagatgtatttattgtacaaaccatgtgagcccggccggcccagccaggccatctcacgtgtacataatcagagccacaataaattctatttcacaccccttgtgccgggctcagtctagcccctgggaggcggctggggtctggcgccgccctgcgcagcccgcgcccacgtcagacgtgaacatcaatttgcttcgaaagccaagggtaaagaggcacgatctgatttatcagtttctaggaaacaccctctgggaggaaggcaggcagcgcccgccggagaccttacaaccgcccgctaaccggggaggggggccggtaggggcgcctcgggtctcaaggcgccgggagggtctgcgggccctgaaggtccctgggtccgagccacaagtcggggcagaagtgaggccgagctcgcggaaatccctcagtgatcaccgaggtctgggccgagggcggcgtcggcggcgtcagcggcggcgctggggaacgcaggccccgtgcgggcggctgcgcgcgaagccggctttgcagacgcagcggaaggagccgctggtgttcacgcagcgctcgctcttgcacagcagcccgcgctggttcagctctcggcactcgtcgatatccacgcagcgggcgcgggaggcgtcgagctggaagccgccgggacactcgcacacggcgccgcccggccgcggcacgcagcggccactcacgcagcgacactcgtctgaatcctcctctgaactgtcctcatctcttgggggctttccccaacagcagggggcttgtgtcccagaaggaattgctctcgctctgcgatgtcgggcaatgggaccccgcgccgcgcggcgggcacggtcggcattgggcgccccagccgcggccctggcggcagcagcagtcgtcgaaggtgagggcaggcccggccagggggccagcgcacatgccgtcctctccgcgctggctccagcacacgtcgcgccgctccggggcacgctcggccgggctctcggggagctggcaatcgcggccggagggcccgggcacccagggcgggcgacactcgcagcggtaggagcccggcaggttgacgcagcggccagggcggc

SEQ ID NO: 101357 - DNA, 3587 bp, Homo sapiens
gggctcgggcgtgcggaggacccggagctaaggcgcccgaacccgcggcggcggtggggacgatgtggttctttgcccgggacccggtccgggactttccgttcgagctcatcccggagcccccagagggcggcctgcccgggccctgggccctgcaccgcggccgcaagaaggccacaggcagccccgtgtccatcttcgtctatgatgtgaagcctggcgcggaagagcagacccaggtggccaaagctgccttcaagcgcttcaaaactctacggcaccccaacatcctggcttacatcgatggactggagctcaaggcgagagtggaggctggtggcctgaaggagctggagatctcctgggggctacaccagatcgtgaaagccctcagcttcctggtcaacgactgcagcctcatccacaacaatgtctgcatggccgccgtgttcgtggaccgagctggcgagtggaagcttgggggcctggactacatgtattcggcccagggcaacggtgggggacctccccgcaaggggatccccgagcttgagcagtatgaccccccggagttggctgacagcagtggcagagtggtcagagagaagtggtcagcagacatgtggcgcttgggctgcctcatttgggaagtcttcaatgggcccctacctcgggcagcagccctacgcaaccctgggaagatccccaaaacgctggtgccccattactgtgagctggtgggagcaaaccccaaggtgcgtcccaacccagcccgcttcctgcagaactgccgggcacctggtggcttcatgagcaaccgctttgtagaaaccaacctcttcctggaggagattcagatcaaagagccagccgagaagcaaaaattcttccaggagctgagcaagagcctggacgcattccctgaggatttctgtcggcacaaggtgctgccccagctgctgaccgccttcgagttcggcaatgctggggccgttgtcctcacgcccctcttcaaggtgggcaagttcctgagcgctgaggagtatcagcagaagatcatccctgtggtggtcaagatgttctcatccactgaccgggccatgcgcatccgcctcctgcagcagatggagcagttcatccagtaccttgacgagccaacagtcaacacccagatcttcccccacgtcgtacatggcttcctggacaccaaccctgccatccgggagcagacggtcaagtccatgctgctcctggccccaaagctgaacgaggccaacctcaatgtggagctgatgaagcactttgcacggctacaggccaaggatgaacagggccccatccgctgcaacaccacagtctgcctgggcaaaatcggctcctacctcagtgctagcaccagacacagggtccttacctctgccttcagccgagccactagggacccgtttgcaccgtcccgggttgcgggtgtcctgggctttgctgccacccacaacctctactcaatgaacgactgtgcccagaagatcctgcctgtgctctgcggtctcactgtagatcctgagaaatccgtgcgagaccaggccttcaaggccattcggagcttcctgtccaaattggagtctgtgtcggaggacccgacccagctggaggaagtggagaaggatgtccatgcagcctccagccctggcatgggaggagccgcagctagctgggcaggctgggccgtgaccggggtctcctcactcacctccaagctgatccgttcgcacccaaccactgccccaacagaaaccaacattccccaaagacccacgcctgaaggagttcctgccccagcccccacccctgttcctgccacccctacaacctcaggccactgggagacgcaggaggaggacaaggacacagcagaggacagcagcactgctgacagatgggacgacgaagactggggcagcctggagcaggaggccgagtctgtgctggcccagcaggacgactggagcaccgggggccaagtgagccgtgctagtcaggtcagcaactccgaccacaaatcctccaaatccccagagtccgactggagcagctgggaagctgagggctcctgggaacagggctggcaggagccaagctcccaggagccacctcctgacggtacacggctggccagcgagtataactggggtggcccagagtccagcgacaagggcgaccccttcgctaccctgtctgcacgtcccagcacccagccgaggccagactcttggggtgaggacaactgggagggcctcgagactgacagtcgacaggtcaaggctgagctggcccggaagaagcgcgaggagcggcggcgggagatggaggccaaacgcgccgagaggaaggtggccaagggccccatgaagctgggagcccggaagctggactgaaccgtggcggtggcccttcccggctgcggagagcccgccccacagatgtatttattgtacaaaccatgtgagcccggccggcccagccaggccatctcacgtgtacataatcagagccacaataaattctatttcacaccccttgtgccgggctcagtctagcccctgggaggcggctggggtctggcgccgccctgcgcagcccgcgcccacgtcagacgtgaacatcaatttgcttcgaaagccaagggtaaagaggcacgatctgatttatcagtttctaggaaacaccctctgggaggaaggcaggcagcgcccgccggagaccttacaaccgcccgctaaccggggaggggggccggtaggggcgcctcgggtctcaaggcgccgggagggtctgcgggccctgaaggtccctgggtccgagccacaagtcggggcagaagtgaggccgagctcgcggaaatccctcagtgatcaccgaggtctgggccgagggcggcgtcggcggcgtcagcggcggcgctggggaacgcaggccccgtgcgggcggctgcgcgcgaagccggctttgcagacgcagcggaaggagccgctggtgttcacgcagcgctcgctcttgcacagcagcccgcgctggttcagctctcggcactcgtcgatatccacgcagcgggcgcgggaggcgtcgagctggaagccgccgggacactcgcacacggcgccgcccggccgcggcacgcagcggccactcacgcagcgacactcgtctgaatcctcctctgaactgtcctcatctcttgggggctttccccaacagcagggggcttgtgtcccagaaggaattgctctcgctctgcgatgtcgggcaatgggaccccgcgccgcgcggcgggcacggtcggcattgggcgccccagccgcggccctggcggcagcagcagtcgtcgaaggtgagggcaggcccggccagggggccagcgcacatgccgtcctctccgcgctggctccagcacacgtcgcgccgctccggggcacgctcggccgggctctcggggagctggcaatcgcggccggagggcccgggcacccagggcgggcgacactcgcagcggtaggagcccggcaggttgacgcagcggccagggcggc

SEQ ID NO: 101358 - DNA, 3186 bp, Homo sapiens
gggctcgggcgtgcggaggacccggagctaaggcgcccgaacccgcggcggcggtggggacgatgtggttctttgcccgggacccggtccgggactttccgttcgagctcatcccggagcccccagagggcggcctgcccgggccctgggccctgcaccgcggccgcaagaaggccacaggcagccccgtgtccatcttcgtctatgatgtgaagcctggcgcggaagagcagacccaggtggccaaagctgccttcaagcgcttcaaaactctacggcaccccaacatcctggcttacatcgatggactggagacagaaaaatgcctccacgtcgtgacagaggctgtgaccccgttgggaatatacctcaaggcgagagtggaggctggtggcctgaaggagctggagatctcctgggggctacaccagatcgtgaaagccctcagcttcctggtcaacgactgcagcctcatccacaacaatgtctgcatggccgccgtgttcgtggaccgagctggcgagtggaagcttgggggcctggactacatgtattcggcccagggcaacggtgggggacctccccgcaaggggatccccgagcttgagcagtatgaccccccggagttggctgacagcagtggcagagtggtcagagagaagtggtcagcagacatgtggcgcttgggctgcctcatttgggaagtcttcaatgggcccctacctcgggcagcagccctacgcaaccctgggaagatccccaaaacgctggtgccccattactgtgagctggtgggagcaaaccccaaggtgcgtcccaacccagcccgcttcctgcagaactgccgggcacctggtggcttcatgagcaaccgctttgtagaaaccaacctcttcctggaggagattcagatcaaagagccagccgagaagcaaaaattcttccaggagctgagcaagagcctggacgcattccctgaggatttctgtcggcacaaggtgctgccccagctgctgaccgccttcgagttcggcaatgctggggccgttgtcctcacgcccctcttcaaggtgggcaagttcctgagcgctgaggagtatcagcagaagatcatccctgtggtggtcaagatgttctcatccactgaccgggccatgcgcatccgcctcctgcagcagatggagcagttcatccagtaccttgacgagccaacagtcaacacccagatcttcccccacgtcgtacatggcttcctggacaccaaccctgccatccgggagcagacggtcaagtccatgctgctcctggccccaaagctgaacgaggccaacctcaatgtggagctgatgaagcactttgcacggctacaggccaaggatgaacagggccccatccgctgcaacaccacagtctgcctgggcaaaatcggctcctacctcagtgctagcaccagacacagggtccttacctctgccttcagccgagccactagggacccgtttgcaccgtcccgggttgcgggtgtcctgggctttgctgccacccacaacctctactcaatgaacgactgtgcccagaagatcctgcctgtgctctgcggtctcactgtagatcctgagaaatccgtgcgagaccaggccttcaaggccattcggagcttcctgtccaaattggagtctgtgtcggaggacccgacccagctggaggaagtggagaaggatgtccatgcagcctccagccctggcatgggaggagccgcagctagctgggcaggctgggccgtgaccggggtctcctcactcacctccaagctgatccgttcgcacccaaccactgccccaacagaaaccaacattccccaaagacccacgcctgaaggagttcctgccccagcccccacccctgttcctgccacccctacaacctcaggccactgggagacgcaggaggaggacaaggacacagcagaggacagcagcactgctgacagatgggacgacgaagactggggcagcctggagcaggaggccgagtctgtgctggcccagcaggacgactggagcaccgggggccaagtgagccgtgctagtcaggtcagcaactccgaccacaaatcctccaaatccccagagtccgactggagcagctgggaagctgagggctcctgggaacagggctggcaggagccaagctcccaggagccacctcctgacggtacacggctggccagcgagtataactggggtggcccagagtccagcgacaagggcgaccccttcgctaccctgtctgcacgtcccagcacccagccgaggccagactcttggggtgaggacaactgggagggcctcgagactgacagtcgacaggtcaaggctgagctggcccggaagaagcgcgaggagcggcggcgggagatggaggccaaacgcgccgagaggaaggtggccaagggccccatgaagctgggagcccggaagctggactgaaccgtggcggtggcccttcccggctgcggagagcccgccccacagatgtatttattgtacaaaccatgtgagcccggccggcccagccaggccatctcacgtgtacataatcagagccacaataaattctatttcacaccccttgtgccgggctcagtctagcccctgggaggcggctggggtctggcgccgccctgcgcagcccgcgcccacgtcagacgtgaacatcaatttgcttcgaaagccaagggtaaagaggcacgatctgatttatcagtttctaggaaacaccctctgggaggaaggcaggcagcgcccgccggagaccttacaaccgcccgctaaccggggaggggggccggtaggggcgcctcgggtctcaaggcgccgggagggtctgcgggccctgaaggtccctgggtccgagccacaagtcggggtgtacaaggggctggcggtaaaacagagtttggtaaaagaataccccagccagccccaccaggctgcaggatcaggcttggcaaactttactggcctccccttgcctcgatacagggtagctagaggctgggggaggagccgaggggtcctgagcatggctgactggcctggtccctgctggcctcctgtacccaatgagatctactcgaacccccaactgcttaaaaacagatctgtctctactgacttagaaacc

SEQ ID NO: 101359 - DNA, 2572 bp, Homo sapiens
gggctcgggcgtgcggaggacccggagctaaggcgcccgaacccgcggcggcggtggggacgatgtggttctttgcccgggacccggtccgggactttccgttcgagctcatcccggagcccccagagggcggcctgcccgggccctgggccctgcaccgcggccgcaagaaggccacaggcagccccgtgtccatcttcgtctatgatgtgaagcctggcgcggaagagcagacccaggtggccaaagctgccttcaagcgcttcaaaactctacggcaccccaacatcctggcttacatcgatggactggagacagaaaaatgcctccacgtcgtgacagaggctgtgaccccgttgggaatatacctcaaggcgagagtggaggctggtggcctgaaggagctggagatctcctgggggctacaccagatcgtgaaagccctcagcttcctggtcaacgactgcagcctcatccacaacaatgtctgcatggccgccgtgttcgtggaccgagctggcgagtggaagcttgggggcctggactacatgtattcggcccagggcaacggtgggggacctccccgcaaggggatccccgagcttgagcagtatgaccccccggagttggctgacagcagtggcagagtggtcagagagaagtggtcagcagacatgtggcgcttgggctgcctcatttgggaagtcttcaatgggcccctacctcgggcagcagccctacgcaaccctgggaagatccccaaaacgctggtgccccattactgtgagctggtgggagcaaaccccaaggtgcgtcccaacccagcccgcttcctgcagaactgccgggcacctggtggcttcatgagcaaccgctttgtagaaaccaacctcttcctggaggagattcagatcaaagagccagccgagaagcaaaaattcttccaggagctgagcaagagcctggacgcattccctgaggatttctgtcggcacaaggtgctgccccagctgctgaccgccttcgagttcggcaatgctggggccgttgtcctcacgcccctcttcaaggtgggcaagttcctgagcgctgaggagtatcagcagaagatcatccctgtggtggtcaagatgttctcatccactgaccgggccatgcgcatccgcctcctgcagcagatggagcagttcatccagtaccttgacgagccaacagtcaacacccagatcttcccccacgtcgtacatggcttcctggacaccaaccctgccatccgggagcagacggtcaagtccatgctgctcctggccccaaagctgaacgaggccaacctcaatgtggagctgatgaagcactttgcacggctacaggccaaggatgaacagggccccatccgctgcaacaccacagtctgcctgggcaaaatcggctcctacctcagtgctagcaccagacacagggtccttacctctgccttcagccgagccactagggacccgtttgcaccgtcccgggttgcgggtgtcctgggctttgctgccacccacaacctctactcaatgaacgactgtgcccagaagatcctgcctgtgctctgcggtctcactgtagatcctgagaaatccgtgcgagaccaggccttcaaggccattcggagcttcctgtccaaattggagtctgtgtcggaggacccgacccagctggaggaagtggagaaggatgtccatgcagcctccagccctggcatgggaggagccgcagctagctgggcaggctgggccgtgaccggggtctcctcactcacctccaagctgatccgttcgcacccaaccactgccccaacagaaaccaacattccccaaagacccacgcctgaaggagttcctgccccagcccccacccctgttcctgccacccctacaacctcaggccactgggagacgcaggaggaggacaaggacacagcagaggacagcagcactgctgacagatgggacgacgaagactggggcagcctggagcaggaggccgagtctgtgctggcccagcaggacgactggagcaccgggggccaagtgagccgtgctagtcaggtcagcaactccgaccacaaatcctccaaatccccagagtccgactggagcagctgggaagctgagggctcctgggaacagggctggcaggagccaagctcccaggagccacctcctgacggtacacggctggccagcgagtataactggggtggcccagagtccagcgacaagggcgaccccttcgctaccctgtctgcacgtcccagcacccaggacaggtcaaggctgagctggcccggaagaagcgcgaggagcggcggcgggagatggaggccaaacgcgccgagaggaaggtggccaagggccccatgaagctgggagcccggaagctggactgaaccgtggcggtggcccttcccggctgcggagagcccgccccacagatgtatttattgtacaaaccatgtgagcccggccggcccagccaggccatctcacgtgtacataatcagagccacaataaattctatttcaca

SEQ ID NO: 101360 - DNA, 2801 bp, Homo sapiens
gggctcgggcgtgcggaggacccggagctaaggcgcccgaacccgcggcggcggtggggacgatgtggttctttgcccgggacccggtccgggactttccgttcgagctcatcccggagcccccagagggcggcctgcccgggccctgggccctgcaccgcggccgcaagaaggccacaggcagccccgtgtccatcttcgtctatgatgtgaagcctggcgcggaagagcagacccaggtggccaaagctgccttcaagcgcttcaaaactctacggcaccccaacatcctggcttacatcgatggactggagacagaaaaatgcctccacgtcgtgacagaggctgtgaccccgttgggaatatacctcaaggcgagagtggaggctggtggcctgaaggagctggagatctcctgggggctacaccagatcgtgaaagccctcagcttcctggtcaacgactgcagcctcatccacaacaatgtctgcatggccgccgtgttcgtggaccgagctggcgagtggaagcttgggggcctggactacatgtattcggcccagggcaacggtgggggacctccccgcaaggggatccccgagcttgagcagtatgaccccccggagttggctgacagcagtggcagagtggtcagagagaagtggtcagcagacatgtggcgcttgggctgcctcatttgggaagtcttcaatgggcccctacctcgggcagcagccctacgcaaccctgggaagatccccaaaacgctggtgccccattactgtgagctggtgggagcaaaccccaaggtgcgtcccaacccagcccgcttcctgcagaactgccgggcacctggtggcttcatgagcaaccgctttgtagaaaccaacctcttcctggaggagattcagatcaaagagccagccgagaagcaaaaattcttccaggagctgagcaagagcctggacgcattccctgaggatttctgtcggcacaaggtgctgccccagctgctgaccgccttcgagttcggcaatgctggggccgttgtcctcacgcccctcttcaaggtgggcaagttcctgagcgctgaggagtatcagcagaagatcatccctgtggtggtcaagatgttctcatccactgaccgggccatgcgcatccgcctcctgcagcagatggagcagttcatccagtaccttgacgagccaacagtcaacacccagatcttcccccacgtcgtacatggcttcgtcagcaactccgaccacaaatcctccaaatccccagagtccgactggagcagctgggaagctgagggctcctgggaacagggctggcaggagccaagctcccaggagccacctcctgacggtacacggctggccagcgagtataactggggtggcccagagtccagcgacaagggcgaccccttcgctaccctgtctgcacgtcccagcacccagccgaggccagactcttggggtgaggacaactgggagggcctcgagactgacagtcgacaggtcaaggctgagctggcccggaagaagcgcgaggagcggcggcgggagatggaggccaaacgcgccgagaggaaggtggccaagggccccatgaagctgggagcccggaagctggactgaaccgtggcggtggcccttcccggctgcggagagcccgccccacagatgtatttattgtacaaaccatgtgagcccggccggcccagccaggccatctcacgtgtacataatcagagccacaataaattctatttcacaccccttgtgccgggctcagtctagcccctgggaggcggctggggtctggcgccgccctgcgcagcccgcgcccacgtcagacgtgaacatcaatttgcttcgaaagccaagggtaaagaggcacgatctgatttatcagtttctaggaaacaccctctgggaggaaggcaggcagcgcccgccggagaccttacaaccgcccgctaaccggggaggggggccggtaggggcgcctcgggtctcaaggcgccgggagggtctgcgggccctgaaggtccctgggtccgagccacaagtcggggcagaagtgaggccgagctcgcggaaatccctcagtgatcaccgaggtctgggccgagggcggcgtcggcggcgtcagcggcggcgctggggaacgcaggccccgtgcgggcggctgcgcgcgaagccggctttgcagacgcagcggaaggagccgctggtgttcacgcagcgctcgctcttgcacagcagcccgcgctggttcagctctcggcactcgtcgatatccacgcagcgggcgcgggaggcgtcgagctggaagccgccgggacactcgcacacggcgccgcccggccgcggcacgcagcggccactcacgcagcgacactcgtctgaatcctcctctgaactgtcctcatctcttgggggctttccccaacagcagggggcttgtgtcccagaaggaattgctctcgctctgcgatgtcgggcaatgggaccccgcgccgcgcggcgggcacggtcggcattgggcgccccagccgcggccctggcggcagcagcagtcgtcgaaggtgagggcaggcccggccagggggccagcgcacatgccgtcctctccgcgctggctccagcacacgtcgcgccgctccggggcacgctcggccgggctctcggggagctggcaatcgcggccggagggcccgggcacccagggcgggcgacactcgcagcggtaggagcccggcaggttgacgcagcggccagggcggc

SEQ ID NO: 101361 - DNA, 2837 bp, Homo sapiens
  misc_feature (2613)..(2613): n is a, c, g, or t
  misc_feature (2617)..(2617): n is a, c, g, or t
  misc_feature (2636)..(2636): n is a, c, g, or t
  misc_feature (2689)..(2689): n is a, c, g, or t
  misc_feature (2694)..(2694): n is a, c, g, or t
  misc_feature (2697)..(2697): n is a, c, g, or t
  misc_feature (2699)..(2699): n is a, c, g, or t
  misc_feature (2702)..(2702): n is a, c, g, or t
  misc_feature (2705)..(2705): n is a, c, g, or t
  misc_feature (2707)..(2707): n is a, c, g, or t
  misc_feature (2727)..(2727): n is a, c, g, or t
  misc_feature (2729)..(2729): n is a, c, g, or t
  misc_feature (2740)..(2740): n is a, c, g, or t
  misc_feature (2765)..(2765): n is a, c, g, or t
gggctcgggcgtgcggaggacccggagctaaggcgcccgaacccgcggcggcggtggggacgatgtggttctttgcccgggacccggtccgggactttccgttcgagctcatcccggagcccccagagggcggcctgcccgggccctgggccctgcaccgcggccgcaagaaggccacaggcagccccgtgtccatcttcgtctatgatgtgaagcctggcgcggaagagcagacccaggtggccaaagctgccttcaagcgcttcaaaactctacggcaccccaacatcctggcttacatcgatggactggagacagaaaaatgcctccacgtcgtgacagaggctgtgaccccgttgggaatatacctcaaggcgagagtggaggctggtggcctgaaggagctggagatctcctgggggctacaccagatcgtgaaagccctcagcttcctggtcaacgactgcagcctcatccacaacaatgtctgcatggccgccgtgttcgtggaccgagctggcgagtggaagcttgggggcctggactacatgtattcggcccagggcaacggtgggggacctccccgcaaggggatccccgagcttgagcagtatgaccccccggagttggctgacagcagtggcagagtggtcagagagaagtggtcagcagacatgtggcgcttgggctgcctcatttgggaagtcttcaatgggcccctacctcgggcagcagccctacgcaaccctgggaagatccccaaaacgctggtgccccattactgtgagctggtgggagcaaaccccaaggtgcgtcccaacccagcccgcttcctgcagaactgccgggcacctggtggcttcatgagcaaccgctttgtagaaaccaacctcttcctggaggagattcagatcaaagagccagccgagaagcaaaaattcttccaggagctgagcaagagcctggacgcattccctgaggatttctgtcggcacaaggtgctgccccagctgctgaccgccttcgagttcggcaatgctggggccgttgtcctcacgcccctcttcaaggtgggcaagttcctgagcgctgaggagtatcagcagaagatcatccctgtggtggtcaagatgttctcatccactgaccgggccatgcgcatccgcctcctgcagcagatggagcagttcatccagtaccttgacgagccaacagtcaacacccagatcttcccccacgtcgtacatggcttcctggacaccaaccctgccatccgggagcagacggtcaagtccatgctgctcctggccccaaagctgaacgaggccaacctcaatgtggagctgatgaagcactttgcacggctacaggccaaggatgaacagggccccatccgctgcaacaccacagtctgcctgggcaaaatcggctcctacctcagtgctagcaccagacacagggtccttacctctgccttcagccgagccactagggacccgtttgcaccgtcccgggttgcgggtgtcctgggctttgctgccacccacaacctctactcaatgaacgactgtgcccagaagatcctgcctgtgctctgcggtctcactgtagatcctgagaaatccgtgcgagaccaggccttcaaggccattcggagcttcctgtccaaattggagtctgtgtcggaggacccgacccagctggaggaagtggagaaggatgtccatgcagcctccagccctggcatgggaggagccgcagctagctgggcaggctgggccgtgaccggggtctcctcactcacctccaagctgatccgttcgcacccaaccactgccccaacagaaaccaacattccccaaagacccacgcctgaagccaagctcccaggagccacctcctgacggtacacggctggccagcgagtataactggggtggcccagagtccagcgacaagggcgaccccttcgctaccctgtctgcacgtcccagcacccagccgaggccagactcttggggtgaggacaactgggagggcctcgagactgacagtcgacaggtcaaggctgagctggcccggaagaagcgcgaggagcggcggcgggagatggaggccaaacgcgccgagaggaaggtggccaagggccccatgaagctgggagcccggaagctggactgaaccgtggcggtggcccttcccggctgcggagagcccgccccacagatgtatttattgtacaaaccatgtgagcccggccggcccagccaggccatctcacgtgtacataatcagagccacaataaattctatttcacaaaaaaaaaaaaaaaaaaaaaaaaaaaaaaaaaaaaaaaaaaaaaaaaaaaaaaaaaaaaaaaaaaaaaaaaaaaaaaaaaaaaaaaaaaaaaaaaaaccctcgggccaaattcggcacgagcttaagtgtttaaagcattggttttttttaaagctcattggtgacacccccatggacaccttcctaatggaaatgcttgaggctcccaataaactggcctgagctaaaacccaaacggggggcttttaacactggaggagcccacatccaagagggactccaagccctggggnaggntggggggccatgttcccanaaccttgatggggtgagaagtccagggcggaccccagatacctgtgaggactngttgnctntnttnggngnccttgagtctttgaatttgncngggtctcccangatttggggggatttctaacctttntcctttccccagcacaaagcactggccttggttccagaacttgttcctttttattctggctaatttggcttc

SEQ ID NO: 101362 - DNA, 2780 bp, Homo sapiens
gggctcgggcgtgcggaggacccggagctaaggcgcccgaacccgcggcggcggtggggacgatgtggttctttgcccgggacccggtccgggactttccgttcgagctcatcccggagcccccagagggcggcctgcccgggccctgggccctgcaccgcggccgcaagaaggccacaggcagccccgtgtccatcttcgtctatgatgtgaagcctggcgcggaagagcagacccaggtggccaaagctgccttcaagcgcttcaaaactctacggcaccccaacatcctggcttacatcgatggactggagacagaaaaatgcctccacgtcgtgacagaggctgtgaccccgttgggaatatacctcaaggcgagagtggaggctggtggcctgaaggagctggagatctcctgggggctacaccagatcgtgaaagccctcagcttcctggtcaacgactgcagcctcatccacaacaatgtctgcatggccgccgtgttcgtggaccgagctggcgagtggaagcttgggggcctggactacatgtattcggcccagggcaacggtgggggacctccccgcaaggggatccccgagcttgagcagtatgaccccccggagttggctgacagcagtggcagagtggtcagagagaagtggtcagcagacatgtggcgcttgggctgcctcatttgggaagtcttcaatgggcccctacctcgggcagcagccctacgcaaccctgggaagatccccaaaacgctggtgccccattactgtgagctggtgggagcaaaccccaaggtgcgtcccaacccagcccgcttcctgcagaactgccgggcacctggtggcttcatgagcaaccgctttgtagaaaccaacctcttcctggaggagattcagatcaaagagccagccgagaagcaaaaattcttccaggagctgagcaagagcctggacgcattccctgaggatttctgtcggcacaaggtgctgccccagctgctgaccgccttcgagttcggcaatgctggggccgttgtcctcacgcccctcttcaaggtgggcaagttcctgagcgctgaggagtatcagcagaagatcatccctgtggtggtcaagatgttctcatccactgaccgggccatgcgcatccgcctcctgcagcagatggagcagttcatccagtaccttgacgagccaacagtcaacacccagatcttcccccacgtcgtacatggcttcctggacaccaaccctgccatccgggagcagacggtcaagtccatgctgctcctggccccaaagctgaacgaggccaacctcaatgtggagctgatgaagcactttgcacggctacaggccaaggatgaacagggccccatccgctgcaacaccacagtctgcctgggcaaaatcggctcctacctcagtgctagcaccagacacagggtccttacctctgccttcagccgagccactagggacccgtttgcaccgtcccgggttgcgggtgtcctgggctttgctgccacccacaacctctactcaatgaacgactgtgcccagaagatcctgcctgtgctctgcggtctcactgtagatcctgagaaatccgtgcgagaccaggccttcaaggccattcggagcttcctgtccaaattggagtctgtgtcggaggacccgacccagctggaggaagtggagaaggatgtccatgcagcctccagccctggcatgggaggagccgcagctagctgggcaggctgggccgtgaccggggtctcctcactcacctccaagctgatccgttcgcacccaaccactgccccaacagaaaccaacattccccaaagacccacgcctgaaggccactgggagacgcaggaggaggacaaggacacagcagaggacagcagcactgctgacagatgggacgacgaagactggggcagcctggagcaggaggccgagtctgtgctggcccagcaggacgactggagcaccgggggccaagtgagccgtgctagtcaggtcagcaactccgaccacaaatcctccaaatccccagagtccgactggagcagctgggaagctgagggctcctgggaacagggctggcaggagccaagctcccaggagccacctcctgacggtacacggctggccagcgagtataactggggtggcccagagtccagcgacaagggcgaccccttcgctaccctgtctgcacgtcccagcacccaggtacccagcacaggtctggcgagagggtagagatggtggacctcagccagaagtgggccccactgcagcccacacttctctttacagccgaggccagactcttggggtgaggacaactgggagggcctcgagactgacagtcgtaagtgcttcccctgggtgggctgaagactagggctccccgactagcccgcccctacaggcccccggcaggcactggctggagagctgagaccggggctccccttcctgacgccaggacaggtcaaggctgagctggcccggaagaagcgcgaggagcggcggcgggagatggaggccaaacgcgccgagaggaaggtggccaagggccccatgaagctgggagcccggaagctggactgaaccgtggcggtggcccttcccggctgcggagagcccgccccacagatgtatttattgtacaaaccatgtgagcccggccggcccagccaggccatctcacgtgtacataatcagagccacaataaattctatttcaca

SEQ ID NO: 101363 - DNA, 3298 bp, Homo sapiens
  misc_feature (3074)..(3074): n is a, c, g, or t
  misc_feature (3078)..(3078): n is a, c, g, or t
  misc_feature (3097)..(3097): n is a, c, g, or t
  misc_feature (3150)..(3150): n is a, c, g, or t
  misc_feature (3155)..(3155): n is a, c, g, or t
  misc_feature (3158)..(3158): n is a, c, g, or t
  misc_feature (3160)..(3160): n is a, c, g, or t
  misc_feature (3163)..(3163): n is a, c, g, or t
  misc_feature (3166)..(3166): n is a, c, g, or t
  misc_feature (3168)..(3168): n is a, c, g, or t
  misc_feature (3188)..(3188): n is a, c, g, or t
  misc_feature (3190)..(3190): n is a, c, g, or t
  misc_feature (3201)..(3201): n is a, c, g, or t
  misc_feature (3226)..(3226): n is a, c, g, or t
gggctcgggcgtgcggaggacccggagctaaggcgcccgaacccgcggcggcggtggggacgatgtggttctttgcccgggacccggtccgggactttccgttcgagctcatcccggagcccccagagggcggcctgcccgggccctgggccctgcaccgcggccgcaagaaggccacaggcagccccgtgtccatcttcgtctatgatgtgaagcctggcgcggaagagcagacccaggtggccaaagctgccttcaagcgcttcaaaactctacggcaccccaacatcctggcttacatcgatggactggagacagaaaaatgcctccacgtcgtgacagaggctgtgaccccgttgggaatatacctcaaggcgagagtggaggctggtggcctgaaggagctggagatctcctgggggctacaccagatcgtgaaagccctcagcttcctggtcaacgactgcagcctcatccacaacaatgtctgcatggccgccgtgttcgtggaccgagctggcgagtggaagcttgggggcctggactacatgtattcggcccagggcaacggtgggggacctccccgcaaggggatccccgagcttgagcagtatgaccccccggagttggctgacagcagtggcagagtggtcagagagaagtggtcagcagacatgtggcgcttgggctgcctcatttgggaagtcttcaatgggcccctacctcgggcagcagccctacgcaaccctgggaagatccccaaaacgctggtgccccattactgtgagctggtgggagcaaaccccaaggtgcgtcccaacccagcccgcttcctgcagaactgccgggcacctggtggcttcatgagcaaccgctttgtagaaaccaacctcttcctggaggagattcagatcaaagagccagccgagaagcaaaaattcttccaggagctgagcaagagcctggacgcattccctgaggatttctgtcggcacaaggtgctgccccagctgctgaccgccttcgagttcggcaatgctggggccgttgtcctcacgcccctcttcaaggtgggcaagttcctgagcgctgaggagtatcagcagaagatcatccctgtggtggtcaagatgttctcatccactgaccgggccatgcgcatccgcctcctgcagcagatggagcagttcatccagtaccttgacgagccaacagtcaacacccagatcttcccccacgtcgtacatggcttcctggacaccaaccctgccatccgggagcagacggtcaagtccatgctgctcctggccccaaagctgaacgaggccaacctcaatgtggagctgatgaagcactttgcacggctacaggccaaggatgaacagggccccatccgctgcaacaccacagtctgcctgggcaaaatcggctcctacctcagtgctagcaccagacacagggtccttacctctgccttcagccgagccactagggacccgtttgcaccgtcccgggttgcgggtgtcctgggctttgctgccacccacaacctctactcaatgaacgactgtgcccagaagatcctgcctgtgctctgcggtctcactgtagatcctgagaaatccgtgcgagaccaggccttcaaggccattcggagcttcctgtccaaattggagtctgtgtcggaggacccgacccagctggaggaagtggagaaggatgtccatgcagcctccagccctggcatgggaggagccgcagctagctgggcaggctgggccgtgaccggggtctcctcactcacctccaagctgatccgttcgcacccaaccactgccccaacagaaaccaacattccccaaagacccacgcctgaaggccactgggagacgcaggaggaggacaaggacacagcagaggacagcagcactgctgacagatgggacgacgaagactggggcagcctggagcaggaggccgagtctgtgctggcccagcaggacgactggagcaccgggggccaagtgagccgtgctagtcaggtcagcaactccgaccacaaatcctccaaatccccagagtccgactggagcagctgggaagctgagggctcctgggaacagggctggcaggagccaagctcccaggagccacctcctgacggtacacggctggccagcgagtataactggggtggcccagagtccagcgacaagggcgaccccttcgctaccctgtctgcacgtcccagcacccaggtacccagcacaggtctggcgagagggtagagatggtggacctcagccagaagtgggccccactgcagcccacacttctctttacagccgaggccagactcttggggtgaggacaactgggagggcctcgagactgacagtcgtaagtgcttcccctgggtgggctgaagactagggctccccgactagcccgcccctacaggcccccggcaggcactggctggagagctgagaccggggctccccttcctgacgccaggacaggtcaaggctgagctggcccggaagaagcgcgaggagcggcggcgggagatggaggccaaacgcgccgagaggaaggtggccaagggccccatgaagctgggagcccggaagctggactgaaccgtggcggtggcccttcccggctgcggagagcccgccccacagatgtatttattgtacaaaccatgtgagcccggccggcccagccaggccatctcacgtgtacataatcagagccacaataaattctatttcacaaaaaaaaaaaaaaaaaaaaaaaaaaaaaaaaaaaaaaaaaaaaaaaaaaaaaaaaaaaaaaaaaaaaaaaaaaaaaaaaaaaaaaaaaaaaaaaaaaccctcgggccaaattcggcacgagcttaagtgtttaaagcattggttttttttaaagctcattggtgacacccccatggacaccttcctaatggaaatgcttgaggctcccaataaactggcctgagctaaaacccaaacggggggcttttaacactggaggagcccacatccaagagggactccaagccctggggnaggntggggggccatgttcccanaaccttgatggggtgagaagtccagggcggaccccagatacctgtgaggactngttgnctntnttnggngnccttgagtctttgaatttgncngggtctcccangatttggggggatttctaacctttntcctttccccagcacaaagcactggccttggttccagaacttgttcctttttattctggctaatttggcttc

SEQ ID NO: 101364 - DNA, 2167 bp, Homo sapiens
  misc_feature (2112)..(2112): n is a, c, g, or t
  misc_feature (2114)..(2114): n is a, c, g, or t
gggctcgggcgtgcggaggacccggagctaaggcgcccgaacccgcggcggcggtggggacgatgtggttctttgcccgggacccggtccgggactttccgttcgagctcatcccggagcccccagagggcggcctgcccgggccctgggccctgcaccgcggccgcaagaaggccacaggcagccccgtgtccatcttcgtctatgatgtgaagcctggcgcggaagagcagacccaggtggccaaagctgccttcaagcgcttcaaaactctacggcaccccaacatcctggcttacatcgatggactggagacagaaaaatgcctccacgtcgtgacagaggctgtgaccccgttgggaatatacctcaaggcgagagtggaggctggtggcctgaaggagctggagatctcctgggggctacaccagatcgtgaaagccctcagcttcctggtcaacgactgcagcctcatccacaacaatgtctgcatggccgccgtgttcgtggaccgagctggcgagtggaagcttgggggcctggactacatgtattcggcccagggcaacggtgggggacctccccgcaaggggatccccgagcttgagcagtatgaccccccggagttggctgacagcagtggcagagtggtcagagagaagtggtcagcagacatgtggcgcttgggctgcctcatttgggaagtcttcaatgggcccctacctcgggcagcagccctacgcaaccctgggaagatccccaaaacgctggtgccccattactgtgagctggtgggagcaaaccccaaggtgcgtcccaacccagcccgcttcctgcagaactgccgggcacctggtggcttcatgagcaaccgctttgtagaaaccaacctcttcctggaggagattcagatcaaagagccagccgagaagcaaaaattcttccaggagctgagcaagagcctggacgcattccctgaggatttctgtcggcacaaggtgctgccccagctgctgaccgccttcgagttcggcaatgctggggccgttgtcctcacgcccctcttcaaggtgggcaagttcctgagcgctgaggagtatcagcagaagatcatccctgtggtggtcaagatgttctcatccactgaccgggccatgcgcatccgcctcctgcagcagatggagcagttcatccagtaccttgacgagccaacagtcaacacccagatcttcccccacgtcgtacatggcttcctggacaccaaccctgccatccgggagcagacggtcaagtccatgctgctcctggccccaaagctgaacgaggccaacctcaatgtggagctgatgaagcactttgcacggctacaggccaaggatgaacagggccccatccgctgcaacaccacagtctgcctgggcaaaatcggctcctacctcagtgctagcaccagacacagggtccttacctctgccttcagccgagccactagggacccgtttgcaccgtcccgggttgcgggtgtcctgggctttgctgccacccacaacctctactcaatgaacgactgtgcccagaagatcctgcctgtgctctgcggtctcactgtagatcctgagaaatccgtgcgagaccaggccttcaaggccattcggagcttcctgtccaaattggagtctgtgtcggaggacccgacccagctggaggaagtggagaaggatgtccatgcagcctccagccctggcatgggaggagccgcagctagctgggcaggctgggccgtgaccggggtctcctcactcacctccaagctgatccgttcgcacccaaccactgccccaacagaaaccaacattccccaaagacccacgcctgaaggagttcctgccccagcccccacccctgttcctgccacccctacaacctcaggccactgggagacgcaggaggaggacaaggacacagcagaggacagcagcactgctgacagatgggacgacgaagactggggcagcctggagcaggaggccgagtctgtgctggcccagcaggacgactggagcaccgggggccaagtgagccgtgctagtcagtcagcatcgacaaatctcnantcccaagtcgagggcagggaagaggcctggaaggttgggggcatccggggccc

SEQ ID NO: 101365 - DNA, 2395 bp, Homo sapiens
ccacgcgtcgcggacgccgtgggtcgacccacgcgtcggacggtcatccatgctgctcctggccccaaagctgaacgaggccaacctcaatgtggagctgatgaagcactttgcacggctacaggccaaggatgaacagggccccatccgctgcaacaccacagtctgcctgggcaaaatcggctcctacctcagtgctagcaccagacacagggtccttacctctgccttcagccgagccactagggacccgtttgcaccgtcccgggttgcgggtgtcctgggctttgctgccacccacaacctctactcaatgaacgactgtgcccagaagatcctgcctgtgctctgcggtctcactgtagatcctgagaaatccgtgcgagaccaggccttcaaggccattcggagcttcctgtccaaattggagtctgtgtcggaggacccgacccagctggaggaagtggagaaggatgtccatgcagcctccagccctggcatgggaggagccgcagctagctgggcaggctgggccgtgaccggggtctcctcactcacctccaagctgatccgttcgcacccaaccactgccccaacagaaaccaacattccccaaagacccacgcctgaaggagttcctgccccagcccccacccctgttcctgccacccctacaacctcaggccactgggagacgcaggaggaggacaaggacacagcagaggacagcagcactgctgacagatgggacgacgaagactggggcagcctggagcaggaggccgagtctgtgctggcccagcaggacgactggagcaccgggggccaagtgagccgtgctagtcaggtcagcaactccgaccacaaatcctccaaatccccagagtccgactggagcagctgggaagctgagggctcctgggaacagggctggcaggagccaagctcccaggagccacctcctgacggtacacggctggccagcgagtataactggggtggcccagagtccagcgacaagggcgaccccttcgctaccctgtctgcacgtcccagcacccagccgaggccagactcttggggtgaggacaactgggagggcctcgagactgacagtcgacaggtcaaggctgagctggcccggaagaagcgcgaggagcggcggcgggagatggaggccaaacgcgccgagaggaaggtggccaagggccccatgaagctgggagcccggaagctggactgaaccgtggcggtggcccttcccggctgcggagagcccgccccacagatgtatttattgtacaaaccatgtgagcccggccggcccagccaggccatctcacgtgtacataatcagagccacaataaattctatttcacaccccttgtgccgggctcagtctagcccctgggaggcggctggggtctggcgccgccctgcgcagcccgcgcccacgtcagacgtgaacatcaatttgcttcgaaagccaagggtaaagaggcacgatctgatttatcagtttctaggaaacaccctctgggaggaaggcaggcagcgcccgccggagaccttacaaccgcccgctaaccggggaggggggccggtaggggcgcctcgggtctcaaggcgccgggagggtctgcgggccctgaaggtccctgggtccgagccacaagtcggggcagaagtgaggccgagctcgcggaaatccctcagtgatcaccgaggtctgggccgagggcggcgtcggcggcgtcagcggcggcgctggggaacgcaggccccgtgcgggcggctgcgcgcgaagccggctttgcagacgcagcggaaggagccgctggtgttcacgcagcgctcgctcttgcacagcagcccgcgctggttcagctctcggcactcgtcgatatccacgcagcgggcgcgggaggcgtcgagctggaagccgccgggacactcgcacacggcgccgcccggccgcggcacgcagcggccactcacgcagcgacactcgtctgaatcctcctctgaactgtcctcatctcttgggggctttccccaacagcagggggcttgtgtcccagaaggaattgctctcgctctgcgatgtcgggcaatgggaccccgcgccgcgcggcgggcacggtcggcattgggcgccccagccgcggccctggcggcagcagcagtcgtcgaaggtgagggcaggcccggccagggggccagcgcacatgccgtcctctccgcgctggctccagcacacgtcgcgccgctccggggcacgctcggccgggctctcggggagctggcaatcgcggccggagggcccgggcacccagggcgggcgacactcgcagcggtaggagcccggcaggttgacgcagcggccagggcggc

SEQ ID NO: 101366 - DNA, 2353 bp, Homo sapiens
ttaggctaggtacgaggctggggttgcaaccctgccatccgggagcagacggtcatccatgctgctcctggccccaaagctgaacgaggccaacctcaatgtggagctgatgaagcactttgcacggctacaggccaaggatgaacagggccccatccgctgcaacaccacagtctgcctgggcaaaatcggctcctacctcagtgctagcaccagacacagggtccttacctctgccttcagccgagccactagggacccgtttgcaccgtcccgggttgcgggtgtcctgggctttgctgccacccacaacctctactcaatgaacgactgtgcccagaagatcctgcctgtgctctgcggtctcactgtagatcctgagaaatccgtgcgagaccaggccttcaaggccattcggagcttcctgtccaaattggagtctgtgtcggaggacccgacccagctggaggaagtggagaaggatgtccatgcagcctccagccctggcatgggaggagccgcagctagctgggcaggctgggccgtgaccggggtctcctcactcacctccaagctgatccgttcgcacccaaccactgccccaacagaaaccaacattccccaaagacccacgcctgaaggccactgggagacgcaggaggaggacaaggacacagcagaggacagcagcactgctgacagatgggacgacgaagactggggcagcctggagcaggaggccgagtctgtgctggcccagcaggacgactggagcaccgggggccaagtgagccgtgctagtcaggtcagcaactccgaccacaaatcctccaaatccccagagtccgactggagcagctgggaagctgagggctcctgggaacagggctggcaggagccaagctcccaggagccacctcctgacggtacacggctggccagcgagtataactggggtggcccagagtccagcgacaagggcgaccccttcgctaccctgtctgcacgtcccagcacccagccgaggccagactcttggggtgaggacaactgggagggcctcgagactgacagtcgacaggtcaaggctgagctggcccggaagaagcgcgaggagcggcggcgggagatggaggccaaacgcgccgagaggaaggtggccaagggccccatgaagctgggagcccggaagctggactgaaccgtggcggtggcccttcccggctgcggagagcccgccccacagatgtatttattgtacaaaccatgtgagcccggccggcccagccaggccatctcacgtgtacataatcagagccacaataaattctatttcacaccccttgtgccgggctcagtctagcccctgggaggcggctggggtctggcgccgccctgcgcagcccgcgcccacgtcagacgtgaacatcaatttgcttcgaaagccaagggtaaagaggcacgatctgatttatcagtttctaggaaacaccctctgggaggaaggcaggcagcgcccgccggagaccttacaaccgcccgctaaccggggaggggggccggtaggggcgcctcgggtctcaaggcgccgggagggtctgcgggccctgaaggtccctgggtccgagccacaagtcggggcagaagtgaggccgagctcgcggaaatccctcagtgatcaccgaggtctgggccgagggcggcgtcggcggcgtcagcggcggcgctggggaacgcaggccccgtgcgggcggctgcgcgcgaagccggctttgcagacgcagcggaaggagccgctggtgttcacgcagcgctcgctcttgcacagcagcccgcgctggttcagctctcggcactcgtcgatatccacgcagcgggcgcgggaggcgtcgagctggaagccgccgggacactcgcacacggcgccgcccggccgcggcacgcagcggccactcacgcagcgacactcgtctgaatcctcctctgaactgtcctcatctcttgggggctttccccaacagcagggggcttgtgtcccagaaggaattgctctcgctctgcgatgtcgggcaatgggaccccgcgccgcgcggcgggcacggtcggcattgggcgccccagccgcggccctggcggcagcagcagtcgtcgaaggtgagggcaggcccggccagggggccagcgcacatgccgtcctctccgcgctggctccagcacacgtcgcgccgctccggggcacgctcggccgggctctcggggagctggcaatcgcggccggagggcccgggcacccagggcgggcgacactcgcagcggtaggagcccggcaggttgacgcagcggccagggcggc

SEQ ID NO: 101367 - DNA, 1781 bp, Homo sapiens
gggctcgggcgtgcggaggacccggagctaaggcgcccgaacccgcggcggcggtggggacgatgtggttctttgcccgggacccggtccgggactttccgttcgagctcatcccggagcccccagagggcggcctgcccgggccctgggccctgcaccgcggccgcaagaaggccacaggcagccccgtgtccatcttcgtctatgatgtgaagcctggcgcggaagagcagacccaggtggccaaagctgccttcaagcgcttcaaaactctacggcaccccaacatcctggcttacatcgatggactggagacagaaaaatgcctccacgtcgtgacagaggctgtgaccccgttgggaatatacctcaaggcgagagtggaggctggtggcctgaaggagctggagatctcctgggggctacaccagatcgtgaaagccctcagcttcctggtcaacgactgcagcctcatccacaacaatgtctgcatggccgccgtgttcgtggaccgagctggcgagtggaagcttgggggcctggactacatgtattcggcccagggcaacggtgggggacctccccgcaaggggatccccgagcttgagcagtatgaccccccggagttggctgacagcagtggcagagtggtcagagagaagtggtcagcagacatgtggcgcttgggctgcctcatttgggaagtcttcaatgggcccctacctcgggcagcagccctacgcaaccctgggaagatccccaaaacgctggtgccccattactgtgagctggtgggagcaaaccccaaggtgcgtcccaacccagcccgcttcctgcagaactgccgggcacctggtggcttcatgagcaaccgctttgtagaaaccaacctcttcctggaggagattcagatcaaagagccagccgagaagcaaaaattcttccaggagctgagcaagagcctggacgcattccctgaggatttctgtcggcacaaggtgctgccccagctgctgaccgccttcgagttcggcaatgctggggccgttgtcctcacgcccctcttcaaggtgggcaagttcctgagcgctgaggagtatcagcagaagatcatccctgtggtggtcaagatgttctcatccactgaccgggccatgcgcatccgcctcctgcagcagatggagcagttcatccagtaccttgacgagccaacagtcaacacccagatcttcccccacgtcgtacatggcttcctggacaccaaccctgccatccgggagcagacggtcaagtccatgctgctcctggccccaaagctgaacgaggccaacctcaatgtggagctgatgaagcactttgcacggctacaggccaaggatgaacagggccccatccgctgcaacaccacagtctgcctgggcaaaatcggctcctacctcagtgctagcaccagacacagggtccttacctctgccttcagccgagccactagggacccgtttgcaccgtcccgggttgcgggtgtcctgggctttgctgccacccacaacctctactcaatgaacgactgtgcccagaagatcctgcctgtgctctgcggtctcactgtagatcctgagaaatccgtgcgagaccaggccttcaaggccattcggagcttcctgtccaaattggagtctgtgtcggaggacccgacccagctggaggaagtggagaagatgtccatcacctcagcctgcatgggagacccagctactggcagcttgtgataagatcctgct

SEQ ID NO: 101368 - DNA, 931 bp, Homo sapiens
ctttttgtgttgttgtttgttttttttttttaaagaggcacgatctgatttatcagtttctaggaaacaccctctgggaggaaggcaggcagcgcccgccggagaccttacaaccgcccgctaaccggggaggggggccggtaggggcgcctcgggtctcaaggcgccgggagggtctgcgggccctgaaggtccctgggtccgagccacaagtcggggcagaagtgaggccgagctcgcggaaatccctcagtgatcaccgaggtctgggccgagggcggcgtcggcggcgtcagcggcggcgctggggaacgcaggccccgtgcgggcggctgcgcgcgaagccggctttgcagacgcagcggaaggagccgctggtgttcacgcagcgctcgctcttgcacagcagcccgcgctggttcagctctcggcactcgtcgatatccacgcagcgggcgcgggaggcgtcgagctggaagccgccgggacactcgcacacggcgccgcccggccgcggcacgcagcggccactcacgcagcgacactcgtctgaatcctcctctgaactgtcctcatctcttgggggctttccccaacagcagggggcttgtgtcccagaaggaattgctctcgctctgcgatgtcgggcaatgggaccccgcgccgcgcggcgggcacggtcggcattgggcgccccagccgcggccctggcggcagcagcagtcgtcgaaggtgagggcaggcccggccagggggccagcgcacatgccgtcctctccgcgctggctccagcacacgtcgcgccgctccggggcacgctcggccgggctctcggggagctggcaatcgcggccggagggcccgggcacccagggcgggcgacactcgcagcggtaggagcccggcaggttgacgcagcggccagggcggc

SEQ ID NO: 101369 - DNA, 237 bp, Homo sapiens
catctgggtgcactggcctgcagggttgctgtagggaggagggaggaaggctctgctctatgcaatgcccggccccagccgtgtgtggggaagacagcgggggctgagaatcagaatcaggagcaggggaggagagtggcagacactccacagaccctgacccagcagaggtcatggaatcttgactcagatgctgtggggcggggagggcctttggagggtggaaacctggaagga

SEQ ID NO: 101370 - DNA, 529 bp, Homo sapiens
gtgagtgtcctggcctagctgcatcagtggctgagagggctgagagctgcaggcacccaggaactcttactgtctgactcccccggggatggtgaaggggatataggagctgggtaggctccagtcaccctgtgggcttccttggtgccccttccccccagtagcccccttcccctagcagcctctgccctgtcctcaagacccccctgaaagctcagtgagcctctgctccccaggagttcctgccccagcccccacccctgttcctgccacccctacaacctcaggccactgggagacgcaggaggaggacaaggacacagcagaggacagcagcactgctgacagatgggacgacgaagactggggcagcctggaggtgtgtggggctgagggagcctccccaggggaccccagctcaaatccacaggctgccattcagggagcttctgtggggcctggctggagttggcctgtcctcatcagcacagcatccctggcacgtaggcctcatggagtggccattgta

SEQ ID NO: 101371 - DNA, 2590 bp, Homo sapiens
gggctcgggcgtgcggaggacccggagctaaggcgcccgaacccgcggcggcggtggggacgatgtggttctttgcccgggacccggtccgggactttccgttcgagctcatcccggagcccccagagggcggcctgcccgggccctgggccctgcaccgcggccgcaagaaggccacaggcagccccgtgtccatcttcgtctatgatgtgaagcctggcgcggaagagcagacccaggtggccaaagctgccttcaagcgcttcaaaactctacggcaccccaacatcctggcttacatcgatggactggagacagaaaaatgcctccacgtcgtgacagaggctgtgaccccgttgggaatatacctcaaggcgagagtggaggctggtggcctgaaggagctggagatctcctgggggctacaccagatcgtgaaagccctcagcttcctggtcaacgactgcagcctcatccacaacaatgtctgcatggccgccgtgttcgtggaccgagctggcgagtggaagcttgggggcctggactacatgtattcggcccagggcaacggtgggggacctccccgcaaggggatccccgagcttgagcagtatgaccccccggagttggctgacagcagtggcagagtggtcagagagaagtggtcagcagacatgtggcgcttgggctgcctcatttgggaagtcttcaatgggcccctacctcgggcagcagccctacgcaaccctgggaagatccccaaaacgctggtgccccattactgtgagctggtgggagcaaaccccaaggtgcgtcccaacccagcccgcttcctgcagaactgccgggcacctggtggcttcatgagcaaccgctttgtagaaaccaacctcttcctggaggagattcagatcaaagagccagccgagaagcaaaaattcttccaggagctgagcaagagcctggacgcattccctgaggatttctgtcggcacaaggtgctgccccagctgctgaccgccttcgagttcggcaatgctggggccgttgtcctcacgcccctcttcaaggtgggcaagttcctgagcgctgaggagtatcagcagaagatcatccctgtggtggtcaagatgttctcatccactgaccgggccatgcgcatccgcctcctgcagcagatggagcagttcatccagtaccttgacgagccaacagtcaacacccagatcttcccccacgtcgtacatggcttcctggacaccaaccctgccatccgggagcagacggtcaagtccatgctgctcctggccccaaagctgaacgaggccaacctcaatgtggagctgatgaagcactttgcacggctacaggccaaggatgaacagggccccatccgctgcaacaccacagtctgcctgggcaaaatcggctcctacctcagtgctagcaccagacacagggtccttacctctgccttcagccgagccactagggacccgtttgcaccgtcccgggttgcgggtgtcctgggctttgctgccacccacaacctctactcaatgaacgactgtgcccagaagatcctgcctgtgctctgcggtctcactgtagatcctgagaaatccgtgcgagaccaggccttcaaggccattcggagcttcctgtccaaattggagtctgtgtcggaggacccgacccagctggaggaagtggagaaggatgtccatgcagcctccagccctggcatgggaggagccgcagctagctgggcaggctgggccgtgaccggggtctcctcactcacctccaagctgatccgttcgcacccaaccactgccccaacagaaaccaacattccccaaagacccacgcctgaaggagttcctgccccagcccccacccctgttcctgccacccctacaacctcaggccactgggagacgcaggaggaggacaaggacacagcagaggacagcagcactgctgacagatgggacgacgaagactggggcagcctggagcaggaggccgagtctgtgctggcccagcaggacgactggagcaccgggggccaagtgagccgtgctagtcagagtccgactggagcagctgggaagctgagggctcctgggaacagggctggcaggagccaagctcccaggagccacctcctgacggtacacggctggccagcgagtataactggggtggcccagagtccagcgacaagggcgaccccttcgctaccctgtctgcacgtcccagcacccagccgaggccagactcttggggtgaggacaactgggagggcctcgagactgacagtcgacaggtcaaggctgagctggcccggaagaagcgcgaggagcggcggcgggagatggaggccaaacgcgccgagaggaaggtggccaagggccccatgaagctgggagcccggaagctggactgaaccgtggcggtggcccttcccggctgcggagagcccgccccacagatgtatttattgtacaaaccatgtgagcccggccggcccagccaggccatctcacgtgtacataatcagagccacaataaattctatttcaca

SEQ ID NO: 101372 - DNA, 3641 bp, Homo sapiens
gggctcgggcgtgcggaggacccggagctaaggcgcccgaacccgcggcggcggtggggacgatgtggttctttgcccgggacccggtccgggactttccgttcgagctcatcccggagcccccagagggcggcctgcccgggccctgggccctgcaccgcggccgcaagaaggccacaggcagccccgtgtccatcttcgtctatgatgtgaagcctggcgcggaagagcagacccaggtggccaaagctgccttcaagcgcttcaaaactctacggcaccccaacatcctggcttacatcgatggactggagacagaaaaatgcctccacgtcgtgacagaggctgtgaccccgttgggaatatacctcaaggcgagagtggaggctggtggcctgaaggagctggagatctcctgggggctacaccagatcgtgaaagccctcagcttcctggtcaacgactgcagcctcatccacaacaatgtctgcatggccgccgtgttcgtggaccgagctggcgagtggaagcttgggggcctggactacatgtattcggcccagggcaacggtgggggacctccccgcaaggggatccccgagcttgagcagtatgaccccccggagttggctgacagcagtggcagagtggtcagagagaagtggtcagcagacatgtggcgcttgggctgcctcatttgggaagtcttcaatgggcccctacctcgggcagcagccctacgcaaccctgggaagatccccaaaacgctggtgccccattactgtgagctggtgggagcaaaccccaaggtgcgtcccaacccagcccgcttcctgcagaactgccgggcacctggtggcttcatgagcaaccgctttgtagaaaccaacctcttcctggaggagattcagatcaaagagccagccgagaagcaaaaattcttccaggagctgagcaagagcctggacgcattccctgaggatttctgtcggcacaaggtgctgccccagctgctgaccgccttcgagttcggcaatgctggggccgttgtcctcacgcccctcttcaaggtgggcaagttcctgagcgctgaggagtatcagcagaagatcatccctgtggtggtcaagatgttctcatccactgaccgggccatgcgcatccgcctcctgcagcagatggagcagttcatccagtaccttgacgagccaacagtcaacacccagatcttcccccacgtcgtacatggcttcctggacaccaaccctgccatccgggagcagacggtcaagtccatgctgctcctggccccaaagctgaacgaggccaacctcaatgtggagctgatgaagcactttgcacggctacaggccaaggatgaacagggccccatccgctgcaacaccacagtctgcctgggcaaaatcggctcctacctcagtgctagcaccagacacagggtccttacctctgccttcagccgagccactagggacccgtttgcaccgtcccgggttgcgggtgtcctgggctttgctgccacccacaacctctactcaatgaacgactgtgcccagaagatcctgcctgtgctctgcggtctcactgtagatcctgagaaatccgtgcgagaccaggccttcaaggccattcggagcttcctgtccaaattggagtctgtgtcggaggacccgacccagctggaggaagtggagaaggatgtccatgcagcctccagccctggcatgggaggagccgcagctagctgggcaggctgggccgtgaccggggtctcctcactcacctccaagctgatccgttcgcacccaaccactgccccaacagaaaccaacattccccaaagacccacgcctgaaggagttcctgccccagcccccacccctgttcctgccacccctacaacctcaggccactgggagacgcaggaggaggacaaggacacagcagaggacagcagcactgctgacagatgggacgacgaagactggggcagcctggagcaggaggccgagtctgtgctggcccagcaggacgactggagcaccgggggccaagtgagccgtgctagtcaggtcagcaactccgaccacaaatcctccaaatccccagagtccgactggagcagctgggaagctgagggctcctgggaacagggctggcaggagccaagctcccaggagccacctcctgacggtacacggctggccagcgagtataactggggtggcccagagtccagcgacaagggcgaccccttcgctaccctgtctgcacgtcccagcacccagccgaggccagactcttggggtgaggacaactgggagggcctcgagactgacagtcgacaggtcaaggctgagctggcccggaagaagcgcgaggagcggcggcgggagatggaggccaaacgcgccgagaggaaggtggccaagggccccatgaagctgggagcccggaagctggactgaaccgtggcggtggcccttcccggctgcggagagcccgccccacagatgtatttattgtacaaaccatgtgagcccggccggcccagccaggccatctcacgtgtacataatcagagccacaataaattctatttcacaccccttgtgccgggctcagtctagcccctgggaggcggctggggtctggcgccgccctgcgcagcccgcgcccacgtcagacgtgaacatcaatttgcttcgaaagccaagggtaaagaggcacgatctgatttatcagtttctaggaaacaccctctgggaggaaggcaggcagcgcccgccggagaccttacaaccgcccgctaaccggggaggggggccggtaggggcgcctcgggtctcaaggcgccgggagggtctgcgggccctgaaggtccctgggtccgagccacaagtcggggcagaagtgaggccgagctcgcggaaatccctcagtgatcaccgaggtctgggccgagggcggcgtcggcggcgtcagcggcggcgctggggaacgcaggccccgtgcgggcggctgcgcgcgaagccggctttgcagacgcagcggaaggagccgctggtgttcacgcagcgctcgctcttgcacagcagcccgcgctggttcagctctcggcactcgtcgatatccacgcagcgggcgcgggaggcgtcgagctggaagccgccgggacactcgcacacggcgccgcccggccgcggcacgcagcggccactcacgcagcgacactcgtctgaatcctcctctgaactgtcctcatctcttgggggctttccccaacagcagggggcttgtgtcccagaaggaattgctctcgctctgcgatgtcgggcaatgggaccccgcgccgcgcggcgggcacggtcggcattgggcgccccagccgcggccctggcggcagcagcagtcgtcgaaggtgagggcaggcccggccagggggccagcgcacatgccgtcctctccgcgctggctccagcacacgtcgcgccgctccggggcacgctcggccgggctctcggggagctggcaatcgcggccggagggcccgggcacccagggcgggcgacactcgcagcggtaggagcccggcaggttgacgcagcggccagggcggc

SEQ ID NO: 101373 - DNA, 3604 bp, Homo sapiens
gggctcgggcgtgcggaggacccggagctaaggcgcccgaacccgcggcggcggtggggacgatgtggttctttgcccgggacccggtccgggactttccgttcgagctcatcccggagcccccagagggcggcctgcccgggccctgggccctgcaccgcggccgcaagaaggccacaggcagccccgtgtccatcttcgtctatgatgtgaagcctggcgcggaagagcagacccaggtggccaaagctgccttcaagcgcttcaaaactctacggcaccccaacatcctggcttacatcgatggactggagacagaaaaatgcctccacgtcgtgacagaggctgtgaccccgttgggaatatacctcaaggcgagagtggaggctggtggcctgaaggagctggagatctcctgggggctacaccagatcgtgaaagccctcagcttcctggtcaacgactgcagcctcatccacaacaatgtctgcatggccgccgtgttcgtggaccgagctggcgagtggaagcttgggggcctggactacatgtattcggcccagggcaacggtgggggacctccccgcaaggggatccccgagcttgagcagtatgaccccccggagttggctgacagcagtggcagagtggtcagagagaagtggtcagcagacatgtggcgcttgggctgcctcatttgggaagtcttcaatgggcccctacctcgggcagcagccctacgcaaccctgggaagatccccaaaacgctggtgccccattactgtgagctggtgggagcaaaccccaaggtgcgtcccaacccagcccgcttcctgcagaactgccgggcacctggtggcttcatgagcaaccgctttgtagaaaccaacctcttcctggaggagattcagatcaaagagccagccgagaagcaaaaattcttccaggagctgagcaagagcctggacgcattccctgaggatttctgtcggcacaaggtgctgccccagctgctgaccgccttcgagttcggcaatgctggggccgttgtcctcacgcccctcttcaaggtgggcaagttcctgagcgctgaggagtatcagcagaagatcatccctgtggtggtcaagatgttctcatccactgaccgggccatgcgcatccgcctcctgcagcagatggagcagttcatccagtaccttgacgagccaacagtcaacacccagatcttcccccacgtcgtacatggcttcctggacaccaaccctgccatccgggagcagacggtcaagtccatgctgctcctggccccaaagctgaacgaggccaacctcaatgtggagctgatgaagcactttgcacggctacaggccaaggatgaacagggccccatccgctgcaacaccacagtctgcctgggcaaaatcggctcctacctcagtgctagcaccagacacagggtccttacctctgccttcagccgagccactagggacccgtttgcaccgtcccgggttgcgggtgtcctgggctttgctgccacccacaacctctactcaatgaacgactgtgcccagaagatcctgcctgtgctctgcggtctcactgtagatcctgagaaatccgtgcgagaccaggccttcaaggccattcggagcttcctgtccaaattggagtctgtgtcggaggacccgacccagctggaggaagtggagaaggatgtccatgcagcctccagccctggcatgggaggagccgcagctagctgggcaggctgggccgtgaccggggtctcctcactcacctccaagctgatccgttcgcacccaaccactgccccaacagaaaccaacattccccaaagacccacgcctgaaggagttcctgccccagcccccacccctgttcctgccacccctacaacctcaggccactgggagacgcaggaggaggacaaggacacagcagaggacagcagcactgctgacagatgggacgacgaagactggggcagcctggagcaggaggccgagtctgtgctggcccagcaggacgactggagcaccgggggccaagtgagccgtgctagtcagagtccgactggagcagctgggaagctgagggctcctgggaacagggctggcaggagccaagctcccaggagccacctcctgacggtacacggctggccagcgagtataactggggtggcccagagtccagcgacaagggcgaccccttcgctaccctgtctgcacgtcccagcacccagccgaggccagactcttggggtgaggacaactgggagggcctcgagactgacagtcgacaggtcaaggctgagctggcccggaagaagcgcgaggagcggcggcgggagatggaggccaaacgcgccgagaggaaggtggccaagggccccatgaagctgggagcccggaagctggactgaaccgtggcggtggcccttcccggctgcggagagcccgccccacagatgtatttattgtacaaaccatgtgagcccggccggcccagccaggccatctcacgtgtacataatcagagccacaataaattctatttcacaccccttgtgccgggctcagtctagcccctgggaggcggctggggtctggcgccgccctgcgcagcccgcgcccacgtcagacgtgaacatcaatttgcttcgaaagccaagggtaaagaggcacgatctgatttatcagtttctaggaaacaccctctgggaggaaggcaggcagcgcccgccggagaccttacaaccgcccgctaaccggggaggggggccggtaggggcgcctcgggtctcaaggcgccgggagggtctgcgggccctgaaggtccctgggtccgagccacaagtcggggcagaagtgaggccgagctcgcggaaatccctcagtgatcaccgaggtctgggccgagggcggcgtcggcggcgtcagcggcggcgctggggaacgcaggccccgtgcgggcggctgcgcgcgaagccggctttgcagacgcagcggaaggagccgctggtgttcacgcagcgctcgctcttgcacagcagcccgcgctggttcagctctcggcactcgtcgatatccacgcagcgggcgcgggaggcgtcgagctggaagccgccgggacactcgcacacggcgccgcccggccgcggcacgcagcggccactcacgcagcgacactcgtctgaatcctcctctgaactgtcctcatctcttgggggctttccccaacagcagggggcttgtgtcccagaaggaattgctctcgctctgcgatgtcgggcaatgggaccccgcgccgcgcggcgggcacggtcggcattgggcgccccagccgcggccctggcggcagcagcagtcgtcgaaggtgagggcaggcccggccagggggccagcgcacatgccgtcctctccgcgctggctccagcacacgtcgcgccgctccggggcacgctcggccgggctctcggggagctggcaatcgcggccggagggcccgggcacccagggcgggcgacactcgcagcggtaggagcccggcaggttgacgcagcggccagggcggc

SEQ ID NO: 101374 - DNA, 3399 bp, Homo sapiens
atccacgcgtcgcggacgcgtgggttgaccacgcggtctgcaacatcctggcttacatcgatgtgactggagacagaaaaatgcctccacgtcgtgacagaggctgtgaccccgttgggaatatacctcaaggcgagagtggaggctggtggcctgaaggagctggagatctcctgggggctacaccagatcgtgaaagccctcagcttcctggtcaacgactgcagcctcatccacaacaatgtctgcatggccgccgtgttcgtggaccgagctggcgagtggaagcttgggggcctggactacatgtattcggcccagggcaacggtgggggacctccccgcaaggggatccccgagcttgagcagtatgaccccccggagttggctgacagcagtggcagagtggtcagagagaagtggtcagcagacatgtggcgcttgggctgcctcatttgggaagtcttcaatgggcccctacctcgggcagcagccctacgcaaccctgggaagatccccaaaacgctggtgccccattactgtgagctggtgggagcaaaccccaaggtgcgtcccaacccagcccgcttcctgcagaactgccgggcacctggtggcttcatgagcaaccgctttgtagaaaccaacctcttcctggaggagattcagatcaaagagccagccgagaagcaaaaattcttccaggagctgagcaagagcctggacgcattccctgaggatttctgtcggcacaaggtgctgccccagctgctgaccgccttcgagttcggcaatgctggggccgttgtcctcacgcccctcttcaaggtgggcaagttcctgagcgctgaggagtatcagcagaagatcatccctgtggtggtcaagatgttctcatccactgaccgggccatgcgcatccgcctcctgcagcagatggagcagttcatccagtaccttgacgagccaacagtcaacacccagatcttcccccacgtcgtacatggcttcctggacaccaaccctgccatccgggagcagacggtcaagtccatgctgctcctggccccaaagctgaacgaggccaacctcaatgtggagctgatgaagcactttgcacggctacaggccaaggatgaacagggccccatccgctgcaacaccacagtctgcctgggcaaaatcggctcctacctcagtgctagcaccagacacagggtccttacctctgccttcagccgagccactagggacccgtttgcaccgtcccgggttgcgggtgtcctgggctttgctgccacccacaacctctactcaatgaacgactgtgcccagaagatcctgcctgtgctctgcggtctcactgtagatcctgagaaatccgtgcgagaccaggccttcaaggccattcggagcttcctgtccaaattggagtctgtgtcggaggacccgacccagctggaggaagtggagaaggatgtccatgcagcctccagccctggcatgggaggagccgcagctagctgggcaggctgggccgtgaccggggtctcctcactcacctccaagctgatccgttcgcacccaaccactgccccaacagaaaccaacattccccaaagacccacgcctgaaggagttcctgccccagcccccacccctgttcctgccacccctacaacctcaggccactgggagacgcaggaggaggacaaggacacagcagaggacagcagcactgctgacagatgggacgacgaagactggggcagcctggagcaggaggccgagtctgtgctggcccagcaggacgactggagcaccgggggccaagtgagccgtgctagtcaggtcagcaactccgaccacaaatcctccaaatccccagagtccgactggagcagctgggaagctgagggctcctgggaacagggctggcaggagccaagctcccaggagccacctcctgacggtacacggctggccagcgagtataactggggtggcccagagtccagcgacaagggcgaccccttcgctaccctgtctgcacgtcccagcacccagccgaggccagactcttggggtgaggacaactgggagggcctcgagactgacagtcgacaggtcaaggctgagctggcccggaagaagcgcgaggagcggcggcgggagatggaggccaaacgcgccgagaggaaggtggccaagggccccatgaagctgggagcccggaagctggactgaaccgtggcggtggcccttcccggctgcggagagcccgccccacagatgtatttattgtacaaaccatgtgagcccggccggcccagccaggccatctcacgtgtacataatcagagccacaataaattctatttcacaccccttgtgccgggctcagtctagcccctgggaggcggctggggtctggcgccgccctgcgcagcccgcgcccacgtcagacgtgaacatcaatttgcttcgaaagccaagggtaaagaggcacgatctgatttatcagtttctaggaaacaccctctgggaggaaggcaggcagcgcccgccggagaccttacaaccgcccgctaaccggggaggggggccggtaggggcgcctcgggtctcaaggcgccgggagggtctgcgggccctgaaggtccctgggtccgagccacaagtcggggcagaagtgaggccgagctcgcggaaatccctcagtgatcaccgaggtctgggccgagggcggcgtcggcggcgtcagcggcggcgctggggaacgcaggccccgtgcgggcggctgcgcgcgaagccggctttgcagacgcagcggaaggagccgctggtgttcacgcagcgctcgctcttgcacagcagcccgcgctggttcagctctcggcactcgtcgatatccacgcagcgggcgcgggaggcgtcgagctggaagccgccgggacactcgcacacggcgccgcccggccgcggcacgcagcggccactcacgcagcgacactcgtctgaatcctcctctgaactgtcctcatctcttgggggctttccccaacagcagggggcttgtgtcccagaaggaattgctctcgctctgcgatgtcgggcaatgggaccccgcgccgcgcggcgggcacggtcggcattgggcgccccagccgcggccctggcggcagcagcagtcgtcgaaggtgagggcaggcccggccagggggccagcgcacatgccgtcctctccgcgctggctccagcacacgtcgcgccgctccggggcacgctcggccgggctctcggggagctggcaatcgcggccggagggcccgggcacccagggcgggcgacactcgcagcggtaggagcccggcaggttgacgcagcggccagggcggc

SEQ ID NO: 101375 - DNA, 3395 bp, Homo sapiens
gggctcgggcgtgcggaggacccggagctaaggcgcccgaacccgcggcggcggtggggacgatgtggttctttgcccgggacccggtccgggactttccgttcgagctcatcccggagcccccagagggcggcctgcccgggccctgggccctgcaccgcggccgcaagaaggccacaggcagccccgtgtccatcttcgtctatgatgtgaagcctggcgcggaagagcagacccaggtggccaaagctgccttcaagcgcttcaaaactctacggcaccccaacatcctggcttacatcgatggactggagacagaaaaatgcctccacgtcgtgacagaggctgtgaccccgttgggaatatacctcaaggcgagagtggaggctggtggcctgaaggagctggagatctcctgggggctacaccagatcgtgaaagccctcagcttcctggtcaacgactgcagcctcatccacaacaatgtctgcatggccgccgtgttcgtggaccgagctggcgagtggaagcttgggggcctggactacatgtattcggcccagggcaacggtgggggacctccccgcaaggggatccccgagcttgagcagtatgaccccccggagttggctgacagcagtggcagagtggtcagagagaagtggtcagcagacatgtggcgcttgggctgcctcatttgggaagtcttcaatgggcccctacctcgggcagcagccctacgcaaccctgggaagatccccaaaacgctggtgccccattactgtgagctggtgggagcaaaccccaaggtgcgtcccaacccagcccgcttcctgcagaactgccgggcacctggtggcttcatgagcaaccgctttgtagaaaccaacctcttcctggaggagattcagatcaaagagccagccgagaagcaaaaattcttccaggagctgagcaagagcctggacgcattccctgaggatttctgtcggcacaaggtgctgccccagctgctgaccgccttcgagttcggcaatgctggggccgttgtcctcacgcccctcttcaaggtgggcaagttcctgagcgctgaggagtatcagcagaagatcatccctgtggtggtcaagatgttctcatccactgaccgggccatgcgcatccgcctcctgcagcagatggagcagttcatccagtaccttgacgagccaacagtcaacacccagatcttcccccacgtcgtacatggcttcctggacaccaaccctgccatccgggagcagacggtcaagtccatgctgctcctggccccaaagctgaacgaggccaacctcaatgtggagctgatgaagcactttgcacggctacaggccaaggatgaacagggccccatccgctgcaacaccacagtctgcctgggcaaaatcggctcctacctcagtgctagcaccagacacagggtccttacctctgccttcagccgagccactagggacccgtttgcaccgtcccgggttgcgggtgtcctgggctttgctgccacccacaacctctactcaatgaacgactgtgcccagaagatcctgcctgtgctctgcggtctcactgtagatcctgagaaatccgtgcgagaccaggccttcaaggccattcggagcttcctgtccaaattggagtctgtgtcggaggacccgacccagctggaggaagtggagaaggatgtccatgcagcctccagccctggcatgggaggagccgcagctagctgggcaggctgggccgtgaccggggtctcctcactcacctccaagctgatccgttcgcacccaaccactgccccaacagaaaccaacattccccaaagacccacgcctgaaggagttcctgccccagcccccacccctgttcctgccacccctacaacctcaggccactgggagacgcaggaggaggacaaggacacagcagaggacagcagcactgctgacagatgggacgacgaagactggggcagcctggagcaggaggccgagtctgtgctggcccagcaggacgactggagcaccgggggccaagtgagccgtgctagtcaggtcagcaactccgaccacaaatcctccaaatccccagagtccgactggagcagctgggaagctgagggctcctgggaacagggctggcaggagccaagctcccaggagccacctcctgacggtacacggctggccagcgagtataactggggtggcccagagtccagcgacaagggcgaccccttcgctaccctgtctgcacgtcccagcacccagccgaggccagactcttggggtgaggacaactgggagggcctcgagactgacagtcgacaggtcaaggctgagctggcccggaagaagcgcgaggagcggcggcgggagatggaggccaaacgcgccgagaggaaggtggccaagggccccatgaagctgggagcccggaagctggactgaaccgtggcggtggcccttcccggctgcggagagcccgccccacagatgtatttattgtacaaaccatgtgagcccggccggcccagccaggccatctcacgtgtacataatcagagccacaataaattctatttcacaccccttgtgccgggctcagtctagcccctgggaggcggctggggtctggcgccgccctgcgcagcccgcgcccacgtcagacgtgaacatcaatttgcttcgaaagccaagggtaaagaggcacgatctgatttatcagtttctaggaaacaccctctgggaggaaggcaggcagcgcccgccggagaccttacaaccgcccgctaaccggggaggggggccggtaggggcgcctcgggtctcaaggcgccgggagggtctgcgggccctgaaggtccctgggtccgagccacaagtcggggcagaagtgaggccgagctcgcggaaatccctcagtgatcaccgaggtctgggccgagggcggccactcacgcagcgacactcgtctgaatcctcctctgaactgtcctcatctcttgggggctttccccaacagcagggggcttgtgtcccagaaggaattgctctcgctctgcgatgtcgggcaatgggaccccgcgccgcgcggcgggcacggtcggcattgggcgccccagccgcggccctggcggcagcagcagtcgtcgaaggtgagggcaggcccggccagggggccagcgcacatgccgtcctctccgcgctggctccagcacacgtcgcgccgctccggggcacgctcggccgggctctcggggagctggcaatcgcggccggagggcccgggcacccagggcgggcgacactcgcagcggtaggagcccggcaggttgacgcagcggccagggcggc

SEQ ID NO: 101376 - DNA, 3145 bp, Homo sapiens
  misc_feature (2921)..(2921): n is a, c, g, or t
  misc_feature (2925)..(2925): n is a, c, g, or t
  misc_feature (2944)..(2944): n is a, c, g, or t
  misc_feature (2997)..(2997): n is a, c, g, or t
  misc_feature (3002)..(3002): n is a, c, g, or t
  misc_feature (3005)..(3005): n is a, c, g, or t
  misc_feature (3007)..(3007): n is a, c, g, or t
  misc_feature (3010)..(3010): n is a, c, g, or t
  misc_feature (3013)..(3013): n is a, c, g, or t
  misc_feature (3015)..(3015): n is a, c, g, or t
  misc_feature (3035)..(3035): n is a, c, g, or t
  misc_feature (3037)..(3037): n is a, c, g, or t
  misc_feature (3048)..(3048): n is a, c, g, or t
  misc_feature (3073)..(3073): n is a, c, g, or t
gggctcgggcgtgcggaggacccggagctaaggcgcccgaacccgcggcggcggtggggacgatgtggttctttgcccgggacccggtccgggactttccgttcgagctcatcccggagcccccagagggcggcctgcccgggccctgggccctgcaccgcggccgcaagaaggccacaggcagccccgtgtccatcttcgtctatgatgtgaagcctggcgcggaagagcagacccaggtggccaaagctgccttcaagcgcttcaaaactctacggcaccccaacatcctggcttacatcgatggactggagacagaaaaatgcctccacgtcgtgacagaggctgtgaccccgttgggaatatacctcaaggcgagagtggaggctggtggcctgaaggagctggagatctcctgggggctacaccagatcgtgaaagccctcagcttcctggtcaacgactgcagcctcatccacaacaatgtctgcatggccgccgtgttcgtggaccgagctggcgagtggaagcttgggggcctggactacatgtattcggcccagggcaacggtgggggacctccccgcaaggggatccccgagcttgagcagtatgaccccccggagttggctgacagcagtggcagagtggtcagagagaagtggtcagcagacatgtggcgcttgggctgcctcatttgggaagtcttcaatgggcccctacctcgggcagcagccctacgcaaccctgggaagatccccaaaacgctggtgccccattactgtgagctggtgggagcaaaccccaaggtgcgtcccaacccagcccgcttcctgcagaactgccgggcacctggtggcttcatgagcaaccgctttgtagaaaccaacctcttcctggaggagattcagatcaaagagccagccgagaagcaaaaattcttccaggagctgagcaagagcctggacgcattccctgaggatttctgtcggcacaaggtgctgccccagctgctgaccgccttcgagttcggcaatgctggggccgttgtcctcacgcccctcttcaaggtgggcaagttcctgagcgctgaggagtatcagcagaagatcatccctgtggtggtcaagatgttctcatccactgaccgggccatgcgcatccgcctcctgcagcagatggagcagttcatccagtaccttgacgagccaacagtcaacacccagatcttcccccacgtcgtacatggcttcctggacaccaaccctgccatccgggagcagacggtcaagtccatgctgctcctggccccaaagctgaacgaggccaacctcaatgtggagctgatgaagcactttgcacggctacaggccaaggatgaacagggccccatccgctgcaacaccacagtctgcctgggcaaaatcggctcctacctcagtgctagcaccagacacagggtccttacctctgccttcagccgagccactagggacccgtttgcaccgtcccgggttgcgggtgtcctgggctttgctgccacccacaacctctactcaatgaacgactgtgcccagaagatcctgcctgtgctctgcggtctcactgtagatcctgagaaatccgtgcgagaccaggccttcaaggccattcggagcttcctgtccaaattggagtctgtgtcggaggacccgacccagctggaggaagtggagaaggatgtccatgcagcctccagccctggcatgggaggagccgcagctagctgggcaggctgggccgtgaccggggtctcctcactcacctccaagctgatccgttcgcacccaaccactgccccaacagaaaccaacattccccaaagacccacgcctgaaggagttcctgccccagcccccacccctgttcctgccacccctacaacctcaggccactgggagacgcaggaggaggacaaggacacagcagaggacagcagcactgctgacagatgggacgacgaagactggggcagcctggagcaggaggccgagtctgtgctggcccagcaggacgactggagcaccgggggccaagtgagccgtgctagtcaggtcagcaactccgaccacaaatcctccaaatccccagagtccgactggagcagctgggaagctgagggctcctgggaacagggctggcaggagccaagctcccaggagccacctcctgacggtacacggctggccagcgagtataactggggtggcccagagtccagcgacaagggcgaccccttcgctaccctgtctgcacgtcccagcacccagccgaggccagactcttggggtgaggacaactgggagggcctcgagactgacagtcgacaggtcaaggctgagctggcccggaagaagcgcgaggagcggcggcgggagatggaggccaaacgcgccgagaggaaggtggccaagggccccatgaagctgggagcccggaagctggactgaaccgtggcggtggcccttcccggctgcggagagcccgccccacagatgtatttattgtacaaaccatgtgagcccggccggcccagccaggccatctcacgtgtacataatcagagccacaataaattctatttcacaaaaaaaaaaaaaaaaaaaaaaaaaaaaaaaaaaaaaaaaaaaaaaaaaaaaaaaaaaaaaaaaaaaaaaaaaaaaaaaaaaaaaaaaaaaaaaaaaaccctcgggccaaattcggcacgagcttaagtgtttaaagcattggttttttttaaagctcattggtgacacccccatggacaccttcctaatggaaatgcttgaggctcccaataaactggcctgagctaaaacccaaacggggggcttttaacactggaggagcccacatccaagagggactccaagccctggggnaggntggggggccatgttcccanaaccttgatggggtgagaagtccagggcggaccccagatacctgtgaggactngttgnctntnttnggngnccttgagtctttgaatttgncngggtctcccangatttggggggatttctaacctttntcctttccccagcacaaagcactggccttggttccagaacttgttcctttttattctggctaatttggcttc

SEQ ID NO: 101377 - DNA, 3256 bp, Homo sapiens
  misc_feature (2995)..(2995): n is a, c, g, or t
  misc_feature (3000)..(3000): n is a, c, g, or t
  misc_feature (3003)..(3003): n is a, c, g, or t
  misc_feature (3005)..(3005): n is a, c, g, or t
  misc_feature (3008)..(3008): n is a, c, g, or t
  misc_feature (3011)..(3011): n is a, c, g, or t
  misc_feature (3013)..(3013): n is a, c, g, or t
  misc_feature (3033)..(3033): n is a, c, g, or t
  misc_feature (3035)..(3035): n is a, c, g, or t
  misc_feature (3046)..(3046): n is a, c, g, or t
  misc_feature (3071)..(3071): n is a, c, g, or t
  misc_feature (3121)..(3121): n is a, c, g, or t
gggctcgggcgtgcggaggacccggagctaaggcgcccgaacccgcggcggcggtggggacgatgtggttctttgcccgggacccggtccgggactttccgttcgagctcatcccggagcccccagagggcggcctgcccgggccctgggccctgcaccgcggccgcaagaaggccacaggcagccccgtgtccatcttcgtctatgatgtgaagcctggcgcggaagagcagacccaggtggccaaagctgccttcaagcgcttcaaaactctacggcaccccaacatcctggcttacatcgatggactggagacagaaaaatgcctccacgtcgtgacagaggctgtgaccccgttgggaatatacctcaaggcgagagtggaggctggtggcctgaaggagctggagatctcctgggggctacaccagatcgtgaaagccctcagcttcctggtcaacgactgcagcctcatccacaacaatgtctgcatggccgccgtgttcgtggaccgagctggcgagtggaagcttgggggcctggactacatgtattcggcccagggcaacggtgggggacctccccgcaaggggatccccgagcttgagcagtatgaccccccggagttggctgacagcagtggcagagtggtcagagagaagtggtcagcagacatgtggcgcttgggctgcctcatttgggaagtcttcaatgggcccctacctcgggcagcagccctacgcaaccctgggaagatccccaaaacgctggtgccccattactgtgagctggtgggagcaaaccccaaggtgcgtcccaacccagcccgcttcctgcagaactgccgggcacctggtggcttcatgagcaaccgctttgtagaaaccaacctcttcctggaggagattcagatcaaagagccagccgagaagcaaaaattcttccaggagctgagcaagagcctggacgcattccctgaggatttctgtcggcacaaggtgctgccccagctgctgaccgccttcgagttcggcaatgctggggccgttgtcctcacgcccctcttcaaggtgggcaagttcctgagcgctgaggagtatcagcagaagatcatccctgtggtggtcaagatgttctcatccactgaccgggccatgcgcatccgcctcctgcagcagatggagcagttcatccagtaccttgacgagccaacagtcaacacccagatcttcccccacgtcgtacatggcttcctggacaccaaccctgccatccgggagcagacggtcaagtccatgctgctcctggccccaaagctgaacgaggccaacctcaatgtggagctgatgaagcactttgcacggctacaggccaaggatgaacagggccccatccgctgcaacaccacagtctgcctgggcaaaatcggctcctacctcagtgctagcaccagacacagggtccttacctctgccttcagccgagccactagggacccgtttgcaccgtcccgggttgcgggtgtcctgggctttgctgccacccacaacctctactcaatgaacgactgtgcccagaagatcctgcctgtgctctgcggtctcactgtagatcctgagaaatccgtgcgagaccaggccttcaaggccattcggagcttcctgtccaaattggagtctgtgtcggaggacccgacccagctggaggaagtggagaaggatgtccatgcagcctccagccctggcatgggaggagccgcagctagctgggcaggctgggccgtgaccggggtctcctcactcacctccaagctgatccgttcgcacccaaccactgccccaacagaaaccaacattccccaaagacccacgcctgaaggagttcctgccccagcccccacccctgttcctgccacccctacaacctcaggccactgggagacgcaggaggaggacaaggacacagcagaggacagcagcactgctgacagatgggacgacgaagactggggcagcctggagcaggaggccgagtctgtgctggcccagcaggacgactggagcaccgggggccaagtgagccgtgctagtcaggtcagcaactccgaccacaaatcctccaaatccccagagtccgactggagcagctgggaagctgagggctcctgggaacagggctggcaggagccaagctcccaggagccacctcctgacggtacacggctggccagcgagtataactggggtggcccagagtccagcgacaagggcgaccccttcgctaccctgtctgcacgtcccagcacccagccgaggccagactcttggggtgaggacaactgggagggcctcgagactgacagtcgacaggtcaaggctgagctggcccggaagaagcgcgaggagcggcggcgggagatggaggccaaacgcgccgagaggaaggtggccaagggccccatgaagctgggagcccggaagctggactgaaccgtggcggtggcccttcccggctgcggagagcccgccccacagatgtatttattgtacaaaccatgtgagcccggccggcccagccaggccatctcacgtgtacataatcagagccacaataaattctatttcacaaaaaaaaaaaaaaaaaaaaaaaaaaaaaaaaaaaaaaaaaaaaaaaaaaaaaaaaaaaaaaaaaaaaaaaaaaaaaaaaaaaaaaaaaaaaaaaaaaccctcgggccaaattcggcacgagcttaagtgtttaaagcattggttttttttaaagctcattggtgacacccccatggacaccttcctaatggaaatgcttgaggctcccaataaactggcctgagctaaaacccaaacggggggcttttaacactggaggagcccacatccatggggtgagaagtacagggcagaaccaagccataaaccctccaaggatctgcttgatatcccaagttggaaggaaccccagatacctgtgaggactngttgnctntnttnggngnccttgagtctttgaatttgncngggtctcccangatttggggggatttctaacctttntcctttccccataccaaagattgcctttgcctcagggacttggtcctttnaatttgccaaatttgcttccaattgaagaatggaatggggactccccaaagtggaactggggggaggcctcccactgtggacttaaattgggcctaaaggctttttttttaacccggaaatgggcctttttgaaa

SEQ ID NO: 101378 - DNA, 2693 bp, Homo sapiens
gggctcgggcgtgcggaggacccggagctaaggcgcccgaacccgcggcggcggtggggacgatgtggttctttgcccgggacccggtccgggactttccgttcgagctcatcccggagcccccagagggcggcctgcccgggccctgggccctgcaccgcggccgcaagaaggccacaggcagccccgtgtccatcttcgtctatgatgtgaagcctggcgcggaagagcagacccaggtggccaaagctgccttcaagcgcttcaaaactctacggcaccccaacatcctggcttacatcgatggactggagacagaaaaatgcctccacgtcgtgacagaggctgtgaccccgttgggaatatacctcaaggcgagagtggaggctggtggcctgaaggagctggagatctcctgggggctacaccagatcgtgaaagccctcagcttcctggtcaacgactgcagcctcatccacaacaatgtctgcatggccgccgtgttcgtggaccgagctggcgagtggaagcttgggggcctggactacatgtattcggcccagggcaacggtgggggacctccccgcaaggggatccccgagcttgagcagtatgaccccccggagttggctgacagcagtggcagagtggtcagagagaagtggtcagcagacatgtggcgcttgggctgcctcatttgggaagtcttcaatgggcccctacctcgggcagcagccctacgcaaccctgggaagatccccaaaacgctggtgccccattactgtgagctggtgggagcaaaccccaaggtgcgtcccaacccagcccgcttcctgcagaactgccgggcacctggtggcttcatgagcaaccgctttgtagaaaccaacctcttcctggaggagattcagatcaaagagccagccgagaagcaaaaattcttccaggagctgagcaagagcctggacgcattccctgaggatttctgtcggcacaaggtgctgccccagctgctgaccgccttcgagttcggcaatgctggggccgttgtcctcacgcccctcttcaaggtgggcaagttcctgagcgctgaggagtatcagcagaagatcatccctgtggtggtcaagatgttctcatccactgaccgggccatgcgcatccgcctcctgcagcagatggagcagttcatccagtaccttgacgagccaacagtcaacacccagatcttcccccacgtcgtacatggcttcctggacaccaaccctgccatccgggagcagacggtcaagtccatgctgctcctggccccaaagctgaacgaggccaacctcaatgtggagctgatgaagcactttgcacggctacaggccaaggatgaacagggccccatccgctgcaacaccacagtctgcctgggcaaaatcggctcctacctcagtgctagcaccagacacagggtccttacctctgccttcagccgagccactagggacccgtttgcaccgtcccgggttgcgggtgtcctgggctttgctgccacccacaacctctactcaatgaacgactgtgcccagaagatcctgcctgtgctctgcggtctcactgtagatcctgagaaatccgtgcgagaccaggccttcaaggccattcggagcttcctgtccaaattggagtctgtgtcggaggacccgacccagctggaggaagtggagaaggatgtccatgcagcctccagccctggcatgggaggagccgcagctagctgggcaggctgggccgtgaccggggtctcctcactcacctccaagctgatccgttcgcacccaaccactgccccaacagaaaccaacattccccaaagacccacgcctgaaggccactgggagacgcaggaggaggacaaggacacagcagaggacagcagcactgctgacagatgggacgacgaagactggggcagcctggagcaggaggccgagtctgtgctggcccagcaggacgactggagcaccgggggccaagtgagccgtgctagtcaggtcagcaactccgaccacaaatcctccaaatccccagagtccgactggagcagctgggaagctgagggctcctgggaacagggctggcaggagccaagctcccaggagccacctcctgacggtacacggctggccagcgagtataactggggtggcccagagtccagcgacaagggcgaccccttcgctaccctgtctgcacgtcccagcacccagccgaggccagactcttggggtgaggacaactgggagggcctcgagactgacagtcgtaagtgcttcccctgggtgggctgaagactagggctccccgactagcccgcccctacaggcccccggcaggcactggctggagagctgagaccggggctccccttcctgacgccaggacaggtcaaggctgagctggcccggaagaagcgcgaggagcggcggcgggagatggaggccaaacgcgccgagaggaaggtggccaagggccccatgaagctgggagcccggaagctggactgaaccgtggcggtggcccttcccggctgcggagagcccgccccacagatgtatttattgtacaaaccatgtgagcccggccggcccagccaggccatctcacgtgtacataatcagagccacaataaattctatttcaca

SEQ ID NO: 101379 - DNA, 2614 bp, Homo sapiens
tggacagctggacagcacagaggaggtggacagcacgggacaggtgggcaagttcctgagcgctgaggagtatcagcagaagatcatccctgtggtggtcaagatgttctcatccactgaccgggccatgcgcatccgcctcctgcagcagatggagcagttcatccagtaccttgacgagccaacagtcaacacccagatcttcccccacgtcgtacatggcttcctggacaccaaccctgccatccgggagcagacggtcaagtccatgctgctcctggccccaaagctgaacgaggccaacctcaatgtggagctgatgaagcactttgcacggctacaggccaaggatgaacagggccccatccgctgcaacaccacagtctgcctgggcaaaatcggctcctacctcagtgctagcaccagacacagggtccttacctctgccttcagccgagccactagggacccgtttgcaccgtcccgggttgcgggtgtcctgggctttgctgccacccacaacctctactcaatgaacgactgtgcccagaagatcctgcctgtgctctgcggtctcactgtagatcctgagaaatccgtgcgagaccaggccttcaaggccattcggagcttcctgtccaaattggagtctgtgtcggaggacccgacccagctggaggaagtggagaaggatgtccatgcagcctccagccctggcatgggaggagccgcagctagctgggcaggctgggccgtgaccggggtctcctcactcacctccaagctgatccgttcgcacccaaccactgccccaacagaaaccaacattccccaaagacccacgcctgaaggagttcctgccccagcccccacccctgttcctgccacccctacaacctcaggccactgggagacgcaggaggaggacaaggacacagcagaggacagcagcactgctgacagatgggacgacgaagactggggcagcctggagcaggaggccgagtctgtgctggcccagcaggacgactggagcaccgggggccaagtgagccgtgctagtcaggtcagcaactccgaccacaaatcctccaaatccccagagtccgactggagcagctgggaagctgagggctcctgggaacagggctggcaggagccaagctcccaggagccacctcctgacggtacacggctggccagcgagtataactggggtggcccagagtccagcgacaagggcgaccccttcgctaccctgtctgcacgtcccagcacccagccgaggccagactcttggggtgaggacaactgggagggcctcgagactgacagtcgacaggtcaaggctgagctggcccggaagaagcgcgaggagcggcggcgggagatggaggccaaacgcgccgagaggaaggtggccaagggccccatgaagctgggagcccggaagctggactgaaccgtggcggtggcccttcccggctgcggagagcccgccccacagatgtatttattgtacaaaccatgtgagcccggccggcccagccaggccatctcacgtgtacataatcagagccacaataaattctatttcacaccccttgtgccgggctcagtctagcccctgggaggcggctggggtctggcgccgccctgcgcagcccgcgcccacgtcagacgtgaacatcaatttgcttcgaaagccaagggtaaagaggcacgatctgatttatcagtttctaggaaacaccctctgggaggaaggcaggcagcgcccgccggagaccttacaaccgcccgctaaccggggaggggggccggtaggggcgcctcgggtctcaaggcgccgggagggtctgcgggccctgaaggtccctgggtccgagccacaagtcggggcagaagtgaggccgagctcgcggaaatccctcagtgatcaccgaggtctgggccgagggcggcgtcggcggcgtcagcggcggcgctggggaacgcaggccccgtgcgggcggctgcgcgcgaagccggctttgcagacgcagcggaaggagccgctggtgttcacgcagcgctcgctcttgcacagcagcccgcgctggttcagctctcggcactcgtcgatatccacgcagcgggcgcgggaggcgtcgagctggaagccgccgggacactcgcacacggcgccgcccggccgcggcacgcagcggccactcacgcagcgacactcgtctgaatcctcctctgaactgtcctcatctcttgggggctttccccaacagcagggggcttgtgtcccagaaggaattgctctcgctctgcgatgtcgggcaatgggaccccgcgccgcgcggcgggcacggtcggcattgggcgccccagccgcggccctggcggcagcagcagtcgtcgaaggtgagggcaggcccggccagggggccagcgcacatgccgtcctctccgcgctggctccagcacacgtcgcgccgctccggggcacgctcggccgggctctcggggagctggcaatcgcggccggagggcccgggcacccagggcgggcgacactcgcagcggtaggagcccggcaggttgacgcagcggccagggcggc

SEQ ID NO: 101380 - DNA, 2410 bp, Homo sapiens
ttcctgcggttgactctagagcgatcccgtcacaagctgtccatccgggagcagacggtcatccatgctgctcctggccccaaagctgaacgaggccaacctcaatgtggagctgatgaagcactttgcacggctacaggccaaggatgaacagggccccatccgctgcaacaccacagtctgcctgggcaaaatcggctcctacctcagtgctagcaccagacacagggtccttacctctgccttcagccgagccactagggacccgtttgcaccgtcccgggttgcgggtgtcctgggctttgctgccacccacaacctctactcaatgaacgactgtgcccagaagatcctgcctgtgctctgcggtctcactgtagatcctgagaaatccgtgcgagaccaggccttcaaggccattcggagcttcctgtccaaattggagtctgtgtcggaggacccgacccagctggaggaagtggagaaggatgtccatgcagcctccagccctggcatgggaggagccgcagctagctgggcaggctgggccgtgaccggggtctcctcactcacctccaagctgatccgttcgcacccaaccactgccccaacagaaaccaacattccccaaagacccacgcctgaaggagttcctgccccagcccccacccctgttcctgccacccctacaacctcaggccactgggagacgcaggaggaggacaaggacacagcagaggacagcagcactgctgacagatgggacgacgaagactggggcagcctggagcaggaggccgagtctgtgctggcccagcaggacgactggagcaccgggggccaagtgagccgtgctagtcaggtcagcaactccgaccacaaatcctccaaatccccagagtccgactggagcagctgggaagctgagggctcctgggaacagggctggcaggagccaagctcccaggagccacctcctgacggtacacggctggccagcgagtataactggggtggcccagagtccagcgacaagggcgaccccttcgctaccctgtctgcacgtcccagcacccagccgaggccagactcttggggtgaggacaactgggagggcctcgagactgacagtcgacaggtcaaggctgagctggcccggaagaagcgcgaggagcggcggcgggagatggaggccaaacgcgccgagaggaaggtggccaagggccccatgaagctgggagcccggaagctggactgaaccgtggcggtggcccttcccggctgcggagagcccgccccacagatgtatttattgtacaaaccatgtgagcccggccggcccagccaggccatctcacgtgtacataatcagagccacaataaattctatttcacaccccttgtgccgggctcagtctagcccctgggaggcggctggggtctggcgccgccctgcgcagcccgcgcccacgtcagacgtgaacatcaatttgcttcgaaagccaagggtaaagaggcacgatctgatttatcagtttctaggaaacaccctctgggaggaaggcaggcagcgcccgccggagaccttacaaccgcccgctaaccggggaggggggccggtaggggcgcctcgggtctcaaggcgccgggagggtctgcgggccctgaaggtccctgggtccgagccacaagtcggggcagaagtgaggccgagctcgcggaaatccctcagtgatcaccgaggtctgggccgagggcggcgtcggcggcgtcagcggcggcgctggggaacgcaggccccgtgcgggcggctgcgcgcgaagccggctttgcagacgcagcggaaggagccgctggtgttcacgcagcgctcgctcttgcacagcagcccgcgctggttcagctctcggcactcgtcgatatccacgcagcgggcgcgggaggcgtcgagctggaagccgccgggacactcgcacacggcgccgcccggccgcggcacgcagcggccactcacgcagcgacactcgtctgaatcctcctctgaactgtcctcatctcttgggggctttccccaacagcagggggcttgtgtcccagaaggaattgctctcgctctgcgatgtcgggcaatgggaccccgcgccgcgcggcgggcacggtcggcattgggcgccccagccgcggccctggcggcagcagcagtcgtcgaaggtgagggcaggcccggccagggggccagcgcacatgccgtcctctccgcgctggctccagcacacgtcgcgccgctccggggcacgctcggccgggctctcggggagctggcaatcgcggccggagggcccgggcacccagggcgggcgacactcgcagcggtaggagcccggcaggttgacgcagcggccagggcggc

SEQ ID NO: 101381 - DNA, 1947 bp, Homo sapiens
gggctcgggcgtgcggaggacccggagctaaggcgcccgaacccgcggcggcggtggggacgatgtggttctttgcccgggacccggtccgggactttccgttcgagctcatcccggagcccccagagggcggcctgcccgggccctgggccctgcaccgcggccgcaagaaggccacaggcagccccgtgtccatcttcgtctatgatgtgaagcctggcgcggaagagcagacccaggtggccaaagctgccttcaagcgcttcaaaactctacggcaccccaacatcctggcttacatcgatggactggagacagaaaaatgcctccacgtcgtgacagaggctgtgaccccgttgggaatatacctcaaggcgagagtggaggctggtggcctgaaggagctggagatctcctgggggctacaccagatcgtgaaagccctcagcttcctggtcaacgactgcagcctcatccacaacaatgtctgcatggccgccgtgttcgtggaccgagctggcgagtggaagcttgggggcctggactacatgtattcggcccagggcaacggtgggggacctccccgcaaggggatccccgagcttgagcagtatgaccccccggagttggctgacagcagtggcagagtggtcagagagaagtggtcagcagacatgtggcgcttgggctgcctcatttgggaagtcttcaatgggcccctacctcgggcagcagccctacgcaaccctgggaagatccccaaaacgctggtgccccattactgtgagctggtgggagcaaaccccaaggtgcgtcccaacccagcccgcttcctgcagaactgccgggcacctggtggcttcatgagcaaccgctttgtagaaaccaacctcttcctggaggagattcagatcaaagagccagccgagaagcaaaaattcttccaggagctgagcaagagcctggacgcattccctgaggatttctgtcggcacaaggtgctgccccagctgctgaccgccttcgagttcggcaatgctggggccgttgtcctcacgcccctcttcaaggtgggcaagttcctgagcgctgaggagtatcagcagaagatcatccctgtggtggtcaagatgttctcatccactgaccgggccatgcgcatccgcctcctgcagcagatggagcagttcatccagtaccttgacgagccaacagtcaacacccagatcttcccccacgtcgtacatggcttcctggacaccaaccctgccatccgggagcagacggtcaagtccatgctgctcctggccccaaagctgaacgaggccaacctcaatgtggagctgatgaagcactttgcacggctacaggccaaggatgaacagggccccatccgctgcaacaccacagtctgcctgggcaaaatcggctcctacctcagtgctagcaccagacacagggtccttacctctgccttcagccgagccactagggacccgtttgcaccgtcccgggttgcgggtgtcctgggctttgctgccacccacaacctctactcaatgaacgactgtgcccagaagatcctgcctgtgctctgcggtctcactgtagatcctgagaaatccgtgcgagaccaggccttcaaggccattcggagcttcctgtccaaattggagtctgtgtcggaggacccgacccagctggaggaagtggagaaggatgtccatgcagcctccagccctggcatgggaggagccgcagctagctgggcaggctgggccgtgaccggggtctcctcactcacctccaagctgatccgttcgcacccaaccactgccccaacagaaaccaacattccccaaagacccacgcctgaagccactgggagacgcaggaggagaagacacagctaggtcatgacacagctgggggtcctctaagtcggta

SEQ ID NO: 101382 - DNA, 944 bp, Homo sapiens
tgctgggattacaggcgtgagtaaatttttgtatttttagtacagatagggtttcaccatgttggccaggctggtctcgaactcctgacctcaagtggtctgcccacctcggcctcccaaagtgctgggattacagatgtgagccaccgtgcccggctcagttgccatctttattggctagggaggaggggtgcctaaggtgctagtgtcagggatcactgagttggcaatagatctgattaactccagagagatctctgcttgccatcaaggctgggaaagaacgtgatgctctggaagcctatgaccacagttttagtaggcaggtagtttcctgctgcctccatagttacagtttaacttgctaaggttggtaggatgaaggtaatagattgcttcaggcacctgcactatgagagctgggtggatatgtcaacagaatggcacatctgtcagtgccaggaaacagacaccctggagtccttcccagctgttcttgaatcgtaagctccctgaactcagtgctccgtccctggggggaacgcctgccctagctgcatcccacaacgcaaaggggcttctccctgtgggagagctgtcagaaggagtcagaaaagtaaatatatgctgactcgcctcaaagattcataaatctggctccctgcttttgttagaaattggcttgcctcattgtcagctcagttgtggctgaactgtctgtcccaggtgaacagtgagatcaagtactggtgaaggctagaaagtgttttaatgatccctttttatgtgattagctgaagagcatctgacgatcaagttagggtagcataggtgctcactccgttgactcaaggctaaccttgctgtgaattctagcactctgactcatctctggggggccagagtagcttctgtttggacagtgcgaaactgatgaaaaacaa

SEQ ID NO: 101383 - DNA, 217 bp, Homo sapiens
gcacccctaatcagtcaagctgggatttacacttggagctgatgctgccagaactctgtctactgcacttggtcttgctcatggaaggatttggacagagcaggggcaagatcagctttgccctttagaaggaatcccctggcagctgcctgggggagggagtgcaggagaagaaagtccattgaggagcccccagcaggggtgctggatggagggg

SEQ ID NO: 101384 - DNA, 441 bp, Homo sapiens
tattaataccaagactgggtagaaaacaaaatccagctgcatgctgttccaagaaatatgcctaagacttaaagatggagaaaaattaaaaagtaaaaggataaggatagatacataccaatcaaaacggtggttgccaaaaatcacacaaaatgaactgcagggcaaaaagtagatactgatgaaagttcccccaggaagatgtaacaattctcaacctgtactcaccaaataatacagctgcaaaatatgtgagcaaaaatggacaggaccacaatgataaacaaatctaccataaatcaaggtttttaaaaaacatactctcagtaatttatagatcaaaggataaccacaaaaaaggtccaataaggatacagaaaaaatgaatgacaaaaagcaattaagaagtttgatctaataggtaaatatgaagcagttctt

SEQ ID NO: 101385 - DNA, 189 bp, Homo sapiens
gaaaatctaatgtaatggatgcacttagttttgtaatgggagagaaaatagctaatttaagagtgaaaaatattcaagaactcattcatggagcacatattggaaaacctatttcttcttctgcaagtgtaaaaattatatatgtggaggaaagtggcgaagagaaaacatttgcaaggattatccgag

SEQ ID NO: 101386 - DNA, 421 bp, Homo sapiens
ccccgccccaacagggctaagctgatacacacactgcggatgcaggcctgcctgctgggccttcctggtgtttgttttttccaggcaaagcacctctctctgcctcctgctggtttattcagcagtgtcccagggtttgctcattgtctgctttgcttcagacccttctatcaaattccattgtctctgtcttaatggtctttgcagggtaggcatggcatctgcatgttcactgaagggcctgcctgcatttccagggagagaaagccttcaggccactggtgcataaagatctttggaaatgtccagaagatcccaaacattgcctgtcctgcatgccaggcctcacttgccaccagcctgctccccagccgcacatccagctgtcatttcctagagaacccatcccacgcagttgttt

SEQ ID NO: 101387 - DNA, 404 bp, Homo sapiens
gcggccgcctactactactaaattcgcggccgcgtcgactgaattatgtctcaatgtgaaggggagggagaagggatccgaagaaaagtcatgttgcaaccaaagttataaggtagttaagagtagaaaggaggtacatgtagagtgagcagttatatatcctggagtcagaaagatacactttctaggtcttctagctgcagagctcctgattagattacagttcagtccacctgtgtccttataagaaagccctttcatatatgctagcttgagtggacatctgttccttgcagccaaacaagaccttcaaacgggacctgtttaaaaataattcctgaaacctttcattattttttcactccccctttctcattacctgttgacttccctttaattataca

SEQ ID NO: 101388 - DNA, 133 bp, Homo sapiens
gcttccaagcagagcccactgaatcaaagttgggtttcaggaagatcacggagttcagtgagcactcaacacctctatcagacagactgcgtgggcagtgccttcctggagaggggaacacagccggatgact

SEQ ID NO: 101389 - DNA, 3848 bp, Homo sapiens
gatttttaagttaagttttgaggtgtgactgtatcagagggaaagaaaccatgccaattgaacgactcacagccctgtcgttcctgacttgcttattttcttggctttgccagaacttcttcagagaccaaggcaggcagctctggcgactggagagaggcggggtagaaggtgtttgtgtgggtctgagggctgaggtaccctctagccagactttcctgtcctccgaatccagcagggaacagcgtcacctctgcctctgtgaggcttctgatctgagggggcacctcaagtcattttagtttgtttgttttcatcttagttgaaagatgataggccacaggagggcagggtcaactgtgttgaggcaagctggcttttgtgtcggcccttaggggctgaggtgaaaggctttgacacggagccagggtagctttggcagcttctcccctcctggtcagaacacttccactttcagttgtgaaaaaaaaaattaaaaccaggaagtgaagtccccgagcacgttagaaagcctgacatggcctgactcgggacagctcagagcagggcagaactggggacactctgggccggccttctgcctgcatggacgctctgaagccaccctgtctctggaggaaccacgagcgagggaagaaggacagggactcgtgtggcaggaagaactcagagccgggaagcccccattcactagaagcactgagagatgcggccccctcgcagggtctgaatttcctgctgctgttcacaaagatgctttttatctttaactttttgttttccccacttccgaccccggcgttgatctgcatcctgacatttggagctgccatcttcttgtggctgatcaccagacctcaacccgtcttacctcttcttgacctgaacaatcagtctgtgggaattgagggaggagcacggaagggggtttcccagaagaacaatgacctaacaagttgctgcttctcagatgccaagactatgtatgaggttttccaaagaggactcgctgtgtctgacaatgggccctgcttgggatatagaaaaccaaaccagccctacagatggctatcttacaaacaggtgtctgatagagcagagtacctgggttcctgtctcttgcataaaggttataaatcatcaccagaccagtttgtcggcatctttgctcagaataggccagagtggatcatctccgaattggcttgttacacgtactctatggtagctgtacctctgtatgacaccttgggaccagaagccatcgtacatattgtcaacaaggctgatatcgccatggtgatctgtgacacaccccaaaaggcattggtgctgatagggaatgtagagaaaggcttcaccccgagcctgaaggtgatcatccttatggacccctttgatgatgacctgaagcaaagaggggagaagagtggaattgagatcttatccctatatgatgctgagaacctaggcaaagagcacttcagaaaacctgtgcctcctagcccagaagacctgagcgtcatctgcttcaccagtgggaccacaggtgaccccaaaggagccatgataacccatcaaaatattgtttcaaatgctgctgcctttctcaaatgtgtggagcatgcttatgagcccactcctgatgatgtggccatatcctacctccctctggctcatatgtttgagaggattgtacaggctgttgtgtacagctgtggagccagagttggattcttccaaggggatattcggttgctggctgacgacatgaagactttgaagcccacattgtttcccgcggtgcctcgactccttaacaggatctacgataaggtacaaaatgaggccaagacacccttgaagaagttcttgttgaagctggctgtttccagtaaattcaaagagcttcaaaagggtatcatcaggcatgatagtttctgggacaagctcatctttgcaaagatccaggacagcctgggcggaagggttcgtgtaattgtcactggagctgcccccatgtccacttcagtcatgacattcttccgggcagcaatgggatgtcaggtgtatgaagcttatggtcaaacagaatgcacaggtggctgtacatttacattacctggggactggacatcaggtcacgttggggtgcccctggcttgcaattacgtgaagctggaagatgtggctgacatgaactactttacagtgaataatgaaggagaggtctgcatcaagggtacaaacgtgttcaaaggatacctgaaggaccctgagaagacacaggaagccctggacagtgatggctggcttcacacaggagacattggtcgctggctcccgaatggaactctgaagatcatcgaccgtaaaaagaacattttcaagctggcccaaggagaatacattgcaccagagaagatagaaaatatctacaacaggagtcaaccagtgttacaaatttttgtacacggggagagcttacggtcatccttagtaggagtggtggttcctgacacagatgtacttccctcatttgcagccaagcttggggtgaagggctcctttgaggaactgtgccaaaaccaagttgtaagggaagccattttagaagacttgcagaaaattgggaaagaaagtggccttaaaacttttgaacaggtcaaagccatttttcttcatccagagccattttccattgaaaatgggctcttgacaccaacattgaaagcaaagcgaggagagctttccaaatactttcggacccaaattgacagcctgtatgagcacatccaggattaggataaggtacttaagtacctgccggcccactgtgcactgcttgtgagaaaatggattaaaaactattcttacatttgttttgcctttcctcctatttttttttaacctgttaaactctaaagccatagcttttgttttatattgagacatataatgtgtaaacttagttcccaaataaatcaatcctgtctttcccatcttcgatgttgctaatattaaggcttcagggctacttttatcaacatgcctgtcttcaagatcccagtttatgttctgtgtccttcctcatgatttccaaccttaatactattagtaaccacaagttcaagggtcaaagggaccctctgtgccttcttctttgttttgtgataaacataacttgccaacagtctctatgcttatttacatcttctactgttcaaactaagagatttttaaattctgaaaaactgcttacaattcatgttttctagccactccacaaaccactaaaattttagttttagcctatcactcatgtcaatcatatctatgagacaaatgtctccgatgctcttctgcgtaaattaaattgtgtactgaagggaaaagtttgatcataccaaacatttcctaaactctctagttagatatctgacttgggagtattaaaaattgggtctatgacatattgtccaaaaggaatgctgttcttaaagcattatttacagtaggaactggggagtaaatctgttccctacagtttgctgctgagctggaagctgtgggggaaggagttgacaggtgggcccagtgaacttttccagtaaatgaagcaagcactgaataaaaacctcctgaactgggaacaaagatctacaggcaagcaagatgcccacacaacaggcttattttctgtgaaggaaccaactgatctcccccacccttggattagagttcctgctctaccttacccacagataacacatgttgtttctacttgtaaatgtaaagtctttaaaataaactattacagatactta

SEQ ID NO: 101390 - DNA, 3363 bp, Homo sapiens
  misc_feature (2)..(8): n is a, c, g, or t
  misc_feature (209)..(209): n is a, c, g, or t
annnnnnncttactgtcagaggttactacaagtgtttgaacaggtaacttctacctttgaacttctgttgtgacagattcaaaggttccaggggagtgtgttggccactctcaggacagtacacagtagcttcgggtgtgtcccagtcagtcctaggagctgtggaaagagtagaagtgcctgaatgtggtgctgaatcaatacagccngctgtgaggggagcacttcctggacccaggaagggagagtcttcttccaaggtctgaatttcctgctgctgttcacaaagatgctttttatctttaactttttgttttccccacttccgaccccggcgttgatctgcatcctgacatttggagctgccatcttcttgtggctgatcaccagacctcaacccgtcttacctcttcttgacctgaacaatcagtctgtgggaattgagggaggagcacggaagggggtttcccagaagaacaatgacctaacaagttgctgcttctcagatgccaagactatgtatgaggttttccaaagaggactcgctgtgtctgacaatgggccctgcttgggatatagaaaaccaaaccagccctacagatggctatcttacaaacaggtgtctgatagagcagagtacctgggttcctgtctcttgcataaaggttataaatcatcaccagaccagtttgtcggcatctttgctcagaataggccagagtggatcatctccgaattggcttgttacacgtactctatggtagctgtacctctgtatgacaccttgggaccagaagccatcgtacatattgtcaacaaggctgatatcgccatggtgatctgtgacacaccccaaaaggcattggtgctgatagggaatgtagagaaaggcttcaccccgagcctgaaggtgatcatccttatggacccctttgatgatgacctgaagcaaagaggggagaagagtggaattgagatcttatccctatatgatgctgagaacctaggcaaagagcacttcagaaaacctgtgcctcctagcccagaagacctgagcgtcatctgcttcaccagtgggaccacaggtgaccccaaaggagccatgataacccatcaaaatattgtttcaaatgctgctgcctttctcaaatgtgtggagcatgcttatgagcccactcctgatgatgtggccatatcctacctccctctggctcatatgtttgagaggattgtacaggctgttgtgtacagctgtggagccagagttggattcttccaaggggatattcggttgctggctgacgacatgaagactttgaagcccacattgtttcccgcggtgcctcgactccttaacaggatctacgataaggtacaaaatgaggccaagacacccttgaagaagttcttgttgaagctggctgtttccagtaaattcaaagagcttcaaaagggtatcatcaggcatgatagtttctgggacaagctcatctttgcaaagatccaggacagcctgggcggaagggttcgtgtaattgtcactggagctgcccccatgtccacttcagtcatgacattcttccgggcagcaatgggatgtcaggtgtatgaagcttatggtcaaacagaatgcacaggtggctgtacatttacattacctggggactggacatcaggtcacgttggggtgcccctggcttgcaattacgtgaagctggaagatgtggctgacatgaactactttacagtgaataatgaaggagaggtctgcatcaagggtacaaacgtgttcaaaggatacctgaaggaccctgagaagacacaggaagccctggacagtgatggctggcttcacacaggagacattggtcgctggctcccgaatggaactctgaagatcatcgaccgtaaaaagaacattttcaagctggcccaaggagaatacattgcaccagagaagatagaaaatatctacaacaggagtcaaccagtgttacaaatttttgtacacggggagagcttacggtcatccttagtaggagtggtggttcctgacacagatgtacttccctcatttgcagccaagcttggggtgaagggctcctttgaggaactgtgccaaaaccaagttgtaagggaagccattttagaagacttgcagaaaattgggaaagaaagtggccttaaaacttttgaacaggtcaaagccatttttcttcatccagagccattttccattgaaaatgggctcttgacaccaacattgaaagcaaagcgaggagagctttccaaatactttcggacccaaattgacagcctgtatgagcacatccaggattaggataaggtacttaagtacctgccggcccactgtgcactgcttgtgagaaaatggattaaaaactattcttacatttgttttgcctttcctcctatttttttttaacctgttaaactctaaagccatagcttttgttttatattgagacatataatgtgtaaacttagttcccaaataaatcaatcctgtctttcccatcttcgatgttgctaatattaaggcttcagggctacttttatcaacatgcctgtcttcaagatcccagtttatgttctgtgtccttcctcatgatttccaaccttaatactattagtaaccacaagttcaagggtcaaagggaccctctgtgccttcttctttgttttgtgataaacataacttgccaacagtctctatgcttatttacatcttctactgttcaaactaagagatttttaaattctgaaaaactgcttacaattcatgttttctagccactccacaaaccactaaaattttagttttagcctatcactcatgtcaatcatatctatgagacaaatgtctccgatgctcttctgcgtaaattaaattgtgtactgaagggaaaagtttgatcataccaaacatttcctaaactctctagttagatatctgacttgggagtattaaaaattgggtctatgacatattgtccaaaaggaatgctgttcttaaagcattatttacagtaggaactggggagtaaatctgttccctacagtttgctgctgagctggaagctgtgggggaaggagttgacaggtgggcccagtgaacttttccagtaaatgaagcaagcactgaataaaaacctcctgaactgggaacaaagatctacaggcaagcaagatgcccacacaacaggcttattttctgtgaaggaaccaactgatctcccccacccttggattagagttcctgctctaccttacccacagataacacatgttgtttctacttgtaaatgtaaagtctttaaaataaactattacagatactta

SEQ ID NO: 101391 - DNA, 2902 bp, Homo sapiens
gatttttaagttaagttttgaggtgtgactgtatcagagggaaagaaaccatgccaattgaacgactcacagccctgtcgttcctgacttgcttattttcttggctttgccagaacttcttcagagaccaaggcaggcagctctggcgactggagagaggcggggtagaaggtgtttgtgtgggtctgagggctgaggtaccctctagccagactttcctgtcctccgaatccagcagggaacagcgtcacctctgcctctgtgaggcttctgatctgagggggcacctcaagtcattttagtttgtttgttttcatcttagttgaaagatgataggccacaggagggcagggtcaactgtgttgaggcaagctggcttttgtgtcggcccttaggggctgaggtgaaaggctttgacacggagccagggtagctttggcagcttctcccctcctggtcagaacacttccactttcagttgtgaaaaaaaaaattaaaaccaggaagtgaagtccccgagcacgttagaaagcctgacatggcctgactcgggacagctcagagcagggcagaactggggacactctgggccggccttctgcctgcatggacgctctgaagccaccctgtctctggaggaaccacgagcgagggaagaaggacagggactcgtgtggcaggaagaactcagagccgggaagcccccattcactagaagcactgagagatgcggccccctcgcagggtctgaatttcctgctgctgttcacaaagatgctttttatctttaactttttgttttccccacttccgaccccggcgttgatctgcatcctgacatttggagctgccatcttcttgtggctgatcaccagacctcaacccgtcttacctcttcttgacctgaacaatcagtctgtgggaattgagggaggagcacggaagggggtttcccagaagaacaatgacctaacaagttgctgcttctcagatgccaagactatgtatgaggttttccaaagaggactcgctgtgtctgacaatgggccctgcttgggatatagaaaaccaaaccagccctacagatggctatcttacaaacaggtgtctgatagagcagagtacctgggttcctgtctcttgcataaaggttataaatcatcaccagaccagtttgtcggcatctttgctcagaataggccagagtggatcatctccgaattggcttgttacacgtactctatggtagctgtacctctgtatgacaccttgggaccagaagccatcgtacatattgtcaacaaggctgatatcgccatggtgatctgtgacacaccccaaaaggcattggtgctgatagggaatgtagagaaaggcttcaccccgagcctgaaggtgatcatccttatggacccctttgatgatgacctgaagcaaagaggggagaagagtggaattgagatcttatccctatatgatgctgagaacctaggcaaagagcacttcagaaaacctgtgcctcctagcccagaagacctgagcgtcatctgcttcaccagtgggaccacaggtgaccccaaaggagccatgataacccatcaaaatattgtttcaaatgctgctgcctttctcaaatgtgtggagcatgcttatgagcccactcctgatgatgtggccatatcctacctccctctggctcatatgtttgagaggattgtacaggctgttgtgtacagctgtggagccagagttggattcttccaaggggatattcggttgctggctgacgacatgaagactttgaagcccacattgtttcccgcggtgcctcgactccttaacaggatctacgataaggtacaaaatgaggccaagacacccttgaagaagttcttgttgaagctggctgtttccagtaaattcaaagagcttcaaaagggtatcatcaggcatgatagtttctgggacaagctcatctttgcaaagatccaggacagcctgggcggaagggttcgtgtaattgtcactggagctgcccccatgtccacttcagtcatgacattcttccgggcagcaatgggatgtcaggtgtatgaagcttatggtcaaacagaatgcacaggtggctgtacatttacattacctggggactggacatcaggtcacgttggggtgcccctggcttgcaattacgtgaagctggaagatgtggctgacatgaactactttacagtgaataatgaaggagaggtctgcatcaagggtacaaacgtgttcaaaggatacctgaaggaccctgagaagacacaggaagccctggacagtgatggctggcttcacacaggagacattggtcgctggctcccgaatggaactctgaagatcatcgaccgtaaaaagaacattttcaagctggcccaaggagaatacattgcaccagagaagatagaaaatatctacaacaggagtcaaccagtgttacaaatttttgtacacggggagagcttacggtcatccttagtaggagtggtggttcctgacacagatgtacttccctcatttgcagccaagcttggggtgaagggctcctttgaggaactgtgccaaaaccaagttgtaagggaagccattttagaagacttgcagaaaattgggaaagaaagtggccttaaaacttttgaacaggtcaaagccatttttcttcatccagagccattttccattgaaaatgggctcttgacaccaacattgaaagcaaagcgaggagagctttccaaatactttcggacccaaattgacagcctgtatgagcacatccaggattaggataaggtacttaagtacctgccggcccactgtgcactgcttgtgagaaaatggattaaaaactattcttacattt

SEQ ID NO: 101392 - DNA, 3795 bp, Homo sapiens
gatttttaagttaagttttgaggtgtgactgtatcagagggaaagaaaccatgccaattgaacgactcacagccctgtcgttcctgacttgcttattttcttggctttgccagaacttcttcagagaccaaggcaggcagctctggcgactggagagaggcggggtagaaggtgtttgtgtgggtctgagggctgaggtaccctctagccagactttcctgtcctccgaatccagcagggaacagcgtcacctctgcctctgtgaggcttctgatctgagggggcacctcaagtcattttagtttgtttgttttcatcttagttgaaagatgataggccacaggagggcagggtcaactgtgttgaggcaagctggcttttgtgtcggcccttaggggctgaggtgaaaggctttgacacggagccagggtagctttggcagcttctcccctcctggtcagaacacttccactttcagttgtgaaaaaaaaaattaaaaccaggaagtgaagtccccgagcacgttagaaagcctgacatggcctgactcgggacagctcagagcagggcagaactggggacactctgggccggccttctgcctgcatggacgctctgaagccaccctgtctctggaggaaccacgagcgagggaagaaggacagggactcgtgtggcaggaagaactcagagccgggaagcccccattcactagaagcactgagagatgcggccccctcgcagggtctgaatttcctgctgctgttcacaaagatgctttttatctttaactttttgttttccccacttccgaccccggcgttgatctgcatcctgacatttggagctgccatcttcttgtggctgatcaccagacctcaacccgtcttacctcttcttgacctgaacaatcagtctgtgggaattgagggaggagcacggaagggggtttcccagaagaacaatgacctaacaagttgctgcttctcagatgccaagactatgtatgaggttttccaaagaggactcgctgtgtctgacaatgggccctgcttgggatatagaaaaccaaaccagccctacagatggctatcttacaaacaggtgtctgatagagcagagtacctgggttcctgtctcttgcataaaggttataaatcatcaccagaccagtttgtcggcatctttgctcagaataggccagagtggatcatctccgaattggcttgttacacgtactctatggtagctgtacctctgtatgacaccttgggaccagaagccatcgtacatattgtcaacaaggctgatatcgccatggtgatctgtgacacaccccaaaaggcattggtgctgatagggaatgtagagaaaggcttcaccccgagcctgaaggtgatcatccttatggacccctttgatgatgacctgaagcaaagaggggagaagagtggaattgagatcttatccctatatgatgctgagaacctaggcaaagagcacttcagaaaacctgtgcctcctagcccagaagacctgagcgtcatctgcttcaccagtgggaccacaggtgaccccaaaggagccatgataacccatcaaaatattgtttcaaatgctgctgcctttctcaaatgtgtggagcatgcttatgagcccactcctgatgatgtggccatatcctacctccctctggctcatatgtttgagaggattgtacaggctgttgtgtacagctgtggagccagagttggattcttccaaggggatattcggttgctggctgacgacatgaagactttgaagcccacattgtttcccgcggtgcctcgactccttaacaggatctacgataaggtacaaaatgaggccaagacacccttgaagaagttcttgttgaagctggctgtttccagtaaattcaaagagcttcaaaagggacagcctgggcggaagggttcgtgtaattgtcactggagctgcccccatgtccacttcagtcatgacattcttccgggcagcaatgggatgtcaggtgtatgaagcttatggtcaaacagaatgcacaggtggctgtacatttacattacctggggactggacatcaggtcacgttggggtgcccctggcttgcaattacgtgaagctggaagatgtggctgacatgaactactttacagtgaataatgaaggagaggtctgcatcaagggtacaaacgtgttcaaaggatacctgaaggaccctgagaagacacaggaagccctggacagtgatggctggcttcacacaggagacattggtcgctggctcccgaatggaactctgaagatcatcgaccgtaaaaagaacattttcaagctggcccaaggagaatacattgcaccagagaagatagaaaatatctacaacaggagtcaaccagtgttacaaatttttgtacacggggagagcttacggtcatccttagtaggagtggtggttcctgacacagatgtacttccctcatttgcagccaagcttggggtgaagggctcctttgaggaactgtgccaaaaccaagttgtaagggaagccattttagaagacttgcagaaaattgggaaagaaagtggccttaaaacttttgaacaggtcaaagccatttttcttcatccagagccattttccattgaaaatgggctcttgacaccaacattgaaagcaaagcgaggagagctttccaaatactttcggacccaaattgacagcctgtatgagcacatccaggattaggataaggtacttaagtacctgccggcccactgtgcactgcttgtgagaaaatggattaaaaactattcttacatttgttttgcctttcctcctatttttttttaacctgttaaactctaaagccatagcttttgttttatattgagacatataatgtgtaaacttagttcccaaataaatcaatcctgtctttcccatcttcgatgttgctaatattaaggcttcagggctacttttatcaacatgcctgtcttcaagatcccagtttatgttctgtgtccttcctcatgatttccaaccttaatactattagtaaccacaagttcaagggtcaaagggaccctctgtgccttcttctttgttttgtgataaacataacttgccaacagtctctatgcttatttacatcttctactgttcaaactaagagatttttaaattctgaaaaactgcttacaattcatgttttctagccactccacaaaccactaaaattttagttttagcctatcactcatgtcaatcatatctatgagacaaatgtctccgatgctcttctgcgtaaattaaattgtgtactgaagggaaaagtttgatcataccaaacatttcctaaactctctagttagatatctgacttgggagtattaaaaattgggtctatgacatattgtccaaaaggaatgctgttcttaaagcattatttacagtaggaactggggagtaaatctgttccctacagtttgctgctgagctggaagctgtgggggaaggagttgacaggtgggcccagtgaacttttccagtaaatgaagcaagcactgaataaaaacctcctgaactgggaacaaagatctacaggcaagcaagatgcccacacaacaggcttattttctgtgaaggaaccaactgatctcccccacccttggattagagttcctgctctaccttacccacagataacacatgttgtttctacttgtaaatgtaaagtctttaaaataaactattacagatactta

SEQ ID NO: 101393 - DNA, 2277 bp, Homo sapiens
gaatagaagcacagctgcctcagttatctcacggctgctgctgtaaccaacatgagttccatatccactccaacatgcttatgagcccactcctgatgatgtggccatatcctacctccctctggctcatatgtttgagaggattgtacaggctgttgtgtacagctgtggagccagagttggattcttccaaggggatattcggttgctggctgacgacatgaagactttgaagcccacattgtttcccgcggtgcctcgactccttaacaggatctacgataaggtacaaaatgaggccaagacacccttgaagaagttcttgttgaagctggctgtttccagtaaattcaaagagcttcaaaagggtatcatcaggcatgatagtttctgggacaagctcatctttgcaaagatccaggacagcctgggcggaagggttcgtgtaattgtcactggagctgcccccatgtccacttcagtcatgacattcttccgggcagcaatgggatgtcaggtgtatgaagcttatggtcaaacagaatgcacaggtggctgtacatttacattacctggggactggacatcaggtcacgttggggtgcccctggcttgcaattacgtgaagctggaagatgtggctgacatgaactactttacagtgaataatgaaggagaggtctgcatcaagggtacaaacgtgttcaaaggatacctgaaggaccctgagaagacacaggaagccctggacagtgatggctggcttcacacaggagacattggtcgctggctcccgaatggaactctgaagatcatcgaccgtaaaaagaacattttcaagctggcccaaggagaatacattgcaccagagaagatagaaaatatctacaacaggagtcaaccagtgttacaaatttttgtacacggggagagcttacggtcatccttagtaggagtggtggttcctgacacagatgtacttccctcatttgcagccaagcttggggtgaagggctcctttgaggaactgtgccaaaaccaagttgtaagggaagccattttagaagacttgcagaaaattgggaaagaaagtggccttaaaacttttgaacaggtcaaagccatttttcttcatccagagccattttccattgaaaatgggctcttgacaccaacattgaaagcaaagcgaggagagctttccaaatactttcggacccaaattgacagcctgtatgagcacatccaggattaggataaggtacttaagtacctgccggcccactgtgcactgcttgtgagaaaatggattaaaaactattcttacatttgttttgcctttcctcctatttttttttaacctgttaaactctaaagccatagcttttgttttatattgagacatataatgtgtaaacttagttcccaaataaatcaatcctgtctttcccatcttcgatgttgctaatattaaggcttcagggctacttttatcaacatgcctgtcttcaagatcccagtttatgttctgtgtccttcctcatgatttccaaccttaatactattagtaaccacaagttcaagggtcaaagggaccctctgtgccttcttctttgttttgtgataaacataacttgccaacagtctctatgcttatttacatcttctactgttcaaactaagagatttttaaattctgaaaaactgcttacaattcatgttttctagccactccacaaaccactaaaattttagttttagcctatcactcatgtcaatcatatctatgagacaaatgtctccgatgctcttctgcgtaaattaaattgtgtactgaagggaaaagtttgatcataccaaacatttcctaaactctctagttagatatctgacttgggagtattaaaaattgggtctatgacatattgtccaaaaggaatgctgttcttaaagcattatttacagtaggaactggggagtaaatctgttccctacagtttgctgctgagctggaagctgtgggggaaggagttgacaggtgggcccagtgaacttttccagtaaatgaagcaagcactgaataaaaacctcctgaactgggaacaaagatctacaggcaagcaagatgcccacacaacaggcttattttctgtgaaggaaccaactgatctcccccacccttggattagagttcctgctctaccttacccacagataacacatgttgtttctacttgtaaatgtaaagtctttaaaataaactattacagatactta

SEQ ID NO: 101394 - DNA, 1796 bp, Homo sapiens
ggacgcgtgggtcgacccacgcgtcggggatgtcaggtgtatgaagcttatggtcaaacagaatgcacaggtggctgtacatttacattacctggggactggacatcaggtcacgttggggtgcccctggcttgcaattacgtgaagctggaagatgtggctgacatgaactactttacagtgaataatgaaggagaggtctgcatcaagggtacaaacgtgttcaaaggatacctgaaggaccctgagaagacacaggaagccctggacagtgatggctggcttcacacaggagacattggtcgctggctcccgaatggaactctgaagatcatcgaccgtaaaaagaacattttcaagctggcccaaggagaatacattgcaccagagaagatagaaaatatctacaacaggagtcaaccagtgttacaaatttttgtacacggggagagcttacggtcatccttagtaggagtggtggttcctgacacagatgtacttccctcatttgcagccaagcttggggtgaagggctcctttgaggaactgtgccaaaaccaagttgtaagggaagccattttagaagacttgcagaaaattgggaaagaaagtggccttaaaacttttgaacaggtcaaagccatttttcttcatccagagccattttccattgaaaatgggctcttgacaccaacattgaaagcaaagcgaggagagctttccaaatactttcggacccaaattgacagcctgtatgagcacatccaggattaggataaggtacttaagtacctgccggcccactgtgcactgcttgtgagaaaatggattaaaaactattcttacatttgttttgcctttcctcctatttttttttaacctgttaaactctaaagccatagcttttgttttatattgagacatataatgtgtaaacttagttcccaaataaatcaatcctgtctttcccatcttcgatgttgctaatattaaggcttcagggctacttttatcaacatgcctgtcttcaagatcccagtttatgttctgtgtccttcctcatgatttccaaccttaatactattagtaaccacaagttcaagggtcaaagggaccctctgtgccttcttctttgttttgtgataaacataacttgccaacagtctctatgcttatttacatcttctactgttcaaactaagagatttttaaattctgaaaaactgcttacaattcatgttttctagccactccacaaaccactaaaattttagttttagcctatcactcatgtcaatcatatctatgagacaaatgtctccgatgctcttctgcgtaaattaaattgtgtactgaagggaaaagtttgatcataccaaacatttcctaaactctctagttagatatctgacttgggagtattaaaaattgggtctatgacatattgtccaaaaggaatgctgttcttaaagcattatttacagtaggaactggggagtaaatctgttccctacagtttgctgctgagctggaagctgtgggggaaggagttgacaggtgggcccagtgaacttttccagtaaatgaagcaagcactgaataaaaacctcctgaactgggaacaaagatctacaggcaagcaagatgcccacacaacaggcttattttctgtgaaggaaccaactgatctcccccacccttggattagagttcctgctctaccttacccacagataacacatgttgtttctacttgtaaatgtaaagtctttaaaataaactattacagatactta

SEQ ID NO: 101395 - DNA, 3023 bp, Homo sapiens
gatttttaagttaagttttgaggtgtgactgtatcagagggaaagaaaccatgccaattgaacgactcacagccctgtcgttcctgacttgcttattttcttggctttgccagaacttcttcagagaccaaggcaggcagctctggcgactggagagaggcggggtagaaggtgtttgtgtgggtctgagggctgaggtaccctctagccagactttcctgtcctccgaatccagcagggaacagcgtcacctctgcctctgtgaggcttctgatctgagggggcacctcaagtcattttagtttgtttgttttcatcttagttgaaagatgataggccacaggagggcagggtcaactgtgttgaggcaagctggcttttgtgtcggcccttaggggctgaggtgaaaggctttgacacggagccagggtagctttggcagcttctcccctcctggtcagaacacttccactttcagttgtgaaaaaaaaaattaaaaccaggaagtgaagtccccgagcacgttagaaagcctgacatggcctgactcgggacagctcagagcagggcagaactggggacactctgggccggccttctgcctgcatggacgctctgaagccaccctgtctctggaggaaccacgagcgagggaagaaggacagggactcgtgtggcaggaagaactcagagccgggaagcccccattcactagaagcactgagagatgcggccccctcgcagggtctgaatttcctgctgctgttcacaaagatgctttttatctttaactttttgttttccccacttccgaccccggcgttgatctgcatcctgacatttggagctgccatcttcttgtggctgatcaccagacctcaacccgtcttacctcttcttgacctgaacaatcagtctgtgggaattgagggaggagcacggaagggggtttcccagaagaacaatgacctaacaagttgctgcttctcagatgccaagactatgtatgaggttttccaaagaggactcgctgtgtctgacaatgggccctgcttgggatatagaaaaccaaaccagccctacagatggctatcttacaaacaggtgtctgatagagcagagtacctgggttcctgtctcttgcataaaggttataaatcatcaccagaccagtttgtcggcatctttgctcagaataggccagagtggatcatctccgaattggcttgttacacgtactctatggtagctgtacctctgtatgacaccttgggaccagaagccatcgtacatattgtcaacaaggctgatatcgccatggtgatctgtgacacaccccaaaaggcattggtgctgatagggaatgtagagaaaggcttcaccccgagcctgaaggtgatcatccttatggacccctttgatgatgacctgaagcaaagaggggagaagagtggaattgagatcttatccctatatgatgctgagaacctaggcaaagagcacttcagaaaacctgtgcctcctagcccagaagacctgagcgtcatctgcttcaccagtgggaccacaggtgaccccaaaggagccatgataacccatcaaaatattgtttcaaatgctgctgcctttctcaaatgtgtggagcatgcttatgagcccactcctgatgatgtggccatatcctacctccctctggctcatatgtttgagaggattgtacaggctgttgtgtacagctgtggagccagagttggattcttccaaggggatattcggttgctggctgacgacatgaagactttgaagcccacattgtttcccgcggtgcctcgactccttaacaggatctacgataaggtacaaaatgaggccaagacacccttgaagaagttcttgttgaagctggctgtttccagtaaattcaaagagcttcaaaagggtatcatcaggcatgatagtttctgggacaagctcatctttgcaaagatccaggacagcctgggcggaagggttcgtgtaattgtcactggagctgcccccatgtccacttcagtcatgacattcttccgggcagcaatgggatgtcaggtgtatgaagcttatggtcaaacagaatgcacaggtggctgtacatttacattacctggggactggacatcaggtcacgttggggtgcccctggcttgcaattacgtgaagctggaagatgtggctgacatgaactactttacagtgaataatgaaggagaggtctgcatcaagggtacaaacgtgttcaaaggatacctgaaggaccctgagaagacacaggaagccctggacagtgatggctggcttcacacaggagacattggtcgctggctcccgaatggaactctgaagatcatcgaccgtaaaaagaacattttcaagctggcccaaggagaatacattgcaccagagaagatagaaaatatctacaacaggagtcaaccagtgttacaaatttttgtacacggggagagcttacggtcatccttagtaggagtggtggttcctgacacagatgtacttccctcatttgcagccaagcttggggtgaagggctcctttgaggaactgtgccaaaaccaagttgtaagggaagccattttagaagacttgcagaaaattgggaaagaaagtggccttaaaacttttgaacaggtcaaagccatttttcttcatccagagccattttccattgaaaatgggctcttgacaccaacattgaaagcaaagcgaggagagctttccaaatactttcggacccaaattgacagcctgtatgagcacatccaggattaggataaggtacttaagtacctgccggcccactgtgcactgcttgtgagaaaatggattaaaaactattcttacatttgttttgcctttcctcctatttttttttaacctgttaaactctaaagccatagcttttgttttatattgagacatataatgtgtaaacttagttcccaaataaatcaatcctgtctttccca

SEQ ID NO: 101396 - DNA, 572 bp, Homo sapiens
ctaaagaaccccaatttaatcgggcggtccacaaaccactaaaattttagttttagcctatcactcatgtcaatcatatctatgagacaaatgtctccgatgctcttctgcgtaaattaaattgtgtactgaagggaaaagtttgatcataccaaacatttcctaaactctctagttagatatctgacttgggagtattaaaaattgggtctatgacatattgtccaaaaggaatgctgttcttaaagcattatttacagtaggaactggggagtaaatctgttccctacagtttgctgctgagctggaagctgtgggggaaggagttgacaggtgggcccagtgaacttttccagtaaatgaagcaagcactgaataaaaacctcctgaactgggaacaaagatctacaggcaagcaagatgcccacacaacaggcttattttctgtgaaggaaccaactgatctcccccacccttggattagagttcctgctctaccttacccacagataacacatgttgtttctacttgtaaatgtaaagtctttaaaataaactattacagatactta

SEQ ID NO: 101397 - DNA, 2463 bp, Homo sapiens
gatttttaagttaagttttgaggtgtgactgtatcagagggaaagaaaccatgccaattgaacgactcacagccctgtcgttcctgacttgcttattttcttggctttgccagaacttcttcagagaccaaggcaggcagctctggcgactggagagaggcggggtagaaggtgtttgtgtgggtctgagggctgaggtaccctctagccagactttcctgtcctccgaatccagcagggaacagcgtcacctctgcctctgtgaggcttctgatctgagggggcacctcaagtcattttagtttgtttgttttcatcttagttgaaagatgataggccacaggagggcagggtcaactgtgttgaggcaagctggcttttgtgtcggcccttaggggctgaggtgaaaggctttgacacggagccagggtagctttggcagcttctcccctcctggtcagaacacttccactttcagttgtgaaaaaaaaaattaaaaccaggaagtgaagtccccgagcacgttagaaagcctgacatggcctgactcgggacagctcagagcagggcagaactggggacactctgggccggccttctgcctgcatggacgctctgaagccaccctgtctctggaggaaccacgagcgagggaagaaggacagggactcgtgtggcaggaagaactcagagccgggaagcccccattcactagaagcactgagagatgcggccccctcgcagggtctgaatttcctgctgctgttcacaaagatgctttttatctttaactttttgttttccccacttccgaccccggcgttgatctgcatcctgacatttggagctgccatcttcttgtggctgatcaccagacctcaacccgtcttacctcttcttgacctgaacaatcagtctgtgggaattgagggaggagcacggaagggggtttcccagaagaacaatgacctaacaagttgctgcttctcagatgccaagactatgtatgaggttttccaaagaggactcgctgtgtctgacaatgggccctgcttgggatatagaaaaccaaaccagccctacagatggctatcttacaaacaggtgtctgatagagcagagtacctgggttcctgtctcttgcataaaggttataaatcatcaccagaccagtttgtcggcatctttgctcagaataggccagagtggatcatctccgaattggcttgttacacgtactctatggtagctgtacctctgtatgacaccttgggaccagaagccatcgtacatattgtcaacaaggctgatatcgccatggtgatctgtgacacaccccaaaaggcattggtgctgatagggaatgtagagaaaggcttcaccccgagcctgaaggtgatcatccttatggacccctttgatgatgacctgaagcaaagaggggagaagagtggaattgagatcttatccctatatgatgctgagaacctaggcaaagagcacttcagaaaacctgtgcctcctagcccagaagacctgagcgtcatctgcttcaccagtgggaccacaggtgaccccaaaggagccatgataacccatcaaaatattgtttcaaatgctgctgcctttctcaaatgtgtggagcatgcttatgagcccactcctgatgatgtggccatatcctacctccctctggctcatatgtttgagaggattgtacaggctgttgtgtacagctgtggagccagagttggattcttccaaggggatattcggttgctggctgacgacatgaagactttgaagcccacattgtttcccgcggtgcctcgactccttaacaggatctacgataaggtacaaaatgaggccaagacacccttgaagaagttcttgttgaagctggctgtttccagtaaattcaaagagcttcaaaagggtatcatcaggcatgatagtttctgggacaagctcatctttgcaaagatccaggacagcctgggcggaagggttcgtgtaattgtcactggagctgcccccatgtccacttcagtcatgacattcttccgggcagcaatgggatgtcaggtgtatgaagcttatggtcaaacagaatgcacaggtggctgtacatttacattacctggggactggacatcaggtcacgttggggtgcccctggcttgcaattacgtgaagctggaagatgtggctgacatgaactactttacagtgaataatgaaggagaggtctgcatcaagggtacaaacgtgttcaaaggatacctgaaggaccctgagaagacacaggaagccctggacagtgatggctggcttcacacaggagacattggtcgctggctcccgaatggaactctgaagatcatcgaccgtaaaaagaacattttcaagctggcccaaggagaatacattgcaccacggtctctcagggtaccgagctcg

SEQ ID NO: 101398 - DNA, 2351 bp, Homo sapiens
gatttttaagttaagttttgaggtgtgactgtatcagagggaaagaaaccatgccaattgaacgactcacagccctgtcgttcctgacttgcttattttcttggctttgccagaacttcttcagagaccaaggcaggcagctctggcgactggagagaggcggggtagaaggtgtttgtgtgggtctgagggctgaggtaccctctagccagactttcctgtcctccgaatccagcagggaacagcgtcacctctgcctctgtgaggcttctgatctgagggggcacctcaagtcattttagtttgtttgttttcatcttagttgaaagatgataggccacaggagggcagggtcaactgtgttgaggcaagctggcttttgtgtcggcccttaggggctgaggtgaaaggctttgacacggagccagggtagctttggcagcttctcccctcctggtcagaacacttccactttcagttgtgaaaaaaaaaattaaaaccaggaagtgaagtccccgagcacgttagaaagcctgacatggcctgactcgggacagctcagagcagggcagaactggggacactctgggccggccttctgcctgcatggacgctctgaagccaccctgtctctggaggaaccacgagcgagggaagaaggacagggactcgtgtggcaggaagaactcagagccgggaagcccccattcactagaagcactgagagatgcggccccctcgcagggtctgaatttcctgctgctgttcacaaagatgctttttatctttaactttttgttttccccacttccgaccccggcgttgatctgcatcctgacatttggagctgccatcttcttgtggctgatcaccagacctcaacccgtcttacctcttcttgacctgaacaatcagtctgtgggaattgagggaggagcacggaagggggtttcccagaagaacaatgacctaacaagttgctgcttctcagatgccaagactatgtatgaggttttccaaagaggactcgctgtgtctgacaatgggccctgcttgggatatagaaaaccaaaccagccctacagatggctatcttacaaacaggtgtctgatagagcagagtacctgggttcctgtctcttgcataaaggttataaatcatcaccagaccagtttgtcggcatctttgctcagaataggccagagtggatcatctccgaattggcttgttacacgtactctatggtagctgtacctctgtatgacaccttgggaccagaagccatcgtacatattgtcaacaaggctgatatcgccatggtgatctgtgacacaccccaaaaggcattggtgctgatagggaatgtagagaaaggcttcaccccgagcctgaaggtgatcatccttatggacccctttgatgatgacctgaagcaaagaggggagaagagtggaattgagatcttatccctatatgatgctgagaacctaggcaaagagcacttcagaaaacctgtgcctcctagcccagaagacctgagcgtcatctgcttcaccagtgggaccacaggtgaccccaaaggagccatgataacccatcaaaatattgtttcaaatgctgctgcctttctcaaatgtgtggagcatgcttatgagcccactcctgatgatgtggccatatcctacctccctctggctcatatgtttgagaggattgtacaggctgttgtgtacagctgtggagccagagttggattcttccaaggggatattcggttgctggctgacgacatgaagactttgaagcccacattgtttcccgcggtgcctcgactccttaacaggatctacgataaggtacaaaatgaggccaagacacccttgaagaagttcttgttgaagctggctgtttccagtaaattcaaagagcttcaaaagggtatcatcaggcatgatagtttctgggacaagctcatctttgcaaagatccaggacagcctgggcggaagggttcgtgtaattgtcactggagctgcccccatgtccacttcagtcatgacattcttccgggcagcaatgggatgtcaggtgtatgaagcttatggtcaaacagaatgcacaggtggctgtacatttacattacctggggactggacatcaggtcacgttggggtgcccctggcttgcaattacgtgaagctggaagatgtggctgacatgaactactttacagtgaataatgaaggagaggtctgcatcaagggtacaaacgtgttcaaaggatacctgaaggaccctgagaagacacaggaagccaaagatgtctacaaagacatttccaatgaggccgg

SEQ ID NO: 101399 - DNA, 1927 bp, Homo sapiens
gatttttaagttaagttttgaggtgtgactgtatcagagggaaagaaaccatgccaattgaacgactcacagccctgtcgttcctgacttgcttattttcttggctttgccagaacttcttcagagaccaaggcaggcagctctggcgactggagagaggcggggtagaaggtgtttgtgtgggtctgagggctgaggtaccctctagccagactttcctgtcctccgaatccagcagggaacagcgtcacctctgcctctgtgaggcttctgatctgagggggcacctcaagtcattttagtttgtttgttttcatcttagttgaaagatgataggccacaggagggcagggtcaactgtgttgaggcaagctggcttttgtgtcggcccttaggggctgaggtgaaaggctttgacacggagccagggtagctttggcagcttctcccctcctggtcagaacacttccactttcagttgtgaaaaaaaaaattaaaaccaggaagtgaagtccccgagcacgttagaaagcctgacatggcctgactcgggacagctcagagcagggcagaactggggacactctgggccggccttctgcctgcatggacgctctgaagccaccctgtctctggaggaaccacgagcgagggaagaaggacagggactcgtgtggcaggaagaactcagagccgggaagcccccattcactagaagcactgagagatgcggccccctcgcagggtctgaatttcctgctgctgttcacaaagatgctttttatctttaactttttgttttccccacttccgaccccggcgttgatctgcatcctgacatttggagctgccatcttcttgtggctgatcaccagacctcaacccgtcttacctcttcttgacctgaacaatcagtctgtgggaattgagggaggagcacggaagggggtttcccagaagaacaatgacctaacaagttgctgcttctcagatgccaagactatgtatgaggttttccaaagaggactcgctgtgtctgacaatgggccctgcttgggatatagaaaaccaaaccagccctacagatggctatcttacaaacaggtgtctgatagagcagagtacctgggttcctgtctcttgcataaaggttataaatcatcaccagaccagtttgtcggcatctttgctcagaataggccagagtggatcatctccgaattggcttgttacacgtactctatggtagctgtacctctgtatgacaccttgggaccagaagccatcgtacatattgtcaacaaggctgatatcgccatggtgatctgtgacacaccccaaaaggcattggtgctgatagggaatgtagagaaaggcttcaccccgagcctgaaggtgatcatccttatggacccctttgatgatgacctgaagcaaagaggggagaagagtggaattgagatcttatccctatatgatgctgagaacctaggcaaagagcacttcagaaaacctgtgcctcctagcccagaagacctgagcgtcatctgcttcaccagtgggaccacaggtgaccccaaaggagccatgataacccatcaaaatattgtttcaaatgctgctgcctttctcaaatgtgtggagcatgcttatgagcccactcctgatgatgtggccatatcctacctccctctggctcatatgtttgagaggattgtacaggctgttgtgtacagctgtggagccagagttggattcttccaaggggatattcggttgctggctgacgacatgaagactttgaagcccacattgtttcccgcggtgcctcgactccttaacaggatctacgataaggtacaaaatgaggccaagacacccttcaacaagaacttctgtcgacgcggccgcgaatttagtagtagta

SEQ ID NO: 101400 - DNA, 481 bp, Homo sapiens
gtaagcctggtggtctgtccttgcctgaagaagacaaggtgaggtctgtggcccatctctctttctctgtctcacttctaaaaccccagctatttagatgcagtgatccaagtagaatcgcaacatgcaaaatagaggcaacattagaacatagtattaggatgggcgttggaaccagtgtcagacggacttaggtttgaaacctggttcttccatttccagcttcataaccttgtgcagaccactttgcttctctgaatctgtttctcaacacaagaagaacgtccctgccaaaactgttgttaaagggtcaaggagataataatataggacagtatctttaactcactagtacctcatatttgtttagaaacatgcctttcattaatgtaattccctgcatttacagatagacaatctgagccaggactagcagtccaggattcctgatgtcttaccttgtccttaactctgataccat

SEQ ID NO: 101401 - DNA, 654 bp, Homo sapiens
gagcaagttcaagggtgctggtgatgctccttaacctcattctgagccagcactccctctccttgggccacactgtccaaatgtcctgtgtcctagttattattgccaaacctgcatatgaactggaagttgtgattgctgggtaactctgcagccatctgcccttggcgtttcagatgtttgtaatcaattacctctgtcctaataacacccttaatgattaaatacataaatcacaaaaaattgcaacattccttatacaagaaaaagtctgtccaatgttaaataactgaatgtgtagcttatgtatggtttgattcaatatgtacaaggtgaggggtaggaggggaggggaaaaaacaaattccccctcttgccgaagctattggagacctcaggctggcctcctttctcagtcttggcactgctgtctgccaggaggtagcatctgggttcactcctggcatctcagatctgttgcattgcagtcccctctagacgctgaagcagcgtcacggtgcagacaagtagggccagtgacgagggcagccacacagaggactgcaatacgtacctaaccttgagtttgaaagatggcctgggaattgagcaagggagagagaagaagcttatttgcatccccaaattgagaat

SEQ ID NO: 101402 - DNA, 491 bp, Homo sapiens
actggcttccttccccctactactctcttttcctttgtagtaaaactcttcaaaactccaccttgctgccccagcccctctgctgtccttctccctctccagagcaccccacttttgcttttgttgcccgccaagtctaaaactgctcaagacccccaaggacctgtgtgagctctggtggctcattcctggctctccccttaccccacctgtccacaggattgagactatctctcctctcctgatgaggcactgccctcagcttttgcgtctcctgggtccctcgctggccacttaggctcagactctgcttgttcctccactgcatcccagcctgccaaggcaggggcgccccaggcctgggtccttgctcctcttctctccacagacgcccccggatgacccatgccatttccggcataaaacatcatggagggaccaatcaggcacaagtccacaggcacaagtccacctctcctgggtctctctat

SEQ ID NO: 101403 - DNA, 386 bp, Homo sapiens
gcagttaggtatggccacgtgacagtgaggtgtggccatgtgactgaattctggtcaatgaatgaaatacgtacaggagtgacatatgccacttacaggagtggctcataaaactttccacaattgttccttcaggctcttttctctttctgactagctggctactgtaactagtaggcctagataatccccaggacaacctcagaagtgatgttgttggccaggcatggtggctcatgcctgtaatcccaacactctgggaggccgaggcaggcggatcacttgaggtcaggagttccagaccagcctggccaaaccccatctggtgaaaccccatctctactaaaaatacaaaaattagccaggcatggtggtgtgcacctgta

SEQ ID NO: 101404 - DNA, 891 bp, Homo sapiens
cattcctgaacaaatattcatctcaggttagatttttccagtaagtaaggttcagaggcagtggcaagtggaggaaagtgaacaggtaacacacttgagagcgatttgcatctggattgttcagaaagcaagctggtaagagaggaaggagatgtggtccagggtaagatggggcagatcacctgggccttcagccatgcagaggggtctggatttcatgggaggcggtgggaacagctggagaagaaattatatctgatccacattccaggaattggcagaacagctattctgagactgcgtggggttgtgcggtacctgggttcacttacatagcttctggggccccagaagactctccatctgtgggttgcaattaacgcccgtgccgccacccagaaagaagctgccaaccacagaggccttgtaaaagccacctgctgctattgatgctttttgttggactctgccccaaagcagcccagtacacctggcccagggcaggatgcagggaggccgagttcctagcaaccctttgttagttttcccagctctcctgtcgataagcaattgtaggcaccttgtggaatcaggaaccccgggctcaccagttccttttgcgtagatgagaaaaacctaggctaggagagcgcagtgtcctcacatggctggtgcagcctctgatccacagcgccacaaagcttgcagaaggtggttggcttttgttctgaatctaacaagacttatcgggaggctcttggtgcctggcactggctgaatgcccaggttgggggaggcagagcagatgaagcatctgcccgcgagggtgggtggagctgcttgtgaaacgtatcatcgtagcccgggagctgggacactgaagcccggaga

SEQ ID NO: 101405 - DNA, 881 bp, Homo sapiens
tgcccacctcagcctcccaaagtgctgggattacaggcaggagctaccacacctggcccagcataactcttaagtaggagttaagatttatcagccttggaacagaagatataagtggtcctgattttcagtagaattggaaaattggggccaatgaaagaatgactttctatcaggtttccagcatcttatttcttttacaagtatctatttgaaagtgatttcttttttcataattttttgtatgtctcatctaatgctgcagttatcaaaaggctcccaatctcttttagttgctgtaggaactaaactaaacttctttaattactttgagaaatattcccttttgcatgcactacctgagaatcacagtaagatgatggggactttttttaggggaggaaaaagggttcatttacttgaagaaatcatgtacatttttcttttcccacacatagcacttctcatgtaggggaatcaacttgtttcctcacagatgtttttcctccctgccctccctctcagtcttcttagtttgtgcttgtccaagccttatgttattactcttagtggcatctttgaagaagaaaagatttcggtacatagacaagctgataatagaataatagtaaagaatttgtttccgtctcaatcttagagattggaaaagctctctgtctcatccagggatttggagggtcagagcaggtgagtgcccctgccctccacttactgaggcttgtttcccaagggagcaccatgctgcatgaagcacatgtgcatgctccacagcatttgaactgcagagtccgtcatcctgtgttcctgatttttatataaaatctgttgttagataccaattcaagaatcaggtagagaca

SEQ ID NO: 101406 - DNA, 330 bp, Homo sapiens
atctcaaggcagaagaatttgtcttagtacagaacaaaatggagtctcctatgtctacttctttctacacagacacagtaacaatctgatctctcttgcttttccccacactctcattcagcataatcatgctgatatttatccaagtctaaaatcctttgatattcatccgtgatacacatccatgttgcatgtgtcaaaagcccattcccctgtatggatctaacacagcctgtttatccattcacatgtggatggatttctggatcatttccagtttttgctcatacaaataaagccgctgtgaacctttgtgtacaaatcttggtc

SEQ ID NO: 101407 - DNA, 419 bp, Homo sapiens
agagtgcagtggccctgtctcagctcactgcaacctccacatccctggttcaagcaattctcgtgccccagcctcccgaatagctgagattacaggcacatgccaccatgcccagctaatttttgtattttcagtagagttgggatttcaccatgttggccagggtggcctcgaactccagacctcaggtgatctgcctgcctcagcctcccaaagtgctggaattacaatcatgagccaccactcttagcctctacaaaaaaaatttttttagttagcaggtgtggtgatgtgcacctttagtcccaggaggctgaggtaggaagattgcttgagcctggagaggtcaaggctgcagtgagctatgattatgccactgcactccagcctgggtgacagagtgagaccctgtctcaaga

SEQ ID NO: 101408 - DNA, 598 bp, Homo sapiens
gtgagtgtgttttcgtgtttggggtggaaacgtaggcggggaagagaaggaggagaggggagtgcctgcagtccttcccccttcccttcctgctaagagatcaaagtgcagaggaaatccagacgggaaatgagagaaaggaaaaacagcagccgtggaagcactctcttttttatatcgctggagactcggccgagcaactactggaaccattaccatttcttaacctttagtggagtggctgcctttgcctattaactggaagggcactttgtaaacgcaggcgaggcacacacctacacacacgcctacacgctgggggaaaataaccacattctgggggacggagggaggcccaggcaaggcgcggccatggatctctactgccagagctgcgagggcatctggccagcaacacccggcttcttgggcgaacagtcgcccaagagtccacaattttcttgtgactcaaatagatggataggtgcatggatggatggtgcagaatattcatactctgtctaatctcaagtggactggagtcaacgcatttttaaatccatctaccttttttagaggcacagcatttaaaaccctg

SEQ ID NO: 101409 - DNA, 628 bp, Homo sapiens
gcagaattacattgctgtgctgagcatacgtagacttcaggagtcaaaggggaaggaaggaggtagcgggctgttgccttcctctggttgctggaggcctggaccaaggtggagttagtgggatggaggaagtggaagaaggcatgggattttggaggctagagcctgcattggtggtgaactggatgtcatagaggagggaaggaaaaggaaccaggaagagaagaactctctgaattgggcacgcacatctctgatgggcaccgatgaggattgttaccaggaacgaggagactgggatcaggaaagtggctttgggagggaggaaccaaggcttctcttttggatgtgtcaagatagatctgccttcgagaaatccgagttgtggtatcaaatagccagttggatatgtgagactggagtttgggggaaagagaggccgtggctcaaaaacgtaagttttggaaacgtcaacataaagccacaggattgggtgacgtggcctagcaggggggtggggacagagaagcgaccctggccagagccttggggacatctacatctgggggagaaggggatgtagcaaaacgagcttaggagtgatctcgaggtaggctgaaaccaggag

SEQ ID NO: 101410 - DNA, 947 bp, Homo sapiens
actggataaattttatgactatatttaattaatatgagcacattttagagtggagaaaacaaagacttcattcatccagcaaatatttattcagtacccgaagtgctagaaactatatgagggtagtaaataaaatagaatattcctgtcctactatggagggggaatggagagggagtggaggaatagatgataaacaaacaaacaaacaagcaaactagttcattgtacataaagaagttatttttttctgacagtaactaacaaaggtctgggcaagaatcagagggtgaccattttaagaggtggtgtttctgttgagactcaaatgataagaaggatccagtgatgcagaaatccagggcaaggaataggatgtttgaagcctccatagaagaaaagcattttatagtagatcagaaagcaataacaaaaaagaaaaaagaaaaaaaaaacatttggcaatgtctaggaacaaaaaggacattaacgtgggtagaatgctgtgagctaaaaagagagtagattgaaatgaagttaaagagaaatggagagacagacctcatagaattttgccctaaatgaaatgggaagccagggaagtatgacacagtcccataataaacctgcttctggtgcagaatggattggaattatcaaggcagttagtgaggaatccagttagaaggtgaatacagtggttcagtggtccaggatggaaatcacagtgacctcaactaagaaggcagcagtagaggtagagagaagttgatagatttgtcagttaagtcctgaatcaccttgattgttacctactctctctctttggttcttaattttgtcttctgtaaactgggattaattatattaatgcaaagagatgttcagaacatgatttgagacaagacatgagtacctgacataaggtaggatgcagtaaatctcag

SEQ ID NO: 101411 - DNA, 751 bp, Homo sapiens
gatgacgtctagcactagtaatgggtctgtaataaagtggcttacctcttttgggcaaactgaaaatatgacaggaagtaagcaaagagaaaaccaagcttggacagcagtgagccagagtaatccatatagtggtaatttcagattcaatgtagggatcaattttatccttaataatggaaggctgaatacagaaaatgaatatgcatcatctgcaagatttcccaggggagaaaatagggaaaacagaggaaagtggaaaatccacaatctgagtcaacatttgcaaggccacctaggtcaggtacaaagtgcgacagaagtattaatgaaagttccacttaccagaggtcagagaagactgagaagcaggagcccagaccaatggagaaccagagcgagaaataaaagtaggttccctccaaattcatggtgagaaatttcacaaatatttcatgataatatacatctcagacttttgaatgacccctggtaaatgagacagagattttctagaactcagcaacatgagacattgagagagcaaataactgacccatagttgcaaagtggcatgtttttgtagcttttggaacatggaatgcctttccaggaaaacgttctccagacacaatcagaaatggtgaatctggggcactgagactgagaaatccagtcatagtcctgattgtgatagtaggaagagttcatcatggggaatatttgccaagatatagcacacctaatagaa

SEQ ID NO: 101412 - DNA, 288 bp, Homo sapiens
tgatgaggagcagctagaagactcgagggagaaaaatccttgtagacacatcagtggattcaggtgacttgtgttatttttaaaatacagcctcgccaagatacaattcacacagtctccaacctaacgatttagctctgcttttaagactgtgttgggtttgactttttttgaggggcctcggccactcttgggttgtttgtaatctaaaaataattggggatgaatattggttacatttcatcccgtaggaccttagtctgtctggtcaccacttacccctccagg

SEQ ID NO: 101413 - DNA, 325 bp, Homo sapiens
gccccaagtgattcccacccacattaaggtttgagtgttctgtgatactgcagatagctgtaaaaattaaaaatgctcaagtttacaaatgaattcagagatatggtatgaaaagtaccaagacacggaatcagaaaagcccaaagagaaaaaccaatatataaatgaatttctttgccaccgatagcaaaggctcatttttcaacaatacctatttattgcttcctgctttaagtattttgtgcaagagcacaacacttataaaggtttacaaaagaattaccgggtctagaaattccaggcaacctggtccaaacgtgtgaaa

SEQ ID NO: 101414 - DNA, 321 bp, Homo sapiens
tgcatgaggggagggggtgtgtgtctgttttgttcactgctattaccccgtgcctagaacagtgcctagcatgtggaagactcccagatacaataaataaatgagcaaactgggcatggtggtgcatgcctgtagtcccagctacttaagaggctgagacaggggcattgcttgagcccagaggtttgagtctagcctgggcaacatagggagaccctgagaaagaagaaagcaaagcaaagctaaaaaaaaaaagaaagaaaaggaaggaaagaaaggaaggaaagagagaaaaatagagagaaagagaaaaagagaaaa

SEQ ID NO: 101415 - DNA, 541 bp, Homo sapiens
taatcagctcgtacccttcccaccagcaaagacggagctgggagactttccagaggcacagtgccaagcacgtgggctgcaatctgaaggttgagtgggaatcaacaaggtaaaggatggagtcttggggaggaccatcacaggcagaggatttctgtgggcaaaagcccagatatttaaagcatgaaacatttgaagcccacaagtgttggaaccgaggagaaatgcatttgttcaatgcattcatcaagcacttaggcagtgctgagcatggtttgacagcacacagtgagagcctgccctccggggtgccctgtggccttctttattggtattatcattgttattactttttctcattccttttcagttaatccaggttcttcttatgtactcatctccttcatctctgatttctcttgcccacttagaaatgtgtttatccattttgccaatctccctccatattcaattctattcatagctcataagcttatgagctatatgatatggttttccttttattttataaaagaataag

SEQ ID NO: 101416 - DNA, 886 bp, Homo sapiens
  misc_feature (7)..(8): n is a, c, g, or t
ggcacanncctcgctcggctgcggctctcgggtgtcccaggcccggccggtaagcagagcatggcgggtgcgggcccgaagcggcgggcgctagcggccccggtggccgaggagaaggaagaggcgcgggagaagatgctggcctccaagcgcgcggacggcgcggcgccggcaggcgagggcgagggcgtgaccctgcagcggaacatcacgctactcaacggcgtggccatcatcgtgggcgccatcatcggctcgggcatcttcgtgacgcccacgggcgtgcttaaggaggcaggctcgccggggctggcgctggtgatgtgggccgcgtgcggcgtcttctccatcgtgggcgcgctctgctacgcggagctgggcaccaccatctccaaatcgggcggcgactacgcctacatgctggacgtctacggctcgctgcccgccttcctcaagctctggatcgagctgctcgtcatccggccttcatcgcagtacatcgtggccctggtcttcgccacctacctgctcaagccgctcttccccagctgcccggtgcccgaggaggcagccaagctcatggcctgccactgcgtgcgccctggcaggagggactggcttacgccaccctgtgcaggatcgtcttctcagcttacagagcctagtgtgattcaacaaccctccatctctgcccccaacatgcccaactgatctggtggagggaactgaagatgaaggcctctcaggcaccatggatgggatgggtgtgtgtgaagggggcagggtccccaggagctgccccaggtctggctggacagttgcacgggaagtcctgtttgtgaactcaacgtttccacggcttttccattaaactttaccccaaatc

SEQ ID NO: 101417 - DNA, 361 bp, Homo sapiens
agggcctggcccagatcatcctcgctgggctatcgatccagcatcgggaagcggtgatgtgtccaatctagatcccaacttctcatttgaaggcaccaaactggatgtggggaacattgtgctggcattatacagcggcctctttgcctatggaggatggaattacttgaatttcgtcacagaggaaatgatcaacccctacagaaacctgcccctggccattcaaccggaggcgttcaatggccccccatcatgctggtgctcatgaccgccaagatcgtgggcgacgtcttcattgagggcctgtacgacatgcacattcagctgcagagtgtgcccttcctgcactgggaggccccgg

SEQ ID NO: 101418 - DNA, 4823 bp, Homo sapiens
gggtcctgacgcaactgcgggccgcgggcggcgcgcacactgctcgctgggccgcggctcccgggtgtcccaggcccggccggtgcgcagagcatggcgggtgcgggcccgaagcggcgcgcgctagcggcgccggcggccgaggagaaggaagaggcgcgggagaagatgctggccgccaagagcgcggacggctcggcgccggcaggcgagggcgagggcgtgaccctgcagcggaacatcacgctgctcaacggcgtggccatcatcgtggggaccattatcggctcgggcatcttcgtgacgcccacgggcgtgctcaaggaggcaggctcgccggggctggcgctggtggtgtgggccgcgtgcggcgtcttctccatcgtgggcgcgctctgctacgcggagctcggcaccaccatctccaaatcgggcggcgactacgcctacatgctggaggtctacggctcgctgcccgccttcctcaagctctggatcgagctgctcatcatccggccttcatcgcagtacatcgtggccctggtcttcgccacctacctgctcaagccgctcttccccacctgcccggtgcccgaggaggcagccaagctcgtggcctgcctctgcgtgctgctgctcacggccgtgaactgctacagcgtgaaggccgccacccgggtccaggatgcctttgccgccgccaagctcctggccctggccctgatcatcctgctgggcttcgtccagatcgggaagggtgatgtgtccaatctagatcccaacttctcatttgaaggcaccaaactggatgtggggaacattgtgctggcattatacagcggcctctttgcctatggaggatggaattacttgaatttcgtcacagaggaaatgatcaacccctacagaaacctgcccctggccatcatcatctccctgcccatcgtgacgctggtgtacgtgctgaccaacctggcctacttcaccaccctgtccaccgagcagatgctgtcgtccgaggccgtggccgtggacttcgggaactatcacctgggcgtcatgtcctggatcatccccgtcttcgtgggcctgtcctgcttcggctccgtcaatgggtccctgttcacatcctccaggctcttcttcgtggggtcccgggaaggccacctgccctccatcctctccatgatccacccacagctcctcacccccgtgccgtccctcgtgttcacgtgtgtgatgacgctgctctacgccttctccaaggacatcttctccgtcatcaacttcttcagcttcttcaactggctctgcgtggccctggccatcatcggcatgatctggctgcgccacagaaagcctgagcttgagcggcccatcaaggtgaacctggccctgcctgtgttcttcatcctggcctgcctcttcctgatcgccgtctccttctggaagacacccgtggagtgtggcatcggcttcaccatcatcctcagcgggctgcccgtctacttcttcggggtctggtggaaaaacaagcccaagtggctcctccagggcatcttctccacgaccgtcctgtgtcagaagctcatgcaggtggtcccccaggagacatagccaggaggccgagtggctgccggaggagcatgcgcagaggccagttaaagtagatcacctcctcgaacccactccggttccccgcaacccacagctcagctgcccatcccagtccctcgccgtccctcccaggtcgggcagtggaggctgctgtgaaaactctggtacgaatctcatccctcaactgagggccagggacccaggtgtgcctgtgctcctgcccaggagcagcttttggtctccttgggccctttttcccttccctcctttgtttacttatatatatattttttttaaacttaaattttgggtcaacttgacaccactaagatgattttttaaggagctgggggaaggcaggagccttcctttctcctgccccaagggcccagaccctgggcaaacagagctactgagacttggaacctcattgctaccacagacttgcactgaagccggacagctgcccagacacatgggcttgtgacattcgtgaaaaccaaccctgtgggcttatgtctctgccttagggtttgcagagtggaaactcagccgtagggtggcactgggagggggtgggggatctgggcaaggtgggtgattcctcccaggaggtgcttgaggccccgatggactcctgaccataatcctagccccgagacaccatcctgagccagggaacagccccagggttggggggtgccggcatctcccctagctcaccaggcctggcctctgggcagtgtggcctcttggctatttctgtgtccagttttggaggctgagttctggttcatgcagacaaagccctgtccttcagtcttctagaaacagagacaagaaaggcagacacaccgcggccaggcacccatgtgggcgcccaccctgggctccacacagcagtgtcccctgccccagaggtcgcagctaccctcagcctccaatgcattggcctctgtaccgcccggcagccccttctggccggtgctgggttcccactcccggcctaggcacctccccgctctccctgtcacgctcatgtcctgtcctggtcctgatgcccgttgtctaggagacagagccaagcactgctcacgtctctgccgcctgcgtttggaggcccctgggctctcacccagtccccacccgcctgcagagagggaactagggcaccccttgtttctgttgttcccgtgaatttttttcgctatgggaggcagccgaggcctggccaatgcggcccactttcctgagctgtcgctgcctccatggcagcagccagggacccccagaacaagaagacccccccgcaggatccctcctgagctcggggggctctgccttctcaggccccgggcttcccttctccccagccagaggtggagccaagtggtccagcgtcactccagtgctcagctgtggctggaggagctggcctgtggcacagccctgagtgtcccaagccgggagccaacgaagccggacacggcttcactgaccagcggctgctcaagccgcaagctctcagcaagtgcccagtggagcctgccgcccccgcctgggcaccgggaccccctcaccatccagtgggcccggagaaacctgatgaacagtttggggactcaggaccagatgtccgtctctcttgcttgaggaatgaagacctttattcacccctgccccgttgcttcccgctgcacatggacagacttcacagcgtctgctcataggacctgcatccttcctggggacgaattccactcgtccaagggacagcccacggtctggaggccgaggaccaccagcaggcaggtggactgactgtgttgggcaagacctcttccctctgggcctgttctcttggctgcaaataaggacagcagctggtgccccacctgcctggtgcattgctgtgtgaatccaggaggcagtggacatcgtaggcagccacggccccgggtccaggagaagtgctccctggaggcacgcaccactgcttcccactggggccggcggggcccacgcacgacgtcagcctcttaccttcccgcctcggctaggggtcctcgggatgccgttctgttccaacctcctgctctgggacgtggacatgcctcaaggatacagggagccggcggcctctcgacggcacgcacttgcctgttggctgctgcggctgtgggcgagcatgggggctgccagcgtctgttgtggaaagtagctgctagtgaaatggctggggccgctggggtccgtcttcacactgcgcaggtctcttctgggcgtctgagctggggtgggagctcctccgcagaaggttggtggggggtccagtctgtgatccttggtgctgtgtgccccactccagcctggggaccccacttcagaaggtaggggccgtgtcccgcggtgctgactgaggcctgcttccccctccccctcctgctgtgctggaattccacagggaccagggccaccgcaggggactgtctcagaagacttgatttttccgtccctttttctccacactccactgacaaacgtccccagcggtttccacttgtgggcttcaggtgttttcaagcacaacccaccacaacaagcaagtgcattttcagtcgttgtgcttttttgttttgtgctaacgtcttactaatttaaagatgctgtcggcaccatgtttatttatttccagtggtcatgctcagccttgctgctctgcgtggcgcaggtgccatgcctgctccctgtctgtgtcccagccacgcagggccatccactgtgacgtcggccgaccaggctggacaccctctgccgagtaatgacgtgtgtggctgggaccttctttattctgtgttaatggctaacctgttacactgggctgggttgggtagggtgttctggcttttttgtggggtttttatttttaaagaaacactcaatcatcctaaaaaaaaaacaaaaaaagtgcagcgggaaaaggctaagggcgccaacggtccacgtaggctttcaccccagcaggggggttatcactaggctaaaccgggacaaagaccggaaaaagatcctcgaacgggaaagccaaatctcgccaagtcggaacggcacccggcgcactcacccgggaacgaaacctttggcgacagatgccggacataacacgtaatccttattataccaacgtctggattcacaatctggat

SEQ ID NO: 101419 - DNA, 4791 bp, Homo sapiens
  misc_feature (7)..(8): n is a, c, g, or t
ggcacanncctcgctcggctgcggctctcgggtgtcccaggcccggccggtaagcagagcatggcgggtgcgggcccgaagcggcgggcgctagcggccccggtggccgaggagaaggaagaggcgcgggagaagatgctggcctccaagcgcgcggacggcgcggcgccggcaggcgagggcgagggcgtgaccctgcagcggaacatcacgctactcaacggcgtggccatcatcgtgggcgccatcatcggctcgggcatcttcgtgacgcccacgggcgtgcttaaggaggcaggctcgccggggctggcgctggtgatgtgggccgcgtgcggcgtcttctccatcgtgggcgcgctctgctacgcggagctgggcaccaccatctccaaatcgggcggcgactacgcctacatgctggacgtctacggctcgctgcccgccttcctcaagctctggatcgagctgctcgtcatccggccttcatcgcagtacatcgtggccctggtcttcgccacctacctgctcaagccgctcttccccagctgcccggtgcccgaggaggcagccaagctcatggcctgccactgcgtgcgtgctgctcacggccgtgaactgctacagcgtgaaggccgccacccgggtccaggatgcctttgccgccgccaagctcctggccctggccctgatcatcctgctgggcttcgtccagatcgggaagggtgatgtgtccaatctagatcccaacttctcatttgaaggcaccaaactggatgtggggaacattgtgctggcattatacagcggcctctttgcctatggaggatggaattacttgaatttcgtcacagaggaaatgatcaacccctacagaaacctgcccctggccatcatcatctccctgcccatcgtgacgctggtgtacgtgctgaccaacctggcctacttcaccaccctgtccaccgagcagatgctgtcgtccgaggccgtggccgtggacttcgggaactatcacctgggcgtcatgtcctggatcatccccgtcttcgtgggcctgtcctgcttcggctccgtcaatgggtccctgttcacatcctccaggctcttcttcgtggggtcccgggaaggccacctgccctccatcctctccatgatccacccacagctcctcacccccgtgccgtccctcgtgttcacgtgtgtgatgacgctgctctacgccttctccaaggacatcttctccgtcatcaacttcttcagcttcttcaactggctctgcgtggccctggccatcatcggcatgatctggctgcgccacagaaagcctgagcttgagcggcccatcaaggtgaacctggccctgcctgtgttcttcatcctggcctgcctcttcctgatcgccgtctccttctggaagacacccgtggagtgtggcatcggcttcaccatcatcctcagcgggctgcccgtctacttcttcggggtctggtggaaaaacaagcccaagtggctcctccagggcatcttctccacgaccgtcctgtgtcagaagctcatgcaggtggtcccccaggagacatagccaggaggccgagtggctgccggaggagcatgcgcagaggccagttaaagtagatcacctcctcgaacccactccggttccccgcaacccacagctcagctgcccatcccagtccctcgccgtccctcccaggtcgggcagtggaggctgctgtgaaaactctggtacgaatctcatccctcaactgagggccagggacccaggtgtgcctgtgctcctgcccaggagcagcttttggtctccttgggccctttttcccttccctcctttgtttacttatatatatattttttttaaacttaaattttgggtcaacttgacaccactaagatgattttttaaggagctgggggaaggcaggagccttcctttctcctgccccaagggcccagaccctgggcaaacagagctactgagacttggaacctcattgctaccacagacttgcactgaagccggacagctgcccagacacatgggcttgtgacattcgtgaaaaccaaccctgtgggcttatgtctctgccttagggtttgcagagtggaaactcagccgtagggtggcactgggagggggtgggggatctgggcaaggtgggtgattcctcccaggaggtgcttgaggccccgatggactcctgaccataatcctagccccgagacaccatcctgagccagggaacagccccagggttggggggtgccggcatctcccctagctcaccaggcctggcctctgggcagtgtggcctcttggctatttctgtgtccagttttggaggctgagttctggttcatgcagacaaagccctgtccttcagtcttctagaaacagagacaagaaaggcagacacaccgcggccaggcacccatgtgggcgcccaccctgggctccacacagcagtgtcccctgccccagaggtcgcagctaccctcagcctccaatgcattggcctctgtaccgcccggcagccccttctggccggtgctgggttcccactcccggcctaggcacctccccgctctccctgtcacgctcatgtcctgtcctggtcctgatgcccgttgtctaggagacagagccaagcactgctcacgtctctgccgcctgcgtttggaggcccctgggctctcacccagtccccacccgcctgcagagagggaactagggcaccccttgtttctgttgttcccgtgaatttttttcgctatgggaggcagccgaggcctggccaatgcggcccactttcctgagctgtcgctgcctccatggcagcagccagggacccccagaacaagaagacccccccgcaggatccctcctgagctcggggggctctgccttctcaggccccgggcttcccttctccccagccagaggtggagccaagtggtccagcgtcactccagtgctcagctgtggctggaggagctggcctgtggcacagccctgagtgtcccaagccgggagccaacgaagccggacacggcttcactgaccagcggctgctcaagccgcaagctctcagcaagtgcccagtggagcctgccgcccccgcctgggcaccgggaccccctcaccatccagtgggcccggagaaacctgatgaacagtttggggactcaggaccagatgtccgtctctcttgcttgaggaatgaagacctttattcacccctgccccgttgcttcccgctgcacatggacagacttcacagcgtctgctcataggacctgcatccttcctggggacgaattccactcgtccaagggacagcccacggtctggaggccgaggaccaccagcaggcaggtggactgactgtgttgggcaagacctcttccctctgggcctgttctcttggctgcaaataaggacagcagctggtgccccacctgcctggtgcattgctgtgtgaatccaggaggcagtggacatcgtaggcagccacggccccgggtccaggagaagtgctccctggaggcacgcaccactgcttcccactggggccggcggggcccacgcacgacgtcagcctcttaccttcccgcctcggctaggggtcctcgggatgccgttctgttccaacctcctgctctgggacgtggacatgcctcaaggatacagggagccggcggcctctcgacggcacgcacttgcctgttggctgctgcggctgtgggcgagcatgggggctgccagcgtctgttgtggaaagtagctgctagtgaaatggctggggccgctggggtccgtcttcacactgcgcaggtctcttctgggcgtctgagctggggtgggagctcctccgcagaaggttggtggggggtccagtctgtgatccttggtgctgtgtgccccactccagcctggggaccccacttcagaaggtaggggccgtgtcccgcggtgctgactgaggcctgcttccccctccccctcctgctgtgctggaattccacagggaccagggccaccgcaggggactgtctcagaagacttgatttttccgtccctttttctccacactccactgacaaacgtccccagcggtttccacttgtgggcttcaggtgttttcaagcacaacccaccacaacaagcaagtgcattttcagtcgttgtgcttttttgttttgtgctaacgtcttactaatttaaagatgctgtcggcaccatgtttatttatttccagtggtcatgctcagccttgctgctctgcgtggcgcaggtgccatgcctgctccctgtctgtgtcccagccacgcagggccatccactgtgacgtcggccgaccaggctggacaccctctgccgagtaatgacgtgtgtggctgggaccttctttattctgtgttaatggctaacctgttacactgggctgggttgggtagggtgttctggcttttttgtggggtttttatttttaaagaaacactcaatcatcctaaaaaaaaaacaaaaaaagtgcagcgggaaaaggctaagggcgccaacggtccacgtaggctttcaccccagcaggggggttatcactaggctaaaccgggacaaagaccggaaaaagatcctcgaacgggaaagccaaatctcgccaagtcggaacggcacccggcgcactcacccgggaacgaaacctttggcgacagatgccggacataacacgtaatccttattataccaacgtctggattcacaatctggat

SEQ ID NO: 101420 - DNA, 3748 bp, Homo sapiens
gaccttgcatgttgctcagatgaggtttctcctttaaaacaaaattccctggtgctcagctgggcccagccaggctggacagtccccggtggccaccacggccgtccacagccctggtcgtgggccccagggctcagccagccgcctctctcttccagtgtgtgatgacgctgctctacgccttctccaaggacatcttctccgtcatcaacttcttcagcttcttcaactggctctgcgtggccctggccatcatcggcatgatctggctgcgccacagaaagcctgagcttgagcggcccatcaaggtgaacctggccctgcctgtgttcttcatcctggcctgcctcttcctgatcgccgtctccttctggaagacacccgtggagtgtggcatcggcttcaccatcatcctcagcgggctgcccgtctacttcttcggggtctggtggaaaaacaagcccaagtggctcctccagggcatcttctccacgaccgtcctgtgtcagaagctcatgcaggtggtcccccaggagacatagccaggaggccgagtggctgccggaggagcatgcgcagaggccagttaaagtagatcacctcctcgaacccactccggttccccgcaacccacagctcagctgcccatcccagtccctcgccgtccctcccaggtcgggcagtggaggctgctgtgaaaactctggtacgaatctcatccctcaactgagggccagggacccaggtgtgcctgtgctcctgcccaggagcagcttttggtctccttgggccctttttcccttccctcctttgtttacttatatatatattttttttaaacttaaattttgggtcaacttgacaccactaagatgattttttaaggagctgggggaaggcaggagccttcctttctcctgccccaagggcccagaccctgggcaaacagagctactgagacttggaacctcattgctaccacagacttgcactgaagccggacagctgcccagacacatgggcttgtgacattcgtgaaaaccaaccctgtgggcttatgtctctgccttagggtttgcagagtggaaactcagccgtagggtggcactgggagggggtgggggatctgggcaaggtgggtgattcctcccaggaggtgcttgaggccccgatggactcctgaccataatcctagccccgagacaccatcctgagccagggaacagccccagggttggggggtgccggcatctcccctagctcaccaggcctggcctctgggcagtgtggcctcttggctatttctgtgtccagttttggaggctgagttctggttcatgcagacaaagccctgtccttcagtcttctagaaacagagacaagaaaggcagacacaccgcggccaggcacccatgtgggcgcccaccctgggctccacacagcagtgtcccctgccccagaggtcgcagctaccctcagcctccaatgcattggcctctgtaccgcccggcagccccttctggccggtgctgggttcccactcccggcctaggcacctccccgctctccctgtcacgctcatgtcctgtcctggtcctgatgcccgttgtctaggagacagagccaagcactgctcacgtctctgccgcctgcgtttggaggcccctgggctctcacccagtccccacccgcctgcagagagggaactagggcaccccttgtttctgttgttcccgtgaatttttttcgctatgggaggcagccgaggcctggccaatgcggcccactttcctgagctgtcgctgcctccatggcagcagccagggacccccagaacaagaagacccccccgcaggatccctcctgagctcggggggctctgccttctcaggccccgggcttcccttctccccagccagaggtggagccaagtggtccagcgtcactccagtgctcagctgtggctggaggagctggcctgtggcacagccctgagtgtcccaagccgggagccaacgaagccggacacggcttcactgaccagcggctgctcaagccgcaagctctcagcaagtgcccagtggagcctgccgcccccgcctgggcaccgggaccccctcaccatccagtgggcccggagaaacctgatgaacagtttggggactcaggaccagatgtccgtctctcttgcttgaggaatgaagacctttattcacccctgccccgttgcttcccgctgcacatggacagacttcacagcgtctgctcataggacctgcatccttcctggggacgaattccactcgtccaagggacagcccacggtctggaggccgaggaccaccagcaggcaggtggactgactgtgttgggcaagacctcttccctctgggcctgttctcttggctgcaaataaggacagcagctggtgccccacctgcctggtgcattgctgtgtgaatccaggaggcagtggacatcgtaggcagccacggccccgggtccaggagaagtgctccctggaggcacgcaccactgcttcccactggggccggcggggcccacgcacgacgtcagcctcttaccttcccgcctcggctaggggtcctcgggatgccgttctgttccaacctcctgctctgggacgtggacatgcctcaaggatacagggagccggcggcctctcgacggcacgcacttgcctgttggctgctgcggctgtgggcgagcatgggggctgccagcgtctgttgtggaaagtagctgctagtgaaatggctggggccgctggggtccgtcttcacactgcgcaggtctcttctgggcgtctgagctggggtgggagctcctccgcagaaggttggtggggggtccagtctgtgatccttggtgctgtgtgccccactccagcctggggaccccacttcagaaggtaggggccgtgtcccgcggtgctgactgaggcctgcttccccctccccctcctgctgtgctggaattccacagggaccagggccaccgcaggggactgtctcagaagacttgatttttccgtccctttttctccacactccactgacaaacgtccccagcggtttccacttgtgggcttcaggtgttttcaagcacaacccaccacaacaagcaagtgcattttcagtcgttgtgcttttttgttttgtgctaacgtcttactaatttaaagatgctgtcggcaccatgtttatttatttccagtggtcatgctcagccttgctgctctgcgtggcgcaggtgccatgcctgctccctgtctgtgtcccagccacgcagggccatccactgtgacgtcggccgaccaggctggacaccctctgccgagtaatgacgtgtgtggctgggaccttctttattctgtgttaatggctaacctgttacactgggctgggttgggtagggtgttctggcttttttgtggggtttttatttttaaagaaacactcaatcatcctaaaaaaaaaacaaaaaaagtgcagcgggaaaaggctaagggcgccaacggtccacgtaggctttcaccccagcaggggggttatcactaggctaaaccgggacaaagaccggaaaaagatcctcgaacgggaaagccaaatctcgccaagtcggaacggcacccggcgcactcacccgggaacgaaacctttggcgacagatgccggacataacacgtaatccttattataccaacgtctggattcacaatctggat

SEQ ID NO: 101421 - DNA, 3606 bp, Homo sapiens
taagatgtatatgaaacacaaatgaatttcaagtttagacttgggccctatctccagggtatctcattatatgtataccaacattacaaagtcaaaaaaaactccaaaacacttctggtcctaagcattttggataaaggatactcaatctgtactattttctctttcttttttatagacagggtcttacactgacacccaagctggagtgcagtggccctatcatagcttgctacagcctcaaactcctgggctcaagtcatacatcatcctcagcgggctgcccgtctacttcttcggggtctggtggaaaaacaagcccaagtggctcctccagggcatcttctccacgaccgtcctgtgtcagaagctcatgcaggtggtcccccaggagacatagccaggaggccgagtggctgccggaggagcatgcgcagaggccagttaaagtagatcacctcctcgaacccactccggttccccgcaacccacagctcagctgcccatcccagtccctcgccgtccctcccaggtcgggcagtggaggctgctgtgaaaactctggtacgaatctcatccctcaactgagggccagggacccaggtgtgcctgtgctcctgcccaggagcagcttttggtctccttgggccctttttcccttccctcctttgtttacttatatatatattttttttaaacttaaattttgggtcaacttgacaccactaagatgattttttaaggagctgggggaaggcaggagccttcctttctcctgccccaagggcccagaccctgggcaaacagagctactgagacttggaacctcattgctaccacagacttgcactgaagccggacagctgcccagacacatgggcttgtgacattcgtgaaaaccaaccctgtgggcttatgtctctgccttagggtttgcagagtggaaactcagccgtagggtggcactgggagggggtgggggatctgggcaaggtgggtgattcctcccaggaggtgcttgaggccccgatggactcctgaccataatcctagccccgagacaccatcctgagccagggaacagccccagggttggggggtgccggcatctcccctagctcaccaggcctggcctctgggcagtgtggcctcttggctatttctgtgtccagttttggaggctgagttctggttcatgcagacaaagccctgtccttcagtcttctagaaacagagacaagaaaggcagacacaccgcggccaggcacccatgtgggcgcccaccctgggctccacacagcagtgtcccctgccccagaggtcgcagctaccctcagcctccaatgcattggcctctgtaccgcccggcagccccttctggccggtgctgggttcccactcccggcctaggcacctccccgctctccctgtcacgctcatgtcctgtcctggtcctgatgcccgttgtctaggagacagagccaagcactgctcacgtctctgccgcctgcgtttggaggcccctgggctctcacccagtccccacccgcctgcagagagggaactagggcaccccttgtttctgttgttcccgtgaatttttttcgctatgggaggcagccgaggcctggccaatgcggcccactttcctgagctgtcgctgcctccatggcagcagccagggacccccagaacaagaagacccccccgcaggatccctcctgagctcggggggctctgccttctcaggccccgggcttcccttctccccagccagaggtggagccaagtggtccagcgtcactccagtgctcagctgtggctggaggagctggcctgtggcacagccctgagtgtcccaagccgggagccaacgaagccggacacggcttcactgaccagcggctgctcaagccgcaagctctcagcaagtgcccagtggagcctgccgcccccgcctgggcaccgggaccccctcaccatccagtgggcccggagaaacctgatgaacagtttggggactcaggaccagatgtccgtctctcttgcttgaggaatgaagacctttattcacccctgccccgttgcttcccgctgcacatggacagacttcacagcgtctgctcataggacctgcatccttcctggggacgaattccactcgtccaagggacagcccacggtctggaggccgaggaccaccagcaggcaggtggactgactgtgttgggcaagacctcttccctctgggcctgttctcttggctgcaaataaggacagcagctggtgccccacctgcctggtgcattgctgtgtgaatccaggaggcagtggacatcgtaggcagccacggccccgggtccaggagaagtgctccctggaggcacgcaccactgcttcccactggggccggcggggcccacgcacgacgtcagcctcttaccttcccgcctcggctaggggtcctcgggatgccgttctgttccaacctcctgctctgggacgtggacatgcctcaaggatacagggagccggcggcctctcgacggcacgcacttgcctgttggctgctgcggctgtgggcgagcatgggggctgccagcgtctgttgtggaaagtagctgctagtgaaatggctggggccgctggggtccgtcttcacactgcgcaggtctcttctgggcgtctgagctggggtgggagctcctccgcagaaggttggtggggggtccagtctgtgatccttggtgctgtgtgccccactccagcctggggaccccacttcagaaggtaggggccgtgtcccgcggtgctgactgaggcctgcttccccctccccctcctgctgtgctggaattccacagggaccagggccaccgcaggggactgtctcagaagacttgatttttccgtccctttttctccacactccactgacaaacgtccccagcggtttccacttgtgggcttcaggtgttttcaagcacaacccaccacaacaagcaagtgcattttcagtcgttgtgcttttttgttttgtgctaacgtcttactaatttaaagatgctgtcggcaccatgtttatttatttccagtggtcatgctcagccttgctgctctgcgtggcgcaggtgccatgcctgctccctgtctgtgtcccagccacgcagggccatccactgtgacgtcggccgaccaggctggacaccctctgccgagtaatgacgtgtgtggctgggaccttctttattctgtgttaatggctaacctgttacactgggctgggttgggtagggtgttctggcttttttgtggggtttttatttttaaagaaacactcaatcatcctaaaaaaaaaacaaaaaaagtgcagcgggaaaaggctaagggcgccaacggtccacgtaggctttcaccccagcaggggggttatcactaggctaaaccgggacaaagaccggaaaaagatcctcgaacgggaaagccaaatctcgccaagtcggaacggcacccggcgcactcacccgggaacgaaacctttggcgacagatgccggacataacacgtaatccttattataccaacgtctggattcacaatctggat

SEQ ID NO: 101422 - DNA, 2897 bp, Homo sapiens
ccacgcgtcgcggacgcgtgggtcgacccacgcgtcgctgggggaaggcaggagccttcctttctcctgccccaagggcccagaccctgggcaaacagagctactgagacttggaacctcattgctaccacagacttgcactgaagccggacagctgcccagacacatgggcttgtgacattcgtgaaaaccaaccctgtgggcttatgtctctgccttagggtttgcagagtggaaactcagccgtagggtggcactgggagggggtgggggatctgggcaaggtgggtgattcctcccaggaggtgcttgaggccccgatggactcctgaccataatcctagccccgagacaccatcctgagccagggaacagccccagggttggggggtgccggcatctcccctagctcaccaggcctggcctctgggcagtgtggcctcttggctatttctgtgtccagttttggaggctgagttctggttcatgcagacaaagccctgtccttcagtcttctagaaacagagacaagaaaggcagacacaccgcggccaggcacccatgtgggcgcccaccctgggctccacacagcagtgtcccctgccccagaggtcgcagctaccctcagcctccaatgcattggcctctgtaccgcccggcagccccttctggccggtgctgggttcccactcccggcctaggcacctccccgctctccctgtcacgctcatgtcctgtcctggtcctgatgcccgttgtctaggagacagagccaagcactgctcacgtctctgccgcctgcgtttggaggcccctgggctctcacccagtccccacccgcctgcagagagggaactagggcaccccttgtttctgttgttcccgtgaatttttttcgctatgggaggcagccgaggcctggccaatgcggcccactttcctgagctgtcgctgcctccatggcagcagccagggacccccagaacaagaagacccccccgcaggatccctcctgagctcggggggctctgccttctcaggccccgggcttcccttctccccagccagaggtggagccaagtggtccagcgtcactccagtgctcagctgtggctggaggagctggcctgtggcacagccctgagtgtcccaagccgggagccaacgaagccggacacggcttcactgaccagcggctgctcaagccgcaagctctcagcaagtgcccagtggagcctgccgcccccgcctgggcaccgggaccccctcaccatccagtgggcccggagaaacctgatgaacagtttggggactcaggaccagatgtccgtctctcttgcttgaggaatgaagacctttattcacccctgccccgttgcttcccgctgcacatggacagacttcacagcgtctgctcataggacctgcatccttcctggggacgaattccactcgtccaagggacagcccacggtctggaggccgaggaccaccagcaggcaggtggactgactgtgttgggcaagacctcttccctctgggcctgttctcttggctgcaaataaggacagcagctggtgccccacctgcctggtgcattgctgtgtgaatccaggaggcagtggacatcgtaggcagccacggccccgggtccaggagaagtgctccctggaggcacgcaccactgcttcccactggggccggcggggcccacgcacgacgtcagcctcttaccttcccgcctcggctaggggtcctcgggatgccgttctgttccaacctcctgctctgggacgtggacatgcctcaaggatacagggagccggcggcctctcgacggcacgcacttgcctgttggctgctgcggctgtgggcgagcatgggggctgccagcgtctgttgtggaaagtagctgctagtgaaatggctggggccgctggggtccgtcttcacactgcgcaggtctcttctgggcgtctgagctggggtgggagctcctccgcagaaggttggtggggggtccagtctgtgatccttggtgctgtgtgccccactccagcctggggaccccacttcagaaggtaggggccgtgtcccgcggtgctgactgaggcctgcttccccctccccctcctgctgtgctggaattccacagggaccagggccaccgcaggggactgtctcagaagacttgatttttccgtccctttttctccacactccactgacaaacgtccccagcggtttccacttgtgggcttcaggtgttttcaagcacaacccaccacaacaagcaagtgcattttcagtcgttgtgcttttttgttttgtgctaacgtcttactaatttaaagatgctgtcggcaccatgtttatttatttccagtggtcatgctcagccttgctgctctgcgtggcgcaggtgccatgcctgctccctgtctgtgtcccagccacgcagggccatccactgtgacgtcggccgaccaggctggacaccctctgccgagtaatgacgtgtgtggctgggaccttctttattctgtgttaatggctaacctgttacactgggctgggttgggtagggtgttctggcttttttgtggggtttttatttttaaagaaacactcaatcatcctaaaaaaaaaacaaaaaaagtgcagcgggaaaaggctaagggcgccaacggtccacgtaggctttcaccccagcaggggggttatcactaggctaaaccgggacaaagaccggaaaaagatcctcgaacgggaaagccaaatctcgccaagtcggaacggcacccggcgcactcacccgggaacgaaacctttggcgacagatgccggacataacacgtaatccttattataccaacgtctggattcacaatctggat

SEQ ID NO: 101423 - DNA, 4724 bp, Homo sapiens
gggtcctgacgcaactgcgggccgcgggcggcgcgcacactgctcgctgggccgcggctcccgggtgtcccaggcccggccggtgcgcagagcatggcgggtgcgggcccgaagcggcgcgcgctagcggcgccggcggccgaggagaaggaagaggcgcgggagaagatgctggccgccaagagcgcggacggctcggcgccggcaggcgagggcgagggcgtgaccctgcagcggaacatcacgctgctcaacggcgtggccatcatcgtggggaccattatcggctcgggcatcttcgtgacgcccacgggcgtgctcaaggaggcaggctcgccggggctggcgctggtggtgtgggccgcgtgcggcgtcttctccatcgtgggcgcgctctgctacgcggagctcggcaccaccatctccaaatcgggcggcgactacgcctacatgctggaggtctacggctcgctgcccgccttcctcaagctctggatcgagctgctcatcatccggccttcatcgcagtacatcgtggccctggtcttcgccacctacctgctcaagccgctcttccccacctgcccggtgcccgaggaggcagccaagctcgtggcctgcctctgcgtgctgctgctcacggccgtgaactgctacagcgtgaaggccgccacccgggtccaggatgcctttgccgccgccaagctcctggccctggccctgatcatcctgctgggcttcgtccagatcgggaagggtgatgtgtccaatctagatcccaacttctcatttgaaggcaccaaactggatgtggggaacattgtgctggcattatacagcggcctctttgcctatggaggatggaattacttgaatttcgtcacagaggaaatgatcaacccctacagaaacctgcccctggccatcatcatctccctgcccatcgtgacgctggtgtacgtgctgaccaacctggcctacttcaccaccctgtccaccgagcagatgctgtcgtccgaggccgtggccgtggacttcgggaactatcacctgggcgtcatgtcctggatcatccccgtcttcgtgggcctgtcctgcttcggctccgtcaatgggtccctgttcacatcctccaggctcttcttcgtggggtcccgggaaggccacctgccctccatcctctccatgatccacccacagctcctcacccccgtgccgtccctcgtgttcacgtgtgtgatgacgctgctctacgccttctccaaggacatcttctccgtcatcaacttcttcagcttcttcaactggctctgcgtggccctggccatcatcggcatgatctggctgcgccacagaaagcctgagcttgagcggcccatcaaggtgaacctggccctgcctgtgttcttcatcctggcctgcctcttcctgatcgccgtctccttctggaagacacccgtggagtgtggcatcggcttcaccatcatcctcagcgggctgcccgtctacttcttcggggtctggtggaaaaacaagcccaagtggctcctccagggcatcttctccacgaccgtcctgtgtcagaagctcatgcaggtggtcccccaggagacatagccaggaggccgagtggctgccggaggagcatgcgcagaggccagttaaagtagatcacctcctcgaacccactccggttccccgcaacccacagctcagctgcccatcccagtccctcgccgtccctcccaggtcgggcagtggaggctgctgtgaaaactctggtacgaatctcatccctcaactgagggccagggacccaggtgtgcctgtgctcctgcccaggagcagcttttggtctccttgggccctttttcccttccctcctttgtttacttatatatatattttttttaaacttaaattttgggtcaacttgacaccactaagatgattttttaaggagctgggggaaggcaggagccttcctttctcctgccccaagggcccagaccctgggcaaacagagctactgagacttggaacctcattgctaccacagacttgcactgaagccggacagctgcccagacacatgggcttgtgacattcgtgaaaaccaaccctgtgggcttatgtctctgccttagggtttgcagagtggaaactcagccgtagggtggcactgggagggggtgggggatctgggcaaggtgggtgattcctcccaggaggtgcttgaggccccgatggactcctgaccataatcctagccccgagacaccatcctgagccagggaacagccccagggttggggggtgccggcatctcccctagctcaccaggcctggcctctgggcagtgtggcctcttggctatttctgtgtccagttttggaggctgagttctggttcatgcagacaaagccctgtccttcagtcttctagaaacagagacaagaaaggcagacacaccgcggccaggcacccatgtgggcgcccaccctgggctccacacagcagtgtcccctgccccagaggtcgcagctaccctcagcctccaatgcattggcctctgtaccgcccggcagccccttctggccggtgctgggttcccactcccggcctaggcacctccccgctctccctgtcacgctcatgtcctgtcctggtcctgatgcccgttgtctaggagacagagccaagcactgctcacgtctctgccgcctgcgtttggaggcccctgggctctcacccagtccccacccgcctgcagagagggaactagggcaccccttgtttctgttgttcccgtgaatttttttcgctatgggaggcagccgaggcctggccaatgcggcccactttcctgagctgtcgctgcctccatggcagcagccagggacccccagaacaagaagacccccccgcaggatccctcctgagctcggggggctctgccttctcaggccccgggcttcccttctccccagccagaggtggagccaagtggtccagcgtcactccagtgctcagctgtggctggaggagctggcctgtggcacagccctgagtgtcccaagccgggagccaacgaagccggacacggcttcactgaccagcggctgctcaagccgcaagctctcagcaagtgcccagtggagcctgccgcccccgcctgggcaccgggaccccctcaccatccagtgggcccggagaaacctgatgaacagtttggggactcaggaccagatgtccgtctctcttgcttgaggaatgaagacctttattcacccctgccccgttgcttcccgctgcacatggacagacttcacagcgtctgctcataggacctgcatccttccctctgggcctgttctcttggctgcaaataaggacagcagctggtgccccacctgcctggtgcattgctgtgtgaatccaggaggcagtggacatcgtaggcagccacggccccgggtccaggagaagtgctccctggaggcacgcaccactgcttcccactggggccggcggggcccacgcacgacgtcagcctcttaccttcccgcctcggctaggggtcctcgggatgccgttctgttccaacctcctgctctgggacgtggacatgcctcaaggatacagggagccggcggcctctcgacggcacgcacttgcctgttggctgctgcggctgtgggcgagcatgggggctgccagcgtctgttgtggaaagtagctgctagtgaaatggctggggccgctggggtccgtcttcacactgcgcaggtctcttctgggcgtctgagctggggtgggagctcctccgcagaaggttggtggggggtccagtctgtgatccttggtgctgtgtgccccactccagcctggggaccccacttcagaaggtaggggccgtgtcccgcggtgctgactgaggcctgcttccccctccccctcctgctgtgctggaattccacagggaccagggccaccgcaggggactgtctcagaagacttgatttttccgtccctttttctccacactccactgacaaacgtccccagcggtttccacttgtgggcttcaggtgttttcaagcacaacccaccacaacaagcaagtgcattttcagtcgttgtgcttttttgttttgtgctaacgtcttactaatttaaagatgctgtcggcaccatgtttatttatttccagtggtcatgctcagccttgctgctctgcgtggcgcaggtgccatgcctgctccctgtctgtgtcccagccacgcagggccatccactgtgacgtcggccgaccaggctggacaccctctgccgagtaatgacgtgtgtggctgggaccttctttattctgtgttaatggctaacctgttacactgggctgggttgggtagggtgttctggcttttttgtggggtttttatttttaaagaaacactcaatcatcctaaaaaaaaaacaaaaaaagtgcagcgggaaaaggctaagggcgccaacggtccacgtaggctttcaccccagcaggggggttatcactaggctaaaccgggacaaagaccggaaaaagatcctcgaacgggaaagccaaatctcgccaagtcggaacggcacccggcgcactcacccgggaacgaaacctttggcgacagatgccggacataacacgtaatccttattataccaacgtctggattcacaatctggat

SEQ ID NO: 101424 - DNA, 2580 bp, Homo sapiens
cttctaggtcgagctcgggtgtactcggccgaggagcccatcctgagccagggaacagccccagggttggggggtgccggcatctcccctagctcaccaggcctggcctctgggcagtgtggcctcttggctatttctgtgtccagttttggaggctgagttctggttcatgcagacaaagccctgtccttcagtcttctagaaacagagacaagaaaggcagacacaccgcggccaggcacccatgtgggcgcccaccctgggctccacacagcagtgtcccctgccccagaggtcgcagctaccctcagcctccaatgcattggcctctgtaccgcccggcagccccttctggccggtgctgggttcccactcccggcctaggcacctccccgctctccctgtcacgctcatgtcctgtcctggtcctgatgcccgttgtctaggagacagagccaagcactgctcacgtctctgccgcctgcgtttggaggcccctgggctctcacccagtccccacccgcctgcagagagggaactagggcaccccttgtttctgttgttcccgtgaatttttttcgctatgggaggcagccgaggcctggccaatgcggcccactttcctgagctgtcgctgcctccatggcagcagccagggacccccagaacaagaagacccccccgcaggatccctcctgagctcggggggctctgccttctcaggccccgggcttcccttctccccagccagaggtggagccaagtggtccagcgtcactccagtgctcagctgtggctggaggagctggcctgtggcacagccctgagtgtcccaagccgggagccaacgaagccggacacggcttcactgaccagcggctgctcaagccgcaagctctcagcaagtgcccagtggagcctgccgcccccgcctgggcaccgggaccccctcaccatccagtgggcccggagaaacctgatgaacagtttggggactcaggaccagatgtccgtctctcttgcttgaggaatgaagacctttattcacccctgccccgttgcttcccgctgcacatggacagacttcacagcgtctgctcataggacctgcatccttcctggggacgaattccactcgtccaagggacagcccacggtctggaggccgaggaccaccagcaggcaggtggactgactgtgttgggcaagacctcttccctctgggcctgttctcttggctgcaaataaggacagcagctggtgccccacctgcctggtgcattgctgtgtgaatccaggaggcagtggacatcgtaggcagccacggccccgggtccaggagaagtgctccctggaggcacgcaccactgcttcccactggggccggcggggcccacgcacgacgtcagcctcttaccttcccgcctcggctaggggtcctcgggatgccgttctgttccaacctcctgctctgggacgtggacatgcctcaaggatacagggagccggcggcctctcgacggcacgcacttgcctgttggctgctgcggctgtgggcgagcatgggggctgccagcgtctgttgtggaaagtagctgctagtgaaatggctggggccgctggggtccgtcttcacactgcgcaggtctcttctgggcgtctgagctggggtgggagctcctccgcagaaggttggtggggggtccagtctgtgatccttggtgctgtgtgccccactccagcctggggaccccacttcagaaggtaggggccgtgtcccgcggtgctgactgaggcctgcttccccctccccctcctgctgtgctggaattccacagggaccagggccaccgcaggggactgtctcagaagacttgatttttccgtccctttttctccacactccactgacaaacgtccccagcggtttccacttgtgggcttcaggtgttttcaagcacaacccaccacaacaagcaagtgcattttcagtcgttgtgcttttttgttttgtgctaacgtcttactaatttaaagatgctgtcggcaccatgtttatttatttccagtggtcatgctcagccttgctgctctgcgtggcgcaggtgccatgcctgctccctgtctgtgtcccagccacgcagggccatccactgtgacgtcggccgaccaggctggacaccctctgccgagtaatgacgtgtgtggctgggaccttctttattctgtgttaatggctaacctgttacactgggctgggttgggtagggtgttctggcttttttgtggggtttttatttttaaagaaacactcaatcatcctaaaaaaaaaacaaaaaaagtgcagcgggaaaaggctaagggcgccaacggtccacgtaggctttcaccccagcaggggggttatcactaggctaaaccgggacaaagaccggaaaaagatcctcgaacgggaaagccaaatctcgccaagtcggaacggcacccggcgcactcacccgggaacgaaacctttggcgacagatgccggacataacacgtaatccttattataccaacgtctggattcacaatctggat

SEQ ID NO: 101425 - DNA, 3920 bp, Homo sapiens
gggtcctgacgcaactgcgggccgcgggcggcgcgcacactgctcgctgggccgcggctcccgggtgtcccaggcccggccggtgcgcagagcatggcgggtgcgggcccgaagcggcgcgcgctagcggcgccggcggccgaggagaaggaagaggcgcgggagaagatgctggccgccaagagcgcggacggctcggcgccggcaggcgagggcgagggcgtgaccctgcagcggaacatcacgctgctcaacggcgtggccatcatcgtggggaccattatcggctcgggcatcttcgtgacgcccacgggcgtgctcaaggaggcaggctcgccggggctggcgctggtggtgtgggccgcgtgcggcgtcttctccatcgtgggcgcgctctgctacgcggagctcggcaccaccatctccaaatcgggcggcgactacgcctacatgctggaggtctacggctcgctgcccgccttcctcaagctctggatcgagctgctcatcatccggccttcatcgcagtacatcgtggccctggtcttcgccacctacctgctcaagccgctcttccccacctgcccggtgcccgaggaggcagccaagctcgtggcctgcctctgcgtgctgctgctcacggccgtgaactgctacagcgtgaaggccgccacccgggtccaggatgcctttgccgccgccaagctcctggccctggccctgatcatcctgctgggcttcgtccagatcgggaagggtgatgtgtccaatctagatcccaacttctcatttgaaggcaccaaactggatgtggggaacattgtgctggcattatacagcggcctctttgcctatggaggatggaattacttgaatttcgtcacagaggaaatgatcaacccctacagaaacctgcccctggccatcatcatctccctgcccatcgtgacgctggtgtacgtgctgaccaacctggcctacttcaccaccctgtccaccgagcagatgctgtcgtccgaggccgtggccgtggacttcgggaactatcacctgggcgtcatgtcctggatcatccccgtcttcgtgggcctgtcctgcttcggctccgtcaatgggtccctgttcacatcctccaggctcttcttcgtggggtcccgggaaggccacctgccctccatcctctccatgatccacccacagctcctcacccccgtgccgtccctcgtgttcacgtgtgtgatgacgctgctctacgccttctccaaggacatcttctccgtcatcaacttcttcagcttcttcaactggctctgcgtggccctggccatcatcggcatgatctggctgcgccacagaaagcctgagcttgagcggcccatcaaggtgaacctggccctgcctgtgttcttcatcctggcctgcctcttcctgatcgccgtctccttctggaagacacccgtggagtgtggcatcggcttcaccatcatcctcagcgggctgcccgtctacttcttcggggtctggtggaaaaacaagcccaagtggctcctccagggcatcttctccacgaccgtcctgtgtcagaagctcatgcaggtggtcccccaggagacatagccaggaggccgagtggctgccggaggagcatgcgcagaggccagttaaagtagatcacctcctcgaacccactccggttccccgcaacccacagctcagctgcccatcccagtccctcgccgtccctcccaggtcgggcagtggaggctgctgtgaaaactctggtacgaatctcatccctcaactgagggccagggacccaggtgtgcctgtgctcctgcccaggagcagcttttggtctccttgggccctttttcccttccctcctttgtttacttatatatatattttttttaaacttaaattttgggtcaacttgacaccactaagatgattttttaaggagctgggggaaggcaggagccttcctttctcctgccccaagggcccagaccctgggcaaacagagctactgagacttggaacctcattgctaccacagacttgcactgaagccggacagctgcccagacacatgggcttgtgacattcgtgaaaaccaaccctgtgggcttatgtctctgccttagggtttgcagagtggaaactcagccgtagggtggcactgggagggggtgggggatctgggcaaggtgggtgattcctcccaggaggtgcttgaggccccgatggactcctgaccataatcctagccccgagacaccatcctgagccagggaacagccccagggttggggggtgccggcatctcccctagctcaccaggcctggcctctgggcagtgtggcctcttggctatttctgtgtccagttttggaggctgagttctggttcatgcagacaaagccctgtccttcagtcttctagaaacagagacaagaaaggcagacacaccgcggccaggcacccatgtgggcgcccaccctgggctccacacagcagtgtcccctgccccagaggtcgcagctaccctcagcctccaatgcattggcctctgtaccgcccggcagccccttctggccggtgctgggttcccactcccggcctaggcacctccccgctctccctgtcacgctcatgtcctgtcctggtcctgatgcccgttgtctaggagacagagccaagcactgctcacgtctctgccgcctgcgtttggaggcccctgggctctcacccagtccccacccgcctgcagagagggaactagggcaccccttgtttctgttgttcccgtgaatttttttcgctatgggaggcagccgaggcctggccaatgcggcccactttcctgagctgtcgctgcctccatggcagcagccagggacccccagaacaagaagacccccccgcaggatccctcctgagctcggggggctctgccttctcaggccccgggcttcccttctccccagccagaggtggagccaagtggtccagcgtcactccagtgctcagctgtggctggaggagctggcctgtggcacagccctgagtgtcccaagccgggagccaacgaagccggacacggcttcactgaccagcggctgctcaagccgcaagctctcagcaagtgcccagtggagcctgccgcccccgcctgggcaccgggaccccctcaccatccagtgggcccggagaaacctgatgaacagtttggggactcaggaccagatgtccgtctctcttgcttgaggaatgaagacctttattcacccctgccccgttgcttcccgctgcacatggacagacttcacagcgtctgctcataggacctgcatccttcctggggacgaattccactcgtccaagggacagcccacggtctggaggccgaggaccaccagcaggcaggtggactgactgtgttgggcaagacctcttccctctgggcctgttctcttggctgcaaataaggacagcagctggtgccccacctgcctggtgcattgctgtgtgaatccaggaggcagtggacatcgtaggcagccacggccccgggtccaggagaagtgctccctggaggcacgcaccactgcttcccactggggccggcggggcccacgcacgacgtcagcctcttaccttcccgcctcggctaggggtcctcgggatgccgttctgttccaacctcctgctctgggacgtggacatgcctcaaggatacagggagccggcggcctctcgacggcacgcacttgcctgttggctgctgcggctgtgggcgagcatgggggctgccagcgtctgttgtggaaagtagctgctagtgaaatggctggggccgctggggtccgtcttcacactgcgcaggtgaaatcgaacgggatcctctagacaccaca

SEQ ID NO: 101426 - DNA, 2314 bp, Homo sapiens
  misc_feature (15)..(15): n is a, c, g, or t
  misc_feature (22)..(22): n is a, c, g, or t
  misc_feature (25)..(25): n is a, c, g, or t
catttggctagtagngccgggngtnaatcggacgactaccctcagcctccaatgcattggcctctgtaccgcccggcagccccttctggccggtgctgggttcccactcccggcctaggcacctccccgctctccctgtcacgctcatgtcctgtcctggtcctgatgcccgttgtctaggagacagagccaagcactgctcacgtctctgccgcctgcgtttggaggcccctgggctctcacccagtccccacccgcctgcagagagggaactagggcaccccttgtttctgttgttcccgtgaatttttttcgctatgggaggcagccgaggcctggccaatgcggcccactttcctgagctgtcgctgcctccatggcagcagccagggacccccagaacaagaagacccccccgcaggatccctcctgagctcggggggctctgccttctcaggccccgggcttcccttctccccagccagaggtggagccaagtggtccagcgtcactccagtgctcagctgtggctggaggagctggcctgtggcacagccctgagtgtcccaagccgggagccaacgaagccggacacggcttcactgaccagcggctgctcaagccgcaagctctcagcaagtgcccagtggagcctgccgcccccgcctgggcaccgggaccccctcaccatccagtgggcccggagaaacctgatgaacagtttggggactcaggaccagatgtccgtctctcttgcttgaggaatgaagacctttattcacccctgccccgttgcttcccgctgcacatggacagacttcacagcgtctgctcataggacctgcatccttcctggggacgaattccactcgtccaagggacagcccacggtctggaggccgaggaccaccagcaggcaggtggactgactgtgttgggcaagacctcttccctctgggcctgttctcttggctgcaaataaggacagcagctggtgccccacctgcctggtgcattgctgtgtgaatccaggaggcagtggacatcgtaggcagccacggccccgggtccaggagaagtgctccctggaggcacgcaccactgcttcccactggggccggcggggcccacgcacgacgtcagcctcttaccttcccgcctcggctaggggtcctcgggatgccgttctgttccaacctcctgctctgggacgtggacatgcctcaaggatacagggagccggcggcctctcgacggcacgcacttgcctgttggctgctgcggctgtgggcgagcatgggggctgccagcgtctgttgtggaaagtagctgctagtgaaatggctggggccgctggggtccgtcttcacactgcgcaggtctcttctgggcgtctgagctggggtgggagctcctccgcagaaggttggtggggggtccagtctgtgatccttggtgctgtgtgccccactccagcctggggaccccacttcagaaggtaggggccgtgtcccgcggtgctgactgaggcctgcttccccctccccctcctgctgtgctggaattccacagggaccagggccaccgcaggggactgtctcagaagacttgatttttccgtccctttttctccacactccactgacaaacgtccccagcggtttccacttgtgggcttcaggtgttttcaagcacaacccaccacaacaagcaagtgcattttcagtcgttgtgcttttttgttttgtgctaacgtcttactaatttaaagatgctgtcggcaccatgtttatttatttccagtggtcatgctcagccttgctgctctgcgtggcgcaggtgccatgcctgctccctgtctgtgtcccagccacgcagggccatccactgtgacgtcggccgaccaggctggacaccctctgccgagtaatgacgtgtgtggctgggaccttctttattctgtgttaatggctaacctgttacactgggctgggttgggtagggtgttctggcttttttgtggggtttttatttttaaagaaacactcaatcatcctaaaaaaaaaacaaaaaaagtgcagcgggaaaaggctaagggcgccaacggtccacgtaggctttcaccccagcaggggggttatcactaggctaaaccgggacaaagaccggaaaaagatcctcgaacgggaaagccaaatctcgccaagtcggaacggcacccggcgcactcacccgggaacgaaacctttggcgacagatgccggacataacacgtaatccttattataccaacgtctggattcacaatctggat

SEQ ID NO: 101427 - DNA, 2117 bp, Homo sapiens
  misc_feature (20)..(20): n is a, c, g, or t
cgaggatggagtaaaaaccntaggctaggtacgaggctgggtgttgccagtccccacccgcctgcagagagggaactagggcaccccttgtttctgttgttcccgtgaatttttttcgctatgggaggcagccgaggcctggccaatgcggcccactttcctgagctgtcgctgcctccatggcagcagccagggacccccagaacaagaagacccccccgcaggatccctcctgagctcggggggctctgccttctcaggccccgggcttcccttctccccagccagaggtggagccaagtggtccagcgtcactccagtgctcagctgtggctggaggagctggcctgtggcacagccctgagtgtcccaagccgggagccaacgaagccggacacggcttcactgaccagcggctgctcaagccgcaagctctcagcaagtgcccagtggagcctgccgcccccgcctgggcaccgggaccccctcaccatccagtgggcccggagaaacctgatgaacagtttggggactcaggaccagatgtccgtctctcttgcttgaggaatgaagacctttattcacccctgccccgttgcttcccgctgcacatggacagacttcacagcgtctgctcataggacctgcatccttcctggggacgaattccactcgtccaagggacagcccacggtctggaggccgaggaccaccagcaggcaggtggactgactgtgttgggcaagacctcttccctctgggcctgttctcttggctgcaaataaggacagcagctggtgccccacctgcctggtgcattgctgtgtgaatccaggaggcagtggacatcgtaggcagccacggccccgggtccaggagaagtgctccctggaggcacgcaccactgcttcccactggggccggcggggcccacgcacgacgtcagcctcttaccttcccgcctcggctaggggtcctcgggatgccgttctgttccaacctcctgctctgggacgtggacatgcctcaaggatacagggagccggcggcctctcgacggcacgcacttgcctgttggctgctgcggctgtgggcgagcatgggggctgccagcgtctgttgtggaaagtagctgctagtgaaatggctggggccgctggggtccgtcttcacactgcgcaggtctcttctgggcgtctgagctggggtgggagctcctccgcagaaggttggtggggggtccagtctgtgatccttggtgctgtgtgccccactccagcctggggaccccacttcagaaggtaggggccgtgtcccgcggtgctgactgaggcctgcttccccctccccctcctgctgtgctggaattccacagggaccagggccaccgcaggggactgtctcagaagacttgatttttccgtccctttttctccacactccactgacaaacgtccccagcggtttccacttgtgggcttcaggtgttttcaagcacaacccaccacaacaagcaagtgcattttcagtcgttgtgcttttttgttttgtgctaacgtcttactaatttaaagatgctgtcggcaccatgtttatttatttccagtggtcatgctcagccttgctgctctgcgtggcgcaggtgccatgcctgctccctgtctgtgtcccagccacgcagggccatccactgtgacgtcggccgaccaggctggacaccctctgccgagtaatgacgtgtgtggctgggaccttctttattctgtgttaatggctaacctgttacactgggctgggttgggtagggtgttctggcttttttgtggggtttttatttttaaagaaacactcaatcatcctaaaaaaaaaacaaaaaaagtgcagcgggaaaaggctaagggcgccaacggtccacgtaggctttcaccccagcaggggggttatcactaggctaaaccgggacaaagaccggaaaaagatcctcgaacgggaaagccaaatctcgccaagtcggaacggcacccggcgcactcacccgggaacgaaacctttggcgacagatgccggacataacacgtaatccttattataccaacgtctggattcacaatctggat

SEQ ID NO: 101428 - DNA, 1760 bp, Homo sapiens
ccacgcgtcgcggacgcgtgggtcgacccacgcgtcgacacggcttcactgaccagcggctgctcaagccgcaagctctcagcaagtgcccagtggagcctgccgcccccgcctgggcaccgggaccccctcaccatccagtgggcccggagaaacctgatgaacagtttggggactcaggaccagatgtccgtctctcttgcttgaggaatgaagacctttattcacccctgccccgttgcttcccgctgcacatggacagacttcacagcgtctgctcataggacctgcatccttcctggggacgaattccactcgtccaagggacagcccacggtctggaggccgaggaccaccagcaggcaggtggactgactgtgttgggcaagacctcttccctctgggcctgttctcttggctgcaaataaggacagcagctggtgccccacctgcctggtgcattgctgtgtgaatccaggaggcagtggacatcgtaggcagccacggccccgggtccaggagaagtgctccctggaggcacgcaccactgcttcccactggggccggcggggcccacgcacgacgtcagcctcttaccttcccgcctcggctaggggtcctcgggatgccgttctgttccaacctcctgctctgggacgtggacatgcctcaaggatacagggagccggcggcctctcgacggcacgcacttgcctgttggctgctgcggctgtgggcgagcatgggggctgccagcgtctgttgtggaaagtagctgctagtgaaatggctggggccgctggggtccgtcttcacactgcgcaggtctcttctgggcgtctgagctggggtgggagctcctccgcagaaggttggtggggggtccagtctgtgatccttggtgctgtgtgccccactccagcctggggaccccacttcagaaggtaggggccgtgtcccgcggtgctgactgaggcctgcttccccctccccctcctgctgtgctggaattccacagggaccagggccaccgcaggggactgtctcagaagacttgatttttccgtccctttttctccacactccactgacaaacgtccccagcggtttccacttgtgggcttcaggtgttttcaagcacaacccaccacaacaagcaagtgcattttcagtcgttgtgcttttttgttttgtgctaacgtcttactaatttaaagatgctgtcggcaccatgtttatttatttccagtggtcatgctcagccttgctgctctgcgtggcgcaggtgccatgcctgctccctgtctgtgtcccagccacgcagggccatccactgtgacgtcggccgaccaggctggacaccctctgccgagtaatgacgtgtgtggctgggaccttctttattctgtgttaatggctaacctgttacactgggctgggttgggtagggtgttctggcttttttgtggggtttttatttttaaagaaacactcaatcatcctaaaaaaaaaacaaaaaaagtgcagcgggaaaaggctaagggcgccaacggtccacgtaggctttcaccccagcaggggggttatcactaggctaaaccgggacaaagaccggaaaaagatcctcgaacgggaaagccaaatctcgccaagtcggaacggcacccggcgcactcacccgggaacgaaacctttggcgacagatgccggacataacacgtaatccttattataccaacgtctggattcacaatctggat

SEQ ID NO: 101429 - DNA, 1610 bp, Homo sapiens
ctctctctctctctctctctctctctctctctctctatgtccgtctctcttgcttgaggaatgaagacctttattcacccctgccccgttgcttcccgctgcacatggacagacttcacagcgtctgctcataggacctgcatccttcctggggacgaattccactcgtccaagggacagcccacggtctggaggccgaggaccaccagcaggcaggtggactgactgtgttgggcaagacctcttccctctgggcctgttctcttggctgcaaataaggacagcagctggtgccccacctgcctggtgcattgctgtgtgaatccaggaggcagtggacatcgtaggcagccacggccccgggtccaggagaagtgctccctggaggcacgcaccactgcttcccactggggccggcggggcccacgcacgacgtcagcctcttaccttcccgcctcggctaggggtcctcgggatgccgttctgttccaacctcctgctctgggacgtggacatgcctcaaggatacagggagccggcggcctctcgacggcacgcacttgcctgttggctgctgcggctgtgggcgagcatgggggctgccagcgtctgttgtggaaagtagctgctagtgaaatggctggggccgctggggtccgtcttcacactgcgcaggtctcttctgggcgtctgagctggggtgggagctcctccgcagaaggttggtggggggtccagtctgtgatccttggtgctgtgtgccccactccagcctggggaccccacttcagaaggtaggggccgtgtcccgcggtgctgactgaggcctgcttccccctccccctcctgctgtgctggaattccacagggaccagggccaccgcaggggactgtctcagaagacttgatttttccgtccctttttctccacactccactgacaaacgtccccagcggtttccacttgtgggcttcaggtgttttcaagcacaacccaccacaacaagcaagtgcattttcagtcgttgtgcttttttgttttgtgctaacgtcttactaatttaaagatgctgtcggcaccatgtttatttatttccagtggtcatgctcagccttgctgctctgcgtggcgcaggtgccatgcctgctccctgtctgtgtcccagccacgcagggccatccactgtgacgtcggccgaccaggctggacaccctctgccgagtaatgacgtgtgtggctgggaccttctttattctgtgttaatggctaacctgttacactgggctgggttgggtagggtgttctggcttttttgtggggtttttatttttaaagaaacactcaatcatcctaaaaaaaaaacaaaaaaagtgcagcgggaaaaggctaagggcgccaacggtccacgtaggctttcaccccagcaggggggttatcactaggctaaaccgggacaaagaccggaaaaagatcctcgaacgggaaagccaaatctcgccaagtcggaacggcacccggcgcactcacccgggaacgaaacctttggcgacagatgccggacataacacgtaatccttattataccaacgtctggattcacaatctggat

SEQ ID NO: 101430 - DNA, 1444 bp, Homo sapiens
cccttacggctagtagaggccggtgttaatcggagaggcacagcaggcaggtggactgactgtgttgggcaagacctcttccctctgggcctgttctcttggctgcaaataaggacagcagctggtgccccacctgcctggtgcattgctgtgtgaatccaggaggcagtggacatcgtaggcagccacggccccgggtccaggagaagtgctccctggaggcacgcaccactgcttcccactggggccggcggggcccacgcacgacgtcagcctcttaccttcccgcctcggctaggggtcctcgggatgccgttctgttccaacctcctgctctgggacgtggacatgcctcaaggatacagggagccggcggcctctcgacggcacgcacttgcctgttggctgctgcggctgtgggcgagcatgggggctgccagcgtctgttgtggaaagtagctgctagtgaaatggctggggccgctggggtccgtcttcacactgcgcaggtctcttctgggcgtctgagctggggtgggagctcctccgcagaaggttggtggggggtccagtctgtgatccttggtgctgtgtgccccactccagcctggggaccccacttcagaaggtaggggccgtgtcccgcggtgctgactgaggcctgcttccccctccccctcctgctgtgctggaattccacagggaccagggccaccgcaggggactgtctcagaagacttgatttttccgtccctttttctccacactccactgacaaacgtccccagcggtttccacttgtgggcttcaggtgttttcaagcacaacccaccacaacaagcaagtgcattttcagtcgttgtgcttttttgttttgtgctaacgtcttactaatttaaagatgctgtcggcaccatgtttatttatttccagtggtcatgctcagccttgctgctctgcgtggcgcaggtgccatgcctgctccctgtctgtgtcccagccacgcagggccatccactgtgacgtcggccgaccaggctggacaccctctgccgagtaatgacgtgtgtggctgggaccttctttattctgtgttaatggctaacctgttacactgggctgggttgggtagggtgttctggcttttttgtggggtttttatttttaaagaaacactcaatcatcctaaaaaaaaaacaaaaaaagtgcagcgggaaaaggctaagggcgccaacggtccacgtaggctttcaccccagcaggggggttatcactaggctaaaccgggacaaagaccggaaaaagatcctcgaacgggaaagccaaatctcgccaagtcggaacggcacccggcgcactcacccgggaacgaaacctttggcgacagatgccggacataacacgtaatccttattataccaacgtctggattcacaatctggat

SEQ ID NO: 101431 - DNA, 1125 bp, Homo sapiens
caaatccagctcggttccccttttggggtctttgctaaggatacagggagccggcggcctctcgacggcacgcacttgcctgttggctgctgcggctgtgggcgagcatgggggctgccagcgtctgttgtggaaagtagctgctagtgaaatggctggggccgctggggtccgtcttcacactgcgcaggtctcttctgggcgtctgagctggggtgggagctcctccgcagaaggttggtggggggtccagtctgtgatccttggtgctgtgtgccccactccagcctggggaccccacttcagaaggtaggggccgtgtcccgcggtgctgactgaggcctgcttccccctccccctcctgctgtgctggaattccacagggaccagggccaccgcaggggactgtctcagaagacttgatttttccgtccctttttctccacactccactgacaaacgtccccagcggtttccacttgtgggcttcaggtgttttcaagcacaacccaccacaacaagcaagtgcattttcagtcgttgtgcttttttgttttgtgctaacgtcttactaatttaaagatgctgtcggcaccatgtttatttatttccagtggtcatgctcagccttgctgctctgcgtggcgcaggtgccatgcctgctccctgtctgtgtcccagccacgcagggccatccactgtgacgtcggccgaccaggctggacaccctctgccgagtaatgacgtgtgtggctgggaccttctttattctgtgttaatggctaacctgttacactgggctgggttgggtagggtgttctggcttttttgtggggtttttatttttaaagaaacactcaatcatcctaaaaaaaaaacaaaaaaagtgcagcgggaaaaggctaagggcgccaacggtccacgtaggctttcaccccagcaggggggttatcactaggctaaaccgggacaaagaccggaaaaagatcctcgaacgggaaagccaaatctcgccaagtcggaacggcacccggcgcactcacccgggaacgaaacctttggcgacagatgccggacataacacgtaatccttattataccaacgtctggattcacaatctggat

SEQ ID NO: 101432 - DNA, 1025 bp, Homo sapiens
gggtcctgacgcaactgcgggccgcgggcggcgcgcacactgctcgctgggccgcggctcccgggtgtcccaggcccggccggtgcgcagagcatggcgggtgcgggcccgaagcggcgcgcgctagcggcgccggcggccgaggagaaggaagaggcgcgggagaagatgctggccgccaagagcgcggacggctcggcgccggcaggcgagggcgagggcgtgaccctgcagcggaacatcacgctgctcaacggcgtggccatcatcgtggggaccattatcggctcgggcatcttcgtgacgcccacgggcgtgctcaaggaggcaggctcgccggggctggcgctggtggtgtgggccgcgtgcggcgtcttctccatcgtgggcgcgctctgctacgcggagctcggcaccaccatctccaaatcgggcggcgactacgcctacatgctggaggtctacggctcgctgcccgccttcctcaagctctggatcgagctgctcatcatccggccttcatcgcagtacatcgtggccctggtcttcgccacctacctgctcaagccgctcttccccacctgcccggtgcccgaggaggcagccaagctcgtggcctgcctctgcgtgctgctgctcacggccgtgaactgctacagcgtgaaggccgccacccgggtccaggatgcctttgccgccgccaagctcctggccctggccctgatcatcctgctgggcttcgtccagatcgggaagggtgatgtgtccaatctagatcccaacttctcatttgaaggcaccaaactggatgtggggaacattgtgctggcattatacagcggcctctttgcctatggaggatggaattacttgaatttcgtcacagaggaaatgatcaacccctacagaaacctgcccctggccattcaacgcctccgaggcgttgaatggccggaggcgttgctttgaactttatttgagaaaaacagaagataaatgtatcaaaagaacacacaggtggcggg

SEQ ID NO: 101433 - DNA, 700 bp, Homo sapiens
cagagaacgggtggcaagtgagggccccattcagggcgggacggtacagaggagctgcctgggctctcggctctggtccccggctgtgcagctcgtgggcagagccttagaattcagaccaggtggcctgacttaactctcctgagcccttgaggtcaccccgaagaatccccatttctcaggtggggaagctgaggccgcggccaaggcaccagccagggctgtgcagtgtcccgctccaggcacagcctcctgccgccagcctgtgtcctcttgctgcttcccaccttccccgagaagcccagcacagaggctggagctactgcttgcgaggagcccacctggctcctgggcacagggtttggccttcagcccgggccgcgttgggtgacatgtcgtccctgttctttccagaaacctgcccctggccatcatcatctccctgcccatcgtgacgctggtgtacgtgctgaccaacctggcctacttcaccaccctgtccaccgagcagatgctgtcgtccgaggccgtggccgtggtgagccgctacccgccagcttccaccaggggcctgagaggctgtggccagcccgtcccttccagaccggagtggtgccccacatctctaagcctcccctacgcagagggggccccgcgtctctaagcctcccctacccggaggggtggagtggtggtctcc

SEQ ID NO: 101434 - DNA, 1246 bp, Homo sapiens
  misc_feature (7)..(8): n is a, c, g, or t
ggcacanncctcgctcggctgcggctctcgggtgtcccaggcccggccggtaagcagagcatggcgggtgcgggcccgaagcggcgggcgctagcggccccggtggccgaggagaaggaagaggcgcgggagaagatgctggcctccaagcgcgcggacggcgcggcgccggcaggcgagggcgagggcgtgaccctgcagcggaacatcacgctactcaacggcgtggccatcatcgtgggcgccatcatcggctcgggcatcttcgtgacgcccacgggcgtgcttaaggaggcaggctcgccggggctggcgctggtgatgtgggccgcgtgcggcgtcttctccatcgtgggcgcgctctgctacgcggagctgggcaccaccatctccaaatcgggcggcgactacgcctacatgctggacgtctacggctcgctgcccgccttcctcaagctctggatcgagctgctcgtcatccggccttcatcgcagtacatcgtggccctggtcttcgccacctacctgctcaagccgctcttccccagctgcccggtgcccgaggaggcagccaagctcatggcctgccactgcgtgcgtgagtacggggcgcgggccgggggttgggaggtcgtggtccctgggtccctgcatccttgcatcactacgcccctggctcccacatctctacatttttgcgttcctggaccgtcccggcagttctaggctaaggtcattggtcccagaaaccacgtgcgtttctttcattcattcgtttacacttctccccacgggctgggaatatcttcagtgacgggacagcagggtccctgccctgcccttcggtgggcatttcattcccccacttaagcggttcaggcaagtgccagcctcccgttggccccgctgagcaatactcccagcctcttgcgtggcacccacgtggagtaactgagcaaccggtttattgttaaagctccgattgctgactggttgttgaaaaggaaattgcagttgaaaagaaaattattcatttctgctctccacaccagctcgtcaggaatcagtgacacgggctgactcataagaaaacagtagtaataaaatcgtgtgcgggtagtgactggtgctggtttaggctaagggatcccccctgagggttgcccagtagtgagagagcggagcttggctgcagattcagtctgtgttgcagtgattcgcgaatgggtacacagctcgactctgg

SEQ ID NO: 101435 - DNA, 4240 bp, Homo sapiens
gtcctttcacgcgtgtcttcgtgttggtgcgcttttcactggtcataatgctgctcacggccgtgaactgctacagcgtgaaggccgccacccgggtccaggatgcctttgccgccgccaagctcctggccctggccctgatcatcctgctgggcttcgtccagatcgggaagggtgatgtgtccaatctagatcccaacttctcatttgaaggcaccaaactggatgtggggaacattgtgctggcattatacagcggcctctttgcctatggaggatggaattacttgaatttcgtcacagaggaaatgatcaacccctacagaaacctgcccctggccatcatcatctccctgcccatcgtgacgctggtgtacgtgctgaccaacctggcctacttcaccaccctgtccaccgagcagatgctgtcgtccgaggccgtggccgtggacttcgggaactatcacctgggcgtcatgtcctggatcatccccgtcttcgtgggcctgtcctgcttcggctccgtcaatgggtccctgttcacatcctccaggctcttcttcgtggggtcccgggaaggccacctgccctccatcctctccatgatccacccacagctcctcacccccgtgccgtccctcgtgttcacgtgtgtgatgacgctgctctacgccttctccaaggacatcttctccgtcatcaacttcttcagcttcttcaactggctctgcgtggccctggccatcatcggcatgatctggctgcgccacagaaagcctgagcttgagcggcccatcaaggtgaacctggccctgcctgtgttcttcatcctggcctgcctcttcctgatcgccgtctccttctggaagacacccgtggagtgtggcatcggcttcaccatcatcctcagcgggctgcccgtctacttcttcggggtctggtggaaaaacaagcccaagtggctcctccagggcatcttctccacgaccgtcctgtgtcagaagctcatgcaggtggtcccccaggagacatagccaggaggccgagtggctgccggaggagcatgcgcagaggccagttaaagtagatcacctcctcgaacccactccggttccccgcaacccacagctcagctgcccatcccagtccctcgccgtccctcccaggtcgggcagtggaggctgctgtgaaaactctggtacgaatctcatccctcaactgagggccagggacccaggtgtgcctgtgctcctgcccaggagcagcttttggtctccttgggccctttttcccttccctcctttgtttacttatatatatattttttttaaacttaaattttgggtcaacttgacaccactaagatgattttttaaggagctgggggaaggcaggagccttcctttctcctgccccaagggcccagaccctgggcaaacagagctactgagacttggaacctcattgctaccacagacttgcactgaagccggacagctgcccagacacatgggcttgtgacattcgtgaaaaccaaccctgtgggcttatgtctctgccttagggtttgcagagtggaaactcagccgtagggtggcactgggagggggtgggggatctgggcaaggtgggtgattcctcccaggaggtgcttgaggccccgatggactcctgaccataatcctagccccgagacaccatcctgagccagggaacagccccagggttggggggtgccggcatctcccctagctcaccaggcctggcctctgggcagtgtggcctcttggctatttctgtgtccagttttggaggctgagttctggttcatgcagacaaagccctgtccttcagtcttctagaaacagagacaagaaaggcagacacaccgcggccaggcacccatgtgggcgcccaccctgggctccacacagcagtgtcccctgccccagaggtcgcagctaccctcagcctccaatgcattggcctctgtaccgcccggcagccccttctggccggtgctgggttcccactcccggcctaggcacctccccgctctccctgtcacgctcatgtcctgtcctggtcctgatgcccgttgtctaggagacagagccaagcactgctcacgtctctgccgcctgcgtttggaggcccctgggctctcacccagtccccacccgcctgcagagagggaactagggcaccccttgtttctgttgttcccgtgaatttttttcgctatgggaggcagccgaggcctggccaatgcggcccactttcctgagctgtcgctgcctccatggcagcagccagggacccccagaacaagaagacccccccgcaggatccctcctgagctcggggggctctgccttctcaggccccgggcttcccttctccccagccagaggtggagccaagtggtccagcgtcactccagtgctcagctgtggctggaggagctggcctgtggcacagccctgagtgtcccaagccgggagccaacgaagccggacacggcttcactgaccagcggctgctcaagccgcaagctctcagcaagtgcccagtggagcctgccgcccccgcctgggcaccgggaccccctcaccatccagtgggcccggagaaacctgatgaacagtttggggactcaggaccagatgtccgtctctcttgcttgaggaatgaagacctttattcacccctgccccgttgcttcccgctgcacatggacagacttcacagcgtctgctcataggacctgcatccttcctggggacgaattccactcgtccaagggacagcccacggtctggaggccgaggaccaccagcaggcaggtggactgactgtgttgggcaagacctcttccctctgggcctgttctcttggctgcaaataaggacagcagctggtgccccacctgcctggtgcattgctgtgtgaatccaggaggcagtggacatcgtaggcagccacggccccgggtccaggagaagtgctccctggaggcacgcaccactgcttcccactggggccggcggggcccacgcacgacgtcagcctcttaccttcccgcctcggctaggggtcctcgggatgccgttctgttccaacctcctgctctgggacgtggacatgcctcaaggatacagggagccggcggcctctcgacggcacgcacttgcctgttggctgctgcggctgtgggcgagcatgggggctgccagcgtctgttgtggaaagtagctgctagtgaaatggctggggccgctggggtccgtcttcacactgcgcaggtctcttctgggcgtctgagctggggtgggagctcctccgcagaaggttggtggggggtccagtctgtgatccttggtgctgtgtgccccactccagcctggggaccccacttcagaaggtaggggccgtgtcccgcggtgctgactgaggcctgcttccccctccccctcctgctgtgctggaattccacagggaccagggccaccgcaggggactgtctcagaagacttgatttttccgtccctttttctccacactccactgacaaacgtccccagcggtttccacttgtgggcttcaggtgttttcaagcacaacccaccacaacaagcaagtgcattttcagtcgttgtgcttttttgttttgtgctaacgtcttactaatttaaagatgctgtcggcaccatgtttatttatttccagtggtcatgctcagccttgctgctctgcgtggcgcaggtgccatgcctgctccctgtctgtgtcccagccacgcagggccatccactgtgacgtcggccgaccaggctggacaccctctgccgagtaatgacgtgtgtggctgggaccttctttattctgtgttaatggctaacctgttacactgggctgggttgggtagggtgttctggcttttttgtggggtttttatttttaaagaaacactcaatcatcctaaaaaaaaaacaaaaaaagtgcagcgggaaaaggctaagggcgccaacggtccacgtaggctttcaccccagcaggggggttatcactaggctaaaccgggacaaagaccggaaaaagatcctcgaacgggaaagccaaatctcgccaagtcggaacggcacccggcgcactcacccgggaacgaaacctttggcgacagatgccggacataacacgtaatccttattataccaacgtctggattcacaatctggat

SEQ ID NO: 101436 - DNA, 4306 bp, Homo sapiens
taagctaggtagagctggtggtatcggccgaggtcgcactactgctcaagccgctcttccccacctgcccggtgcccgaggaggcagccaagctcgtggcctgcctctgcgtgctgctgctcacggccgtgaactgctacagcgtgaaggccgccacccgggtccaggatgcctttgccgccgccaagctcctggccctggccctgatcatcctgctgggcttcgtccagatcgggaagggtgatgtgtccaatctagatcccaacttctcatttgaaggcaccaaactggatgtggggaacattgtgctggcattatacagcggcctctttgcctatggaggatggaattacttgaatttcgtcacagaggaaatgatcaacccctacagaaacctgcccctggccatcatcatctccctgcccatcgtgacgctggtgtacgtgctgaccaacctggcctacttcaccaccctgtccaccgagcagatgctgtcgtccgaggccgtggccgtggacttcgggaactatcacctgggcgtcatgtcctggatcatccccgtcttcgtgggcctgtcctgcttcggctccgtcaatgggtccctgttcacatcctccaggctcttcttcgtggggtcccgggaaggccacctgccctccatcctctccatgatccacccacagctcctcacccccgtgccgtccctcgtgttcacgtgtgtgatgacgctgctctacgccttctccaaggacatcttctccgtcatcaacttcttcagcttcttcaactggctctgcgtggccctggccatcatcggcatgatctggctgcgccacagaaagcctgagcttgagcggcccatcaaggtgaacctggccctgcctgtgttcttcatcctggcctgcctcttcctgatcgccgtctccttctggaagacacccgtggagtgtggcatcggcttcaccatcatcctcagcgggctgcccgtctacttcttcggggtctggtggaaaaacaagcccaagtggctcctccagggcatcttctccacgaccgtcctgtgtcagaagctcatgcaggtggtcccccaggagacatagccaggaggccgagtggctgccggaggagcatgcgcagaggccagttaaagtagatcacctcctcgaacccactccggttccccgcaacccacagctcagctgcccatcccagtccctcgccgtccctcccaggtcgggcagtggaggctgctgtgaaaactctggtacgaatctcatccctcaactgagggccagggacccaggtgtgcctgtgctcctgcccaggagcagcttttggtctccttgggccctttttcccttccctcctttgtttacttatatatatattttttttaaacttaaattttgggtcaacttgacaccactaagatgattttttaaggagctgggggaaggcaggagccttcctttctcctgccccaagggcccagaccctgggcaaacagagctactgagacttggaacctcattgctaccacagacttgcactgaagccggacagctgcccagacacatgggcttgtgacattcgtgaaaaccaaccctgtgggcttatgtctctgccttagggtttgcagagtggaaactcagccgtagggtggcactgggagggggtgggggatctgggcaaggtgggtgattcctcccaggaggtgcttgaggccccgatggactcctgaccataatcctagccccgagacaccatcctgagccagggaacagccccagggttggggggtgccggcatctcccctagctcaccaggcctggcctctgggcagtgtggcctcttggctatttctgtgtccagttttggaggctgagttctggttcatgcagacaaagccctgtccttcagtcttctagaaacagagacaagaaaggcagacacaccgcggccaggcacccatgtgggcgcccaccctgggctccacacagcagtgtcccctgccccagaggtcgcagctaccctcagcctccaatgcattggcctctgtaccgcccggcagccccttctggccggtgctgggttcccactcccggcctaggcacctccccgctctccctgtcacgctcatgtcctgtcctggtcctgatgcccgttgtctaggagacagagccaagcactgctcacgtctctgccgcctgcgtttggaggcccctgggctctcacccagtccccacccgcctgcagagagggaactagggcaccccttgtttctgttgttcccgtgaatttttttcgctatgggaggcagccgaggcctggccaatgcggcccactttcctgagctgtcgctgcctccatggcagcagccagggacccccagaacaagaagacccccccgcaggatccctcctgagctcggggggctctgccttctcaggccccgggcttcccttctccccagccagaggtggagccaagtggtccagcgtcactccagtgctcagctgtggctggaggagctggcctgtggcacagccctgagtgtcccaagccgggagccaacgaagccggacacggcttcactgaccagcggctgctcaagccgcaagctctcagcaagtgcccagtggagcctgccgcccccgcctgggcaccgggaccccctcaccatccagtgggcccggagaaacctgatgaacagtttggggactcaggaccagatgtccgtctctcttgcttgaggaatgaagacctttattcacccctgccccgttgcttcccgctgcacatggacagacttcacagcgtctgctcataggacctgcatccttcctggggacgaattccactcgtccaagggacagcccacggtctggaggccgaggaccaccagcaggcaggtggactgactgtgttgggcaagacctcttccctctgggcctgttctcttggctgcaaataaggacagcagctggtgccccacctgcctggtgcattgctgtgtgaatccaggaggcagtggacatcgtaggcagccacggccccgggtccaggagaagtgctccctggaggcacgcaccactgcttcccactggggccggcggggcccacgcacgacgtcagcctcttaccttcccgcctcggctaggggtcctcgggatgccgttctgttccaacctcctgctctgggacgtggacatgcctcaaggatacagggagccggcggcctctcgacggcacgcacttgcctgttggctgctgcggctgtgggcgagcatgggggctgccagcgtctgttgtggaaagtagctgctagtgaaatggctggggccgctggggtccgtcttcacactgcgcaggtctcttctgggcgtctgagctggggtgggagctcctccgcagaaggttggtggggggtccagtctgtgatccttggtgctgtgtgccccactccagcctggggaccccacttcagaaggtaggggccgtgtcccgcggtgctgactgaggcctgcttccccctccccctcctgctgtgctggaattccacagggaccagggccaccgcaggggactgtctcagaagacttgatttttccgtccctttttctccacactccactgacaaacgtccccagcggtttccacttgtgggcttcaggtgttttcaagcacaacccaccacaacaagcaagtgcattttcagtcgttgtgcttttttgttttgtgctaacgtcttactaatttaaagatgctgtcggcaccatgtttatttatttccagtggtcatgctcagccttgctgctctgcgtggcgcaggtgccatgcctgctccctgtctgtgtcccagccacgcagggccatccactgtgacgtcggccgaccaggctggacaccctctgccgagtaatgacgtgtgtggctgggaccttctttattctgtgttaatggctaacctgttacactgggctgggttgggtagggtgttctggcttttttgtggggtttttatttttaaagaaacactcaatcatcctaaaaaaaaaacaaaaaaagtgcagcgggaaaaggctaagggcgccaacggtccacgtaggctttcaccccagcaggggggttatcactaggctaaaccgggacaaagaccggaaaaagatcctcgaacgggaaagccaaatctcgccaagtcggaacggcacccggcgcactcacccgggaacgaaacctttggcgacagatgccggacataacacgtaatccttattataccaacgtctggattcacaatctggat

SEQ ID NO: 101437 - DNA, 4718 bp, Homo sapiens
gggtcctgacgcaactgcgggccgcgggcggcgcgcacactgctcgctgggccgcggctcccgggtgtcccaggcccggccggtgcgcagagcatggcgggtgcgggcccgaagcggcgcgcgctagcggcgccggcggccgaggagaaggaagaggcgcgggagaagatgctggccgccaagagcgcggacggctcggcgccggcaggcgagggcgagggcgtgaccctgcagcggaacatcacgctgctcaacggcgtggccatcatcgtggggaccattatcggctcgggcatcttcgtgacgcccacgggcgtgctcaaggaggcaggctcgccggggctggcgctggtggtgtgggccgcgtgcggcgtcttctccatcgtgggcgcgctctgctacgcggagctcggcaccaccatctccaaatcgggcggcgactacgcctacatgctggaggtctacggctcgctgcccgccttcctcaagctctggatcgagctgctcatcatccggccttcatcgcagtacatcgtggccctggtcttcgccacctacctgctcaagccgctcttccccacctgcccggtgcccgaggaggcagccaagctcgtggcctgcctctgcgtgctgctgctcacggccgtgaactgctacagcgtgaaggccgccacccgggtccaggatgcctttgccgccgccaagctcctggccctggccctgatcatcctgctgggcttcgtccagatcgggaagggtgatgtgtccaatctagatcccaacttctcatttgaaggcaccaaactggatgtggggaacattgtgctggcattatacagcggcctctttgcctatggaggatggaattacttgaatttcgtcacagaggaaatgatcaacccctacagaaacctgcccctggccatcatcatctccctgcccatcgtgacgctggtgtacgtgctgaccaacctggcctacttcaccaccctgtccaccgagcagatgctgtcgtccgaggccgtggccgtggacttcgggaactatcacctgggcgtcatgtcctggatcatccccgtcttcgtgggcctgtcctgcttcggctccgtcaatgggtccctgttcacatcctccaggctcttcttcgtggggtcccgggaaggccacctgccctccatcctctccatgatccacccacagctcctcacccccgtgccgtccctcgtgttcacgtgtgtgatgacgctgctctacgccttctccaaggacatcttctccgtcatcaacttcttcagcttcttcaactggctctgcgtggccctggccatcatcggcatgatctggctgcgccacagaaagcctgagcttgagcggcccatcaaggtgaacctggccctgcctgtgttcttcatcctggcctgcctcttcctgatcgccgtctccttctggaagacacccgtggagtgtggcatcggcttcaccatcatcctcagcgggctgcccgtctacttcttcggggtctggtggaaaaacaagcccaagtggctcctccagggcatcttctccacgaccgtcctgtgtcagaagctcatgcaggtggtcccccaggagacatagccaggaggccgagtggctgccggaggagcatgcgcagaggccagttaaagtagatcacctcctcgaacccactccggttccccgcaacccacagctcagctgcccatcccagtccctcgccgtccctcccaggtcgggcagtggaggctgctgtgaaaactctggtacgaatctcatccctcaactgagggccagggacccaggtgtgcctgtgctcctgcccaggagcagcttttggtctccttgggccctttttcccttccctcctttgtttacttatatatatattttttttaaacttaaattttgggtcaacttgacaccactaagatgattttttaaggagctgggggaaggcaggagccttcctttctcctgccccaagggcccagaccctgggcaaacagagctactgagacttggaacctcattgctaccacagacttgcactgaagccggacagctgcccagacacatgggcttgtgacattcgtgaaaaccaaccctgtgggcttatgtctctgccttagggtttgcagagtggaaactcagccgtagggtggcactgggagggggtgggggatctgggcaaggtgggtgattcctcccctagctcaccaggcctggcctctgggcagtgtggcctcttggctatttctgtgtccagttttggaggctgagttctggttcatgcagacaaagccctgtccttcagtcttctagaaacagagacaagaaaggcagacacaccgcggccaggcacccatgtgggcgcccaccctgggctccacacagcagtgtcccctgccccagaggtcgcagctaccctcagcctccaatgcattggcctctgtaccgcccggcagccccttctggccggtgctgggttcccactcccggcctaggcacctccccgctctccctgtcacgctcatgtcctgtcctggtcctgatgcccgttgtctaggagacagagccaagcactgctcacgtctctgccgcctgcgtttggaggcccctgggctctcacccagtccccacccgcctgcagagagggaactagggcaccccttgtttctgttgttcccgtgaatttttttcgctatgggaggcagccgaggcctggccaatgcggcccactttcctgagctgtcgctgcctccatggcagcagccagggacccccagaacaagaagacccccccgcaggatccctcctgagctcggggggctctgccttctcaggccccgggcttcccttctccccagccagaggtggagccaagtggtccagcgtcactccagtgctcagctgtggctggaggagctggcctgtggcacagccctgagtgtcccaagccgggagccaacgaagccggacacggcttcactgaccagcggctgctcaagccgcaagctctcagcaagtgcccagtggagcctgccgcccccgcctgggcaccgggaccccctcaccatccagtgggcccggagaaacctgatgaacagtttggggactcaggaccagatgtccgtctctcttgcttgaggaatgaagacctttattcacccctgccccgttgcttcccgctgcacatggacagacttcacagcgtctgctcataggacctgcatccttcctggggacgaattccactcgtccaagggacagcccacggtctggaggccgaggaccaccagcaggcaggtggactgactgtgttgggcaagacctcttccctctgggcctgttctcttggctgcaaataaggacagcagctggtgccccacctgcctggtgcattgctgtgtgaatccaggaggcagtggacatcgtaggcagccacggccccgggtccaggagaagtgctccctggaggcacgcaccactgcttcccactggggccggcggggcccacgcacgacgtcagcctcttaccttcccgcctcggctaggggtcctcgggatgccgttctgttccaacctcctgctctgggacgtggacatgcctcaaggatacagggagccggcggcctctcgacggcacgcacttgcctgttggctgctgcggctgtgggcgagcatgggggctgccagcgtctgttgtggaaagtagctgctagtgaaatggctggggccgctggggtccgtcttcacactgcgcaggtctcttctgggcgtctgagctggggtgggagctcctccgcagaaggttggtggggggtccagtctgtgatccttggtgctgtgtgccccactccagcctggggaccccacttcagaaggtaggggccgtgtcccgcggtgctgactgaggcctgcttccccctccccctcctgctgtgctggaattccacagggaccagggccaccgcaggggactgtctcagaagacttgatttttccgtccctttttctccacactccactgacaaacgtccccagcggtttccacttgtgggcttcaggtgttttcaagcacaacccaccacaacaagcaagtgcattttcagtcgttgtgcttttttgttttgtgctaacgtcttactaatttaaagatgctgtcggcaccatgtttatttatttccagtggtcatgctcagccttgctgctctgcgtggcgcaggtgccatgcctgctccctgtctgtgtcccagccacgcagggccatccactgtgacgtcggccgaccaggctggacaccctctgccgagtaatgacgtgtgtggctgggaccttctttattctgtgttaatggctaacctgttacactgggctgggttgggtagggtgttctggcttttttgtggggtttttatttttaaagaaacactcaatcatcctaaaaaaaaaacaaaaaaagtgcagcgggaaaaggctaagggcgccaacggtccacgtaggctttcaccccagcaggggggttatcactaggctaaaccgggacaaagaccggaaaaagatcctcgaacgggaaagccaaatctcgccaagtcggaacggcacccggcgcactcacccgggaacgaaacctttggcgacagatgccggacataacacgtaatccttattataccaacgtctggattcacaatctggat

SEQ ID NO: 101438 - DNA, 2812 bp, Homo sapiens
  misc_feature (20)..(20): n is a, c, g, or t
cgaggatggagtaaaaaccntaggctaggtacgaggctgggtgttgagacttgcactgaagccggacagctgcccagacacatgggcttgtgacattcgtgaaaaccaaccctgtgggcttatgtctctgccttagggtttgcagagtggaaactcagccgtagggtggcactgggagggggtgggggatctgggcaaggtgggtgattcctcccaggaggtgcttgaggccccgatggactcctgaccataatcctagccccgagacaccatcctgagccagggaacagccccagggttggggggtgccggcatctcccctagctcaccaggcctggcctctgggcagtgtggcctcttggctatttctgtgtccagttttggaggctgagttctggttcatgcagacaaagccctgtccttcagtcttctagaaacagagacaagaaaggcagacacaccgcggccaggcacccatgtgggcgcccaccctgggctccacacagcagtgtcccctgccccagaggtcgcagctaccctcagcctccaatgcattggcctctgtaccgcccggcagccccttctggccggtgctgggttcccactcccggcctaggcacctccccgctctccctgtcacgctcatgtcctgtcctggtcctgatgcccgttgtctaggagacagagccaagcactgctcacgtctctgccgcctgcgtttggaggcccctgggctctcacccagtccccacccgcctgcagagagggaactagggcaccccttgtttctgttgttcccgtgaatttttttcgctatgggaggcagccgaggcctggccaatgcggcccactttcctgagctgtcgctgcctccatggcagcagccagggacccccagaacaagaagacccccccgcaggatccctcctgagctcggggggctctgccttctcaggccccgggcttcccttctccccagccagaggtggagccaagtggtccagcgtcactccagtgctcagctgtggctggaggagctggcctgtggcacagccctgagtgtcccaagccgggagccaacgaagccggacacggcttcactgaccagcggctgctcaagccgcaagctctcagcaagtgcccagtggagcctgccgcccccgcctgggcaccgggaccccctcaccatccagtgggcccggagaaacctgatgaacagtttggggactcaggaccagatgtccgtctctcttgcttgaggaatgaagacctttattcacccctgccccgttgcttcccgctgcacatggacagacttcacagcgtctgctcataggacctgcatccttcctggggacgaattccactcgtccaagggacagcccacggtctggaggccgaggaccaccagcaggcaggtggactgactgtgttgggcaagacctcttccctctgggcctgttctcttggctgcaaataaggacagcagctggtgccccacctgcctggtgcattgctgtgtgaatccaggaggcagtggacatcgtaggcagccacggccccgggtccaggagaagtgctccctggaggcacgcaccactgcttcccactggggccggcggggcccacgcacgacgtcagcctcttaccttcccgcctcggctaggggtcctcgggatgccgttctgttccaacctcctgctctgggacgtggacatgcctcaaggatacagggagccggcggcctctcgacggcacgcacttgcctgttggctgctgcggctgtgggcgagcatgggggctgccagcgtctgttgtggaaagtagctgctagtgaaatggctggggccgctggggtccgtcttcacactgcgcaggtctcttctgggcgtctgagctggggtgggagctcctccgcagaaggttggtggggggtccagtctgtgatccttggtgctgtgtgccccactccagcctggggaccccacttcagaaggtaggggccgtgtcccgcggtgctgactgaggcctgcttccccctccccctcctgctgtgctggaattccacagggaccagggccaccgcaggggactgtctcagaagacttgatttttccgtccctttttctccacactccactgacaaacgtccccagcggtttccacttgtgggcttcaggtgttttcaagcacaacccaccacaacaagcaagtgcattttcagtcgttgtgcttttttgttttgtgctaacgtcttactaatttaaagatgctgtcggcaccatgtttatttatttccagtggtcatgctcagccttgctgctctgcgtggcgcaggtgccatgcctgctccctgtctgtgtcccagccacgcagggccatccactgtgacgtcggccgaccaggctggacaccctctgccgagtaatgacgtgtgtggctgggaccttctttattctgtgttaatggctaacctgttacactgggctgggttgggtagggtgttctggcttttttgtggggtttttatttttaaagaaacactcaatcatcctaaaaaaaaaacaaaaaaagtgcagcgggaaaaggctaagggcgccaacggtccacgtaggctttcaccccagcaggggggttatcactaggctaaaccgggacaaagaccggaaaaagatcctcgaacgggaaagccaaatctcgccaagtcggaacggcacccggcgcactcacccgggaacgaaacctttggcgacagatgccggacataacacgtaatccttattataccaacgtctggattcacaatctggat

SEQ ID NO: 101439 - DNA, 4727 bp, Homo sapiens
gggtcctgacgcaactgcgggccgcgggcggcgcgcacactgctcgctgggccgcggctcccgggtgtcccaggcccggccggtgcgcagagcatggcgggtgcgggcccgaagcggcgcgcgctagcggcgccggcggccgaggagaaggaagaggcgcgggagaagatgctggccgccaagagcgcggacggctcggcgccggcaggcgagggcgagggcgtgaccctgcagcggaacatcacgctgctcaacggcgtggccatcatcgtggggaccattatcggctcgggcatcttcgtgacgcccacgggcgtgctcaaggaggcaggctcgccggggctggcgctggtggtgtgggccgcgtgcggcgtcttctccatcgtgggcgcgctctgctacgcggagctcggcaccaccatctccaaatcgggcggcgactacgcctacatgctggaggtctacggctcgctgcccgccttcctcaagctctggatcgagctgctcatcatccggccttcatcgcagtacatcgtggccctggtcttcgccacctacctgctcaagccgctcttccccacctgcccggtgcccgaggaggcagccaagctcgtggcctgcctctgcgtgctgctgctcacggccgtgaactgctacagcgtgaaggccgccacccgggtccaggatgcctttgccgccgccaagctcctggccctggccctgatcatcctgctgggcttcgtccagatcgggaagggtgatgtgtccaatctagatcccaacttctcatttgaaggcaccaaactggatgtggggaacattgtgctggcattatacagcggcctctttgcctatggaggatggaattacttgaatttcgtcacagaggaaatgatcaacccctacagaaacctgcccctggccatcatcatctccctgcccatcgtgacgctggtgtacgtgctgaccaacctggcctacttcaccaccctgtccaccgagcagatgctgtcgtccgaggccgtggccgtggacttcgggaactatcacctgggcgtcatgtcctggatcatccccgtcttcgtgggcctgtcctgcttcggctccgtcaatgggtccctgttcacatcctccaggctcttcttcgtggggtcccgggaaggccacctgccctccatcctctccatgatccacccacagctcctcacccccgtgccgtccctcgtgttcacgtgtgtgatgacgctgctctacgccttctccaaggacatcttctccgtcatcaacttcttcagcttcttcaactggctctgcgtggccctggccatcatcggcatgatctggctgcgccacagaaagcctgagcttgagcggcccatcaaggtgaacctggccctgcctgtgttcttcatcctggcctgcctcttcctgatcgccgtctccttctggaagacacccgtggagtgtggcatcggcttcaccatcatcctcagcgggctgcccgtctacttcttcggggtctggtggaaaaacaagcccaagtggctcctccagggcatcttctccacgaccgtcctgtgtcagaagctcatgcaggtggtcccccaggagacatagccaggaggccgagtggctgccggaggagcatgcgcagaggccagttaaagtagatcacctcctcgaacccactccggttccccgcaacccacagctcagctgcccatcccagtccctcgccgtccctcccaggtcgggcagtggaggctgctgtgaaaactctggtacgaatctcatccctcaactgagggccagggacccaggtgtgcctgtgctcctgcccaggagcagcttttggtctccttgggccctttttcccttccctcctttgtttacttatatatatattttttttaaacttaaattttgggtcaacttgacaccactaagatgattttttaaggagctgggggaaggcaggagccttcctttctcctgccccaagggcccagaccctgggcaaacagagctactgagacttggaacctcattgctaccacagacttgcactgaagccggacagctgcccagacacatgggcttgtgacattcgtgaaaaccaaccctgtgggcttatgtctctgccttagggtttgcagagtggaaactcagccgtagggtggcactgggagggggtgggggatctgggcaaggtgggtgattcctcccaggaggtgcttgaggccccgatggactcctgaccataatcctagccccgagacaccatcctgagccagggaacagccccagggttggggggtgccggcatctcccctagctcaccaggcctggcctctgggcagtgtggcctcttggctatttctgtgtccagttttggaggctgagttctggttcatgcagacaaagccctgtccttcagtcttctagaaacagagacaagaaaggcagacacaccgcggccaggcacccatgtgggcgcccaccctgggctccacacagcagtgtcccctgccccagaggtcgcagctaccctcagcctccaatgcattggcctctgtaccgcccggcagccccttctggccggtgctgggttcccactcccggcctaggcacctccccgctctccctgtcacgctcatgtcctgtcctggtcctgatgcccgttgtctaggagacagagccaagcactgctcacgtctctgccgcctgcgtttggaggcccctgggctctcacccagtccccacccgcctgcagagagggaactagggcaccccttgtttctgttgttcccgtgaatttttttcgctatgggaggcagccgaggcctggccaatgcggcccactttcctgagctgtcgctgcctccatggcagcagccagggacccccagaacaagaagacccccccgcaggatccctcctgagctcggggggctctgccttctcaggccccgggcttcccttctccccagccagaggtggagccaagtggtccagcgtcactccagtgctcagctgtggctggaggagctggcctgtggcacagccctgagtgtcccaagccgggagccaacgaagccggacacggcttcactgaccagcggctgctcaagccgcaagctctcagcaagtgcccagtggagcctgccgcccccgcctgggcaccgggaccccctcaccatccagtgggcccggagaaacctgatgaacagtttggggactcaggaccagatgtccgtctctcttgcttgaggaatgaagacctttattcacccctgccccgttgcttcccgctgcacatggacagacttcacagcgtctgctcataggacctgcatccttcctggggacgaattccactcgtccaagggacagcccacggtctggaggccgaggaccaccagcaggcaggtggactgactgtgttgggcaagacctcttccctctgggcctgttctcttggctgcaaataaggacagcagctggtgccccacctgcctggtgcattgctgtgtgaatccaggaggcagtggacatcgtaggcagccacggccccgggtccaggagaagtgctccctggaggcacgcaccactgcttcccactggggccggcggggcccacgcacgacgtcagcctcttaccttcccgcctcggctaggggtcctcgggatgccgttctgttccaacctcctgctctgggacgtggacatgcctcaaggatacagggagccggcggcctctcgacggcacgcacttgcctgttggctgctgcggctgtgggcgagcatgggggctgccagcgtctgttgtggaaagtagctgctagtgaaatggctggggccgctggggtccgtcttcacactgcgcaggtctcttctgggcgtctgagctggggtgggagctcctccgcagaaggttggtggggggtccagtctgtgatccttggtgctgtgtgccccactccagcctggggaccccacgcaggggactgtctcagaagacttgatttttccgtccctttttctccacactccactgacaaacgtccccagcggtttccacttgtgggcttcaggtgttttcaagcacaacccaccacaacaagcaagtgcattttcagtcgttgtgcttttttgttttgtgctaacgtcttactaatttaaagatgctgtcggcaccatgtttatttatttccagtggtcatgctcagccttgctgctctgcgtggcgcaggtgccatgcctgctccctgtctgtgtcccagccacgcagggccatccactgtgacgtcggccgaccaggctggacaccctctgccgagtaatgacgtgtgtggctgggaccttctttattctgtgttaatggctaacctgttacactgggctgggttgggtagggtgttctggcttttttgtggggtttttatttttaaagaaacactcaatcatcctaaaaaaaaaacaaaaaaagtgcagcgggaaaaggctaagggcgccaacggtccacgtaggctttcaccccagcaggggggttatcactaggctaaaccgggacaaagaccggaaaaagatcctcgaacgggaaagccaaatctcgccaagtcggaacggcacccggcgcactcacccgggaacgaaacctttggcgacagatgccggacataacacgtaatccttattataccaacgtctggattcacaatctggat

SEQ ID NO: 101440 - DNA, 4658 bp, Homo sapiens
gggtcctgacgcaactgcgggccgcgggcggcgcgcacactgctcgctgggccgcggctcccgggtgtcccaggcccggccggtgcgcagagcatggcgggtgcgggcccgaagcggcgcgcgctagcggcgccggcggccgaggagaaggaagaggcgcgggagaagatgctggccgccaagagcgcggacggctcggcgccggcaggcgagggcgagggcgtgaccctgcagcggaacatcacgctgctcaacggcgtggccatcatcgtggggaccattatcggctcgggcatcttcgtgacgcccacgggcgtgctcaaggaggcaggctcgccggggctggcgctggtggtgtgggccgcgtgcggcgtcttctccatcgtgggcgcgctctgctacgcggagctcggcaccaccatctccaaatcgggcggcgactacgcctacatgctggaggtctacggctcgctgcccgccttcctcaagctctggatcgagctgctcatcatccggccttcatcgcagtacatcgtggccctggtcttcgccacctacctgctcaagccgctcttccccacctgcccggtgcccgaggaggcagccaagctcgtggcctgcctctgcgtgctgctgctcacggccgtgaactgctacagcgtgaaggccgccacccgggtccaggatgcctttgccgccgccaagctcctggccctggccctgatcatcctgctgggcttcgtccagatcgggaagggtgatgtgtccaatctagatcccaacttctcatttgaaggcaccaaactggatgtggggaacattgtgctggcattatacagcggcctctttgcctatggaggatggaattacttgaatttcgtcacagaggaaatgatcaacccctacagaaacctgcccctggccatcatcatctccctgcccatcgtgacgctggtgtacgtgctgaccaacctggcctacttcaccaccctgtccaccgagcagatgctgtcgtccgaggccgtggccgtggacttcgggaactatcacctgggcgtcatgtcctggatcatccccgtcttcgtgggcctgtcctgcttcggctccgtcaatgggtccctgttcacatcctccaggctcttcttcgtggggtcccgggaaggccacctgccctccatcctctccatgatccacccacagctcctcacccccgtgccgtccctcgtgttcacgtgtgtgatgacgctgctctacgccttctccaaggacatcttctccgtcatcaacttcttcagcttcttcaactggctctgcgtggccctggccatcatcggcatgatctggctgcgccacagaaagcctgagcttgagcggcccatcaaggtgaacctggccctgcctgtgttcttcatcctggcctgcctcttcctgatcgccgtctccttctggaagacacccgtggagtgtggcatcggcttcaccatcatcctcagcgggctgcccgtctacttcttcggggtctggtggaaaaacaagcccaagtggctcctccagggcatcttctccacgaccgtcctgtgtcagaagctcatgcaggtggtcccccaggagacatagccaggaggccgagtggctgccggaggagcatgcgcagaggccagttaaagtagatcacctcctcgaacccactccggttccccgcaacccacagctcagctgcccatcccagtccctcgccgtccctcccaggtcgggcagtggaggctgctgtgaaaactctggtacgaatctcatccctcaactgagggccagggacccaggtgtgcctgtgctcctgcccaggagcagcttttggtctccttgggccctttttcccttccctcctttgtttacttatatatatattttttttaaacttaaattttgggtcaacttgacaccactaagatgattttttaaggagctgggggaaggcaggagccttcctttctcctgccccaagggcccagaccctgggcaaacagagctactgagacttggaacctcattgctaccacagacttgcactgaagccggacagctgcccagacacatgggcttgtgacattcgtgaaaaccaaccctgtgggcttatgtctctgccttagggtttgcagagtggaaactcagccgtagggtggcactgggagggggtgggggatctgggcaaggtgggtgattcctcccaggaggtgcttgaggccccgatggactcctgaccataatcctagccccgagacaccatcctgagccagggaacagccccagggttggggggtgccggcatctcccctagctcaccaggcctggcctctgggcagtgtggcctcttggctatttctgtgtccagttttggaggctgagttctggttcatgcagacaaagccctgtccttcagtcttctagaaacagagacaagaaaggcagacacaccgcggccaggcacccatgtgggcgcccaccctgggctccacacagcagtgtcccctgccccagaggtcgcagctaccctcagcctccaatgcattggcctctgtaccgcccggcagccccttctggccggtgctgggttcccactcccggcctaggcacctccccgctctccctgtcacgctcatgtcctgtcctggtcctgatgcccgttgtctaggagacagagccaagcactgctcacgtctctgccgcctgcgtttggaggcccctgggctctcacccagtccccacccgcctgcagagagggaactagggcaccccttgtttctgttgttcccgtgaatttttttcgctatgggaggcagccgaggcctggccaatgcggcccactttcctgagctgtcgctgcctccatggcagcagccagggacccccagaacaagaagacccccccgcaggatccctcctgagctcggggggctctgccttctcaggccccgggcttcccttctccccagccagaggtggagccaagtggtccagcgtcactccagtgctcagctgtggctggaggagctggcctgtggcacagccctgagtgtcccaagccgggagccaacgaagccggacacggcttcactgaccagcggctgctcaagccgcaagctctcagcaagtgcccagtggagcctgccgcccccgcctgggcaccgggaccccctcaccatccagtgggcccggagaaacctgatgaacagtttggggactcaggaccagatgtccgtctctcttgcttgaggaatgaagacctttattcacccctgccccgttgcttcccgctgcacatggacagacttcacagcgtctgctcataggacctgcatccttcctggggacgaattccactcgtccaagggacagcccacggtctggaggccgaggaccaccagcaggcaggtggactgactgtgttgggcaagacctcttccctctgggcctgttctcttggctgcaaataaggacagcagctggtgccccacctgcctggtgcattgctgtgtgaatccaggaggcagtggacatcgtaggcagccacggccccgggtccaggagaagtgctccctggaggcacgcaccactgcttcccactggggccggcggggcccacgcacgacgtcagcctcttaccttcccgcctcggctaggggtcctcgggatgccgttctgttccaacctcctgctctgggacgtggacatgcctcaaggatacagggagccggcggcctctcgacggcacgcacttgcctgttggctgctgcggctgtgggcgagcatgggggctgccagcgtctgttgtggaaagtagctgctagtgaaatggctggggccgctggggtccgtcttcacactgcgcaggtctcttctgggcgtctgagctggggtgggagctcctccgcagaaggttggtggggggtccagtctgtgatccttggtgctgtgtgccccaactccactgacaaacgtccccagcggtttccacttgtgggcttcaggtgttttcaagcacaacccaccacaacaagcaagtgcattttcagtcgttgtgcttttttgttttgtgctaacgtcttactaatttaaagatgctgtcggcaccatgtttatttatttccagtggtcatgctcagccttgctgctctgcgtggcgcaggtgccatgcctgctccctgtctgtgtcccagccacgcagggccatccactgtgacgtcggccgaccaggctggacaccctctgccgagtaatgacgtgtgtggctgggaccttctttattctgtgttaatggctaacctgttacactgggctgggttgggtagggtgttctggcttttttgtggggtttttatttttaaagaaacactcaatcatcctaaaaaaaaaacaaaaaaagtgcagcgggaaaaggctaagggcgccaacggtccacgtaggctttcaccccagcaggggggttatcactaggctaaaccgggacaaagaccggaaaaagatcctcgaacgggaaagccaaatctcgccaagtcggaacggcacccggcgcactcacccgggaacgaaacctttggcgacagatgccggacataacacgtaatccttattataccaacgtctggattcacaatctggat

SEQ ID NO: 101441 - DNA, 2162 bp, Homo sapiens
ccacgcgtcgcggacgcgtgggtcgacccacgcgtcgccaagcactgctcacgtctctgccgcctgcgtttggaggcccctgggctctcacccagtccccacccgcctgcagagagggaactagggcaccccttgtttctgttgttcccgtgaatttttttcgctatgggaggcagccgaggcctggccaatgcggcccactttcctgagctgtcgctgcctccatggcagcagccagggacccccagaacaagaagacccccccgcaggatccctcctgagctcggggggctctgccttctcaggccccgggcttcccttctccccagccagaggtggagccaagtggtccagcgtcactccagtgctcagctgtggctggaggagctggcctgtggcacagccctgagtgtcccaagccgggagccaacgaagccggacacggcttcactgaccagcggctgctcaagccgcaagctctcagcaagtgcccagtggagcctgccgcccccgcctgggcaccgggaccccctcaccatccagtgggcccggagaaacctgatgaacagtttggggactcaggaccagatgtccgtctctcttgcttgaggaatgaagacctttattcacccctgccccgttgcttcccgctgcacatggacagacttcacagcgtctgctcataggacctgcatccttcctggggacgaattccactcgtccaagggacagcccacggtctggaggccgaggaccaccagcaggcaggtggactgactgtgttgggcaagacctcttccctctgggcctgttctcttggctgcaaataaggacagcagctggtgccccacctgcctggtgcattgctgtgtgaatccaggaggcagtggacatcgtaggcagccacggccccgggtccaggagaagtgctccctggaggcacgcaccactgcttcccactggggccggcggggcccacgcacgacgtcagcctcttaccttcccgcctcggctaggggtcctcgggatgccgttctgttccaacctcctgctctgggacgtggacatgcctcaaggatacagggagccggcggcctctcgacggcacgcacttgcctgttggctgctgcggctgtgggcgagcatgggggctgccagcgtctgttgtggaaagtagctgctagtgaaatggctggggccgctggggtccgtcttcacactgcgcaggtctcttctgggcgtctgagctggggtgggagctcctccgcagaaggttggtggggggtccagtctgtgatccttggtgctgtgtgccccactccagcctggggaccccacttcagaaggtaggggccgtgtcccgcggtgctgactgaggcctgcttccccctccccctcctgctgtgctggaattccacagggaccagggccaccgcaggggactgtctcagaagacttgatttttccgtccctttttctccacactccactgacaaacgtccccagcggtttccacttgtgggcttcaggtgttttcaagcacaacccaccacaacaagcaagtgcattttcagtcgttgtgcttttttgttttgtgctaacgtcttactaatttaaagatgctgtcggcaccatgtttatttatttccagtggtcatgctcagccttgctgctctgcgtggcgcaggtgccatgcctgctccctgtctgtgtcccagccacgcagggccatccactgtgacgtcggccgaccaggctggacaccctctgccgagtaatgacgtgtgtggctgggaccttctttattctgtgttaatggctaacctgttacactgggctgggttgggtagggtgttctggcttttttgtggggtttttatttttaaagaaacactcaatcatcctaaaaaaaaaacaaaaaaagtgcagcgggaaaaggctaagggcgccaacggtccacgtaggctttcaccccagcaggggggttatcactaggctaaaccgggacaaagaccggaaaaagatcctcgaacgggaaagccaaatctcgccaagtcggaacggcacccggcgcactcacccgggaacgaaacctttggcgacagatgccggacataacacgtaatccttattataccaacgtctggattcacaatctggat

SEQ ID NO: 101442 - DNA, 1758 bp, Homo sapiens
  misc_feature (15)..(15): n is a, c, g, or t
  misc_feature (22)..(22): n is a, c, g, or t
  misc_feature (25)..(25): n is a, c, g, or t
catttggctagtagngccgggngtnaatcggacgaacacggcttcactgaccagcggctgctcaagccgcaagctctcagcaagtgcccagtggagcctgccgcccccgcctgggcaccgggaccccctcaccatccagtgggcccggagaaacctgatgaacagtttggggactcaggaccagatgtccgtctctcttgcttgaggaatgaagacctttattcacccctgccccgttgcttcccgctgcacatggacagacttcacagcgtctgctcataggacctgcatccttcctggggacgaattccactcgtccaagggacagcccacggtctggaggccgaggaccaccagcaggcaggtggactgactgtgttgggcaagacctcttccctctgggcctgttctcttggctgcaaataaggacagcagctggtgccccacctgcctggtgcattgctgtgtgaatccaggaggcagtggacatcgtaggcagccacggccccgggtccaggagaagtgctccctggaggcacgcaccactgcttcccactggggccggcggggcccacgcacgacgtcagcctcttaccttcccgcctcggctaggggtcctcgggatgccgttctgttccaacctcctgctctgggacgtggacatgcctcaaggatacagggagccggcggcctctcgacggcacgcacttgcctgttggctgctgcggctgtgggcgagcatgggggctgccagcgtctgttgtggaaagtagctgctagtgaaatggctggggccgctggggtccgtcttcacactgcgcaggtctcttctgggcgtctgagctggggtgggagctcctccgcagaaggttggtggggggtccagtctgtgatccttggtgctgtgtgccccactccagcctggggaccccacttcagaaggtaggggccgtgtcccgcggtgctgactgaggcctgcttccccctccccctcctgctgtgctggaattccacagggaccagggccaccgcaggggactgtctcagaagacttgatttttccgtccctttttctccacactccactgacaaacgtccccagcggtttccacttgtgggcttcaggtgttttcaagcacaacccaccacaacaagcaagtgcattttcagtcgttgtgcttttttgttttgtgctaacgtcttactaatttaaagatgctgtcggcaccatgtttatttatttccagtggtcatgctcagccttgctgctctgcgtggcgcaggtgccatgcctgctccctgtctgtgtcccagccacgcagggccatccactgtgacgtcggccgaccaggctggacaccctctgccgagtaatgacgtgtgtggctgggaccttctttattctgtgttaatggctaacctgttacactgggctgggttgggtagggtgttctggcttttttgtggggtttttatttttaaagaaacactcaatcatcctaaaaaaaaaacaaaaaaagtgcagcgggaaaaggctaagggcgccaacggtccacgtaggctttcaccccagcaggggggttatcactaggctaaaccgggacaaagaccggaaaaagatcctcgaacgggaaagccaaatctcgccaagtcggaacggcacccggcgcactcacccgggaacgaaacctttggcgacagatgccggacataacacgtaatccttattataccaacgtctggattcacaatctggat

SEQ ID NO: 101443 - DNA, 1369 bp, Homo sapiens
  misc_feature (19)..(19): n is a, c, g, or t
tcaggctgtacgccccgangttggatatcgtcgaccacgcgttgcgctggtgccccacctgcctggtgcattgctgtgtgaatccaggaggcagtggacatcgtaggcagccacggccccgggtccaggagaagtgctccctggaggcacgcaccactgcttcccactggggccggcggggcccacgcacgacgtcagcctcttaccttcccgcctcggctaggggtcctcgggatgccgttctgttccaacctcctgctctgggacgtggacatgcctcaaggatacagggagccggcggcctctcgacggcacgcacttgcctgttggctgctgcggctgtgggcgagcatgggggctgccagcgtctgttgtggaaagtagctgctagtgaaatggctggggccgctggggtccgtcttcacactgcgcaggtctcttctgggcgtctgagctggggtgggagctcctccgcagaaggttggtggggggtccagtctgtgatccttggtgctgtgtgccccactccagcctggggaccccacttcagaaggtaggggccgtgtcccgcggtgctgactgaggcctgcttccccctccccctcctgctgtgctggaattccacagggaccagggccaccgcaggggactgtctcagaagacttgatttttccgtccctttttctccacactccactgacaaacgtccccagcggtttccacttgtgggcttcaggtgttttcaagcacaacccaccacaacaagcaagtgcattttcagtcgttgtgcttttttgttttgtgctaacgtcttactaatttaaagatgctgtcggcaccatgtttatttatttccagtggtcatgctcagccttgctgctctgcgtggcgcaggtgccatgcctgctccctgtctgtgtcccagccacgcagggccatccactgtgacgtcggccgaccaggctggacaccctctgccgagtaatgacgtgtgtggctgggaccttctttattctgtgttaatggctaacctgttacactgggctgggttgggtagggtgttctggcttttttgtggggtttttatttttaaagaaacactcaatcatcctaaaaaaaaaacaaaaaaagtgcagcgggaaaaggctaagggcgccaacggtccacgtaggctttcaccccagcaggggggttatcactaggctaaaccgggacaaagaccggaaaaagatcctcgaacgggaaagccaaatctcgccaagtcggaacggcacccggcgcactcacccgggaacgaaacctttggcgacagatgccggacataacacgtaatccttattataccaacgtctggattcacaatctggat

SEQ ID NO: 101444 - DNA, 1725 bp, Homo sapiens
gggtcctgacgcaactgcgggccgcgggcggcgcgcacactgctcgctgggccgcggctcccgggtgtcccaggcccggccggtgcgcagagcatggcgggtgcgggcccgaagcggcgcgcgctagcggcgccggcggccgaggagaaggaagaggcgcgggagaagatgctggccgccaagagcgcggacggctcggcgccggcaggcgagggcgagggcgtgaccctgcagcggaacatcacgctgctcaacggcgtggccatcatcgtggggaccattatcggctcgggcatcttcgtgacgcccacgggcgtgctcaaggaggcaggctcgccggggctggcgctggtggtgtgggccgcgtgcggcgtcttctccatcgtgggcgcgctctgctacgcggagctcggcaccaccatctccaaatcgggcggcgactacgcctacatgctggaggtctacggctcgctgcccgccttcctcaagctctggatcgagctgctcatcatccggccttcatcgcagtacatcgtggccctggtcttcgccacctacctgctcaagccgctcttccccacctgcccggtgcccgaggaggcagccaagctcgtggcctgcctctgcgtgctgctgctcacggccgtgaactgctacagcgtgaaggccgccacccgggtccaggatgcctttgccgccgccaagctcctggccctggccctgatcatcctgctgggcttcgtccagatcgggaagggtgatgtgtccaatctagatcccaacttctcatttgaaggcaccaaactggatgtggggaacattgtgctggcattatacagcggcctctttgcctatggaggatggaattacttgaatttcgtcacagaggaaatgatcaacccctacagaaacctgcccctggccatcatcatctccctgcccatcgtgacgctggtgtacgtgctgaccaacctggcctacttcaccaccctgtccaccgagcagatgctgtcgtccgaggccgtggccgtggacttcgggaactatcacctgggcgtcatgtcctggatcatccccgtcttcgtgggcctgtcctgcttcggctccgtcaatgggtccctgttcacatcctccaggctcttcttcgtggggtcccgggaaggccacctgccctccatcctctccatgatccacccacagctcctcacccccgtgccgtccctcgtgttcacgtgtgtgatgacgctgctctacgccttctccaaggacatcttctccgtcatcaacttcttcagcttcttcaactggctctgcgtggccctggccatcatcggcatgatctggctgcgccacagaaagcctgagcttgagcggcccatcaaggtgaacctggccctgcctgtgttcttcatcctggcctgcctcttcctgatcgccgtctccttctggaagacacccgtggagtgtggcatcggcttcaccatcatcctcagcgggctgcccgtctacttcttcggggtctggtggaaaaacaagcccaagtggctcctccagggcatcttctccacgaccgtcctgtgtcagaagctcatgcaggtggtcccccaggagacatagccaggaggccgagtggctgccggaggagcatgcgcagaggccagttaaagtagatcacctcctcgaacccactccggttccccgctgaagatgatgttgggtaccgag

SEQ ID NO: 101445 - DNA, 605 bp, Homo sapiens
cacggtttctccagagaacgggtggcaagtgagggccccattcagggcgggacggtacagaggagctgcctgggctctcggctctggtccccggctgtgcagctcgtgggcagagccttagaattcagaccaggtggcctgacttaactctcctgagcccttgaggtcaccccgaagaatccccatttctcaggtggggaagctgaggccgcggccaaggcaccagccagggctgtgcagtgtcccgctccaggcacagcctcctgccgccagcctgtgtcctcttgctgcttcccaccttccccgagaagcccagcacagaggctggagctactgcttgcgaggagcccacctggctcctgggcacagggtttggccttcagcccgggccgcgttgggtgacatgtcgtccctgttctttccagaaacctgcccctggccatcatcatctccctgcccatcgtgacgctggtgtacgtgctgaccaacctggcctacttcaccaccctgtccaccgagcagatgctgtcgtccgaggccgtggccgtggtgagccgctacccgccagcttccaccaggggcctgagaggctgtggccagcccgt

SEQ ID NO: 101446 - DNA, 1019 bp, Homo sapiens
gacaagcttctcttcacaggtggagtttctggtgtctaagaagcttgtccagtgtcctcattctgaagacattcaccaaatggagcttggcactaaaatttatgtaaaagaaaaatcacaaaccttgaaaaattttacatcagaaaatgggataaacatacatttcacagaaaataatcaagacttgctctgcagccactcagtagtcttctgtggtcacagaagtaaacattgttggctttgtattgatctctccagtcatttttgaacacatccaatagaaacattggcagcatggtcttccaaaacaaaaagcagtaacatgcatgtttaattgcataccattctcttcacagtagcaggcttaccaatttccatagtctcatgaggccgaaatgaattacaatgtaaagtgttccaggaaccaaattggattttctttcttttgtcattggacacggtttgcaaagttggacatcacttgagttccttcttaaacttttcggcaacttctcttggatcctgttatcacagttttttactgtgatgaaatcttgttaaccaccactagggaatctccagatgaactattaatgcactgtcttatgcctctcattggtgatgtttggaaaatagaagacatctctaatggaatcatgggggaaacgggttggaatttgtagccatggaatatatattagatgtaaagaattttctgcaataaaagaaactagacttgttaatccctgccttgcaatgtcagtaggataaagcagctataaaaattagtacttgcccaaggcctgaaagagaattagtgggaattaagatcaacttctcagttttgtttgtttactttttaattggcttttctttgttgttaagaatgagagacttaatttccatgggagttggagtgtgtgtgctgcaggcaggatcctgtggctcatttggcatggagacctggacatgtagtcagcaggagacggttccctaaataaaagatttgggcactggtg

SEQ ID NO: 101447 - DNA, 1958 bp, Homo sapiens
caaacaaacaccaaagactggacagtgacacctgagcacgtcttgcctgagtcccagagcttgttgacatttgaagaagtggccatgtatttttcccaggaagaatgggagttattggatcccactcagaaggccctctacaatgatgtaatgcaggaaaactatgagactgtcatctctctagcattgtttgtgctccccaaacctaaagtgatctcctgtctagagcaaggggaagagccatgggttcaagtatccccggagtttaaggatagtgccggaaaatctcctacagggttaaagctcaaaaacgacactgaaaatcatcagcctgtgtctctttctgacttagaaatacaagcatcagcaggcgtcatatcaaaaaaggccaaagtaaaagttccccagaaaacagcaggcaaagaaaatcattttgatatgcacagagtgggaaaatggcaccaagattttccagtgaagaaaagaaagaaactttcaacctggaaacaagagctgctcaaacttatggatcgtcacaagaaagattgtgcaagagagaagccttttaaatgtcaggaatgtgggaaaaccttcagagttagctctgaccttattaagcaccaaagaattcacactgaagagaaaccctataaatgtcaacagtgtgataagaggtttagatggagttcagatcttaataagcacttaacaacacaccaaggaataaaaccatataaatgttcatggtgtgggaaaagcttcagtcaaaatacaaatttacatacacaccaaagaactcatacaggagaaaagcccttcacatgtcatgaatgtggaaaaaaattcagtcagaactcccaccttattaaacaccggagaacccacacaggtgagcagccatatacttgtagcatatgcaggagaaacttcagcaggcggtcaagccttcttagacaccagaaactccacctgtgaagagaagcttgtccagtgtcctcattctgaagacattcaccaaatggagcttggcactaaaatttatgtaaaagaaaaatcacaaaccttgaaaaattttacatcagaaaatgggataaacatacatttcacagaaaataatcaagacttgctctgcagccactcagtagtcttctgtggtcacagaagtaaacattgttggctttgtattgatctctccagtcatttttgaacacatccaatagaaacattggcagcatggtcttccaaaacaaaaagcagtaacatgcatgtttaattgcataccattctcttcacagtagcaggcttaccaatttccatagtctcatgaggccgaaatgaattacaatgtaaagtgttccaggaaccaaattggattttctttcttttgtcattggacacggtttgcaaagttggacatcacttgagttccttcttaaacttttcggcaacttctcttggatcctgttatcacagttttttactgtgatgaaatcttgttaaccaccactagggaatctccagatgaactattaatgcactgtcttatgcctctcattggtgatgtttggaaaatagaagacatctctaatggaatcatgggggaaacgggttggaatttgtagccatggaatatatattagatgtaaagaattttctgcaataaaagaaactagacttgttaatccctgccttgcaatgtcagtaggataaagcagctataaaaattagtacttgcccaaggcctgaaagagaattagtgggaattaagatcaacttctcagttttgtttgtttactttttaattggcttttctttgttgttaagaatgagagacttaatttccatgggagttggagtgtgtgtgctgcaggcaggatcctgtggctcatttggcatggagacctggacatgtagtcagcaggagacggttccctaaataaaagatttgggcactggtg

SEQ ID NO: 101448 - DNA, 778 bp, Homo sapiens
aattttatttttgagacagtttcactctgttgcccaggccggagtgcaatgacatgatctcggctcctgcaacctccccatcccgggttcaagcaattcttctgcctcagcctcccaagtagatgggattacaggcgcccgccaccacgcctggctaatttttgtatttttagtagagatggggtttcaccatgttagccaagctggtctccaactcctgacctcaggtgatcaatccaccgcctcaaactcccaaagtgctgggattacaggtgtgagtcaccatgcctggcctattatttttcttaatcaacagaagtgctagccaaaagcctaaaaagcagatgcctacacttttttttttttttgagataggatctcaatatgttgcccaccgccgccggtctcaaacttttggcctcaagccatccttctgctcagcctcccgagtagctgggattacaggcatgtgacaccacacccagcttatatacacaactataaaactaagtttaaatgtcttatgtttatataactagataagcaaaaaacaaacttataaattaaatacaaacaaaatcaccaaaccagcaaaattcaaaataacattaatcaatgatgccgctcaaattaaaatcactgcccacaaggtaaatatggtaatggcataggcctaaaaacaggcagacagaacaagagagcctggaaagatacacacggaatccctatagcccttacaaaagccaccttaggaaatgccccgtacctgcaatttgca

SEQ ID NO: 101449 - DNA, 192 bp, Homo sapiens
ccacccgggacaggcctaactcttaacacattcctcaacccatctctctaaagacccgtcccagtcgttaggttcgctcatccctgacctcaccccagaatacgttaagactgcctgctccatctctgaagcccacctgcagcctagccatggcccttccctagtgggtaagatctgctccaacccgaacca

SEQ ID NO: 101450 - DNA, 200 bp, Homo sapiens
ttgtatagaaaattgaatcttatgcatattataaaaaaggaacttatcagcattgtaataagccagtcattttgtattaactctatcattatgtgtatacatatctttcatatacactgaaaatgtctagaatatataaactgttactaagttaccctgtcaggactgggattaggggaaggatacttttcctctatata

SEQ ID NO: 101451 - DNA, 833 bp, Homo sapiens
aacagtagcaaactgcccctgttccattttgttctttggctttttgcaataaatcttgctgctgctcactgtttggacctgcctggcctttatgagctgtaacactcaccacgaaggtctgcagctttgctcttgaggccagttaagaccacaaacccactggaaggagcgaacaactccagaagcactgcgtataagagctgtaacacccacagtgagggtctgcagcttcattcctgaagtcagcgagaccacaaacccaccagaagcaagaaactctggacacatctgaacatctgaaggaacaaactctggacacatcatctttaagaactgtatgactcactgcaagggtctgtggcttcagtgagaccaataacccaccaattctgaacacactaatctttattaatttatgtggggaatgaggttaacacttctaaagttagattaacgttatgtgagaaaattcaaaatatgggattttttttcacggattctttgttactctgctttatagcaatttcagtaagatattctatttggataaaggaatcagttatttgaaatttaaaaatatagtactgagttttgtgttccccttcctgattgcatggactcggctgctgaacaaagttatgcatttactttacttttgataattaaaattgtgagatcctcaagggcaggaacaatttccttttgattcctagcagtaagtttttgcatcttgaaggtgttcaatgaatatatgttgaatgaatgcttgtatccttaatttggaaagtaataagtatttgtcaaaagaaaatgaaaaacaatatgcaggaaaa

SEQ ID NO: 101452 - DNA, 259 bp, Homo sapiens
aatgctaggattacaagtgtgaaccaccgcacccggccaatatgtcttatattaaggttatctgagctctgaacaatatataatccctgatagagatgctatgacaatattttttcaaggcttagagttgaattataacatgagtgatcactactgattctctctttaaatacaaatatttttcctatagtatattttacatttattttttgggctgaactaatttggactacttgtattatgaaacatgtttcttggt

SEQ ID NO: 101453 - DNA, 198 bp, Homo sapiens
tcacttttaacacgaggaaggggctgaatgtcatgaactctaagtcccttccagtttataaactcctggattcctttttctccaccttttccttcacgtggccacatgtgaagcgcagagtttagcatttaagctgacctcttgagccctgggttccttatctaaccaatgatgattctggggcaggctggctgacag

SEQ ID NO: 101454 - DNA, 660 bp, Homo sapiens
gctggctgggacagcacccggtaatctgcatttttacacactcccaagtcattatggtggaggcaatcacagatcacactttgagaaatattggagtaaccaaatgcatacagggttcatatctgaatgcagccttaccatgtgtaagctgtgagagcttgggaaacttacttctctcaatcataggtttttcatctgcaaaagaagaataaataataaaacaggattggaagagaatgaaacaatgcagtgtccctgagtgtttagcaccgtatctggccctgaagcacttagcaattgttagcagtatttttgtgtttgtgcaaaatacggataatcagaataacatcagttggatttaataaagagtgcactgggtggccaggcatggtggctcatgcctgtaatcccagcactttgggaggccgaggagggtggatcacaaggtcaggagttcaagaccaggctggccaaggtggtgaaaccccgtctctactaaaaatacaaaaattagctgggcacggtggcaggcacctgtaatcccagctactcgggaggctgaggcaggagaatcgcttgaacccgggtggcaaaggttgcagtgagccaagatcgcgccactacactccagccctgggtgatagagtgagactctgtctc

SEQ ID NO: 101455 - DNA, 634 bp, Homo sapiens
ttctctctatggcaggaaactgcatatcttttggtgtacatgacagatggagtgctaatggaaatgcccaaaaccttcagagattgacacgctgtcattttccatttccgttcctggatctacggagtcttctaagagattttgcaatgaggagaagcactgttttcaaactatataactgagccttatttataattagggatattatcaaaatatgtaaccatgaggcccctcaggtcctgatcagtcagaatggatgctttcaccagcagacccggccatgtggctgctcggtcctgggtgctcgctgctgtgcgagacattagccctttagttatgagcctgtgggaacttcaggggttcccagtggggagagcagtggcagtgggaggcatctgggggccaaaggtcagtggcagggggtatttcagtattatacaactgctgtgaccagacttgtatactggctgaatatcagtgctttttgtaatttttcactttgagaaccaacattaattccatatgaatcaagtgttttgtaactgctattcatttattcagcaaatatttattgatcatctcttctccataagatagtgtgataaacacagtcatgaataaagttattttccac

SEQ ID NO: 101456 - DNA, 341 bp, Homo sapiens
tgactgtttccacgcagaaaatgctggcagcaatatgaaggatgaaatgggcagagtagacaactggagacggagagatgagctagacagcggtatctacagaaacttctgcagtgatgaaaatgttactcctgcaatgcccagtatggcagctacatggggccgttgagcacctgaaaggtagctagtgagaatgaggaactgaatttttatttttatttaattttagttaacctaaatttaaatggcctcatgcagttggtggctaccatattgaacacaccagctagaaagctatttcaaaattcaatgaaggatgacatgtcctaagtaaggcagga

SEQ ID NO: 101457 - DNA, 84 bp, Homo sapiens
gagtcgttttccaagccggcagctgcctgtctcctttgaagagtcttggaagcagccaccatccatcattcgcttggcatgact

SEQ ID NO: 101458 - DNA, 556 bp, Homo sapiens
aaggcattccacacactgcagcttctacctactcacctgatattcattctcaaccatgaaatcctctacctaccaaagctcctctttctttaccaataatttctatcactaaatgcaataaattttctttaattggaattttttgcttaaattatttgattataaatcagagaaactgttggaaacctaaatataagaacatatgaagaaaagtaaaatcatccataacctatcagccagaaggccactgttgttgcaggaagtcagggaccccgaatggagggaccagctgaagccatggcagaagaacgtggattgtgaagatttcatggacatttattagttccccaaattaatacttttataatttcttatgcctgtctttactgctatctttgaacataaattgtgaagatttcatggacgcttatcacctccccaatcaatacccttgtgatttcctatgcctgtctttactttaatctcttaatcccatcatttttgtaaactgaggaggatgtatttcgcctcaggaccctgtgatgattgtattaac

SEQ ID NO: 101459 - DNA, 322 bp, Homo sapiens
tttaagattgagattctttcatagattatataatgtcaaattgccaaaaatatcttaaatttcgaaagatatttataataaaagagccatatatattaaagagcccaccaataaagggctactgttctgtattagatgattataggtctaaggaaaaaaaaaacacagaaccatttaaagttactagagactgcagaattctgacacaagcctgcatcctctctgagagtctcctttctgagcagaaagcgtccacctatgccatggctgaacaatgtcagtaacaaggcataatactttctacaacatctctttccaattc

SEQ ID NO: 101460 - DNA, 412 bp, Homo sapiens
tcgactgagctggagtgtagggttgggtttgagtgagggagaagttagtttgtgctcagcgtatagaaagctgaatacaaccagagactgcttggagtcctgtcagcctggagcagctcttgctagaggaaatgaatctttgatgggtgtgctcccgaacacacatgattcagtgagccaagtgcatacagctgagcagacccaaggaaaggcgagtgggtggaacctcaagaatgctgtgacgagggccggatgcacacctgccttcagcctttccccagtggtggtggtgatgtttgatgttcgcagagtgaggtgtgggagagtggaaagctcccagatacacgcatgagcggcaatgactagctgggtcctgtgggttccaccgcagcttgaccacagcaaagctgta

SEQ ID NO: 101461 - DNA, 564 bp, Homo sapiens
tcttgattccaggggtatagaacacttagtgactgtatttagcagtgcatgagaagttgggtttgaaaatactgagataatgcttcttagtccaaaacaaacaaaaaatattaggtatatcagagtacttagcagacagttgtcacagcagtattttgatttaaagattaggaaaattactagttagtgtccactcaagtggtaaaacgaagagatatgagatgcttgaatgacttttgagtgtcatttgggctctttcttcctgtatacatttattattttcaaaatccacacttccgaaaccttcactgagcttccgctttatgccaagtacagttacgaggtgttaagtaaataacaattaattccttcagataatgcttgtgtttctaggtgccaggcactgtccaggggccattgtccgggtcctttttcatgtaccttgatctaatttggggggaaagaaaacgtgtaagataacaaactaacacattaataggtataatcccagtaatgagagcaataatgataatttcaataaagttatgtgatgaggtggggctg

SEQ ID NO: 101462 - DNA, 572 bp, Homo sapiens
agctctgggacagcccactggaaagcttcaatacagctgtggaaatctgcaccctagaagatcctagtacagaaattctacaaccaaccataatcatggaagagccaacttccagcaccaacgagaataaaatgaagagcccctgtgaatctaacaaaagaaaagttgacaagaagaagaatctgcacagagcctcagcccctgaacagagtttgaaagagacagaaaaagcaaaatatccaacattagtgttttactgcaggaagaataagaaaagaaattcaaatcaactggagaataaccagcctacagagagctccactgatccaatcaaagagaaaggagacctagacatatctgcaggatctccacaggatggagaggaagaaaaggatttggtgttccttggagcacgtgcatgtttagaagagcacataagaagatctgtattgtatgtaggtgacagtgacactctttccaaaatgaagacatcagaatcaccaccttcaggccacatacctcagagtggtgtgttttgtaactcacccaatgctgtgagcaactgaaggtcc

SEQ ID NO: 101463 - DNA, 1030 bp, Homo sapiens
gcaagtgggtgggtgaaaaggaatagaagcagagaaaatcaggaaatgcttatatatagcaaaaacaaaatacccatctggaaaatatccaaaaaatgactgcagactctcttagttggcaatgccaaatgctttagaaattattcatgtgttaaattcagttatgccagttctcactaactactttatatccatgtctgtggggaattcttgcagagggcattgttcagctattagaattactggggtggcagttccccttttcccagttcattgtggaccaaactacaggctcttctgatcttactgctttctgaagcagccagcagcgtagataattccttgacttgttttatttaaaaaatatcactggagatttagtaggagtgttgtatcacaccaattctcattctgttttcaaccaaggattctggagtactctgatagcattggtttcatttctcatgtcgtcctggcaagcataattttgtagtttatctcagtttcaggtagaagctgcagaagcagagagcagcctacccacaaaaggggtccagttggttctctagcccctgagctgagtggcaggcagtctatatgtttgctcatctctgcactgtgcctggtgctgtgcttagaggagaagcaaaggaaggagcgtgtagtccaagtggaaagccaggatagacagctggtaaaactcgcccatctcttgccttccttcttgccttctggataattgtgtttttgcaatagcttctcatttcccttctaaagaagaaaagcaaaaagcaaaagccaaacaaatatacacatattttatatcaaagatgtttgcaaaagttgtttctgtaactcattgcttagcaatggtaccgtaggggaattttcatactgggctacagaatacttatgcatttttgtagtttatttaaaattctctaaagaggcaatgtgttaaaggaatcctaaagtaagtctttgtataaagcaaatggtccttccctcattaaagtgtatttcttcttaa

SEQ ID NO: 101464 - DNA, 848 bp, Homo sapiens
gaagacagccagcctgtgagactagaagcaagagggcatgagtcatgctagcgttctctcactgtcataatatttgcaaaggtgttttcattgatgggtcaaaaagtgcaaaggtttgaggagacagggcaaccaaatgtaatgtggtattatagaggccaggggaaaacttcccctttgccctctgaaggtttgctgaaatcaattgatgaaaggcagaaaaggcatacaaatgtattaatgtggtggaatcacaaagggattcccccaatcttccaatgggtacagcttatataccctttttcataggggagggaagcgctgggggatatagacaattctttgaggggcagtaaatgactattagggagaatggacggaccagggaacagtaattaacttgtaaaggattttctctggaattttctctgagctccagtggcaggaattatcttcttaaaaacaagtctgtccaggtgtggttgcattcttgtcttttttctgcaatagataatgccattttaggaagcagatagaaggcaatttttttttttttgtaagagacttttttgaacagatgaggaaactccagccgggggcacagagcaagatctccatctcaaaaacaagacaacaagcaacaaaagatttcatgtgtgatatagctcatattattcatatgtagttacatatatactcaacacataaccacattggaaatggactactaccggtccatggctgggaaggttgtcccacatgggaatggggccaaaatcagtttggctaataacccacaacatgattttcatgaccactttggatggcaagcttagcaacgacacata

SEQ ID NO: 101465 - DNA, 482 bp, Homo sapiens
gggaaggacaggtcaacagctggaggtgtgagcatctgaggctcagagccagaataggccaggagtcgggtgaagggggaaggccttcacatgctggaggaagttcccagccaagactaactcacttcctcttctgagacgccaggtatctgggcagtctggaagaggaaatgatgaatgagttgttgaaaaaaaatggtcaaacccagggaatctcagatgccctttctcattcttgggctgcatcgactagacaaaaatgtagcccaagaattccacctcgggctccaggtgctgcagttctcagggaggtgtcggggaactgaggaccagaccagaagtctctgtaggatgtctgatctcctctggcaggaaggccattggtgggagtgtttccactaaaaccaagagagctgaagagttgagagttgaatgaggtggggtgggaagagggggcaggacaaaagtctgagtaccaggtg

SEQ ID NO: 101466 - DNA, 344 bp, Homo sapiens
cagctcacttcaacttccgcctcccgggttctggagatattctgcttcagttttctgagtagctgggattacaggtgcccaccacgacacctggctaattttttgtatttttagtagagacaggatttcaccttgttggccaggctggtctcaaactcctgacctcaggtgatccacccgcctcagcctcccaaagtgctggtattacaggcgtgagccaccttgcctggccaaagcgtgaacatcttaagaaccagtcttgatctggcaaaaaagtagtagaatactacttttctttatttgtccctaaaaataaagtatgtacatctgttcacaaggaagaa

SEQ ID NO: 101467 - DNA, 385 bp, Homo sapiens
aagcagtgcaggctttattccaatggccgtggaattggataactgggagcatagctcgcaaatcaacttctcggctcctgagaactgggaagttacagatatagggtatctttaatgaaggtatggggcattaagaacaagcagaagaatagtcatgctttttcttggaaagggacggagattttcttggaatcaaggagagtcctcttttttgttcttttttggcatcttccgaaaaaggtgattcacggtgattgtcaagtgtcatggcaccagtgggagtgtcatttagtgtgaaaattggataataatgaagctagaggtccttcagaggtcaaataagctgcctaagaggtaacctctgaccacagacatcctgtttcct

SEQ ID NO: 101468 - DNA, 659 bp, Homo sapiens
atctgcatttgtacatttattacagctcttttcacaagggcaaagttatggaatcaacgtaagtgtgcatcagtggatgagtgaataaagaaaatgtggtatgtataccatggaacaaagccatagaaaggaacaaaactatgtcttttgcagcaacgtggatagagctggaagccattatcctaagtaaaataatgagaaacaaaatataaaatacatgttcctacttacaagtaggagctaagaaattggtatctatggaaataaacaaggaaataatagacactggggactccagaaaggagcagagtaggagagaagtgaggatttaaaaattaagtattggggataatgttcactatttaggtggtgagtatactagaagccgaaaccctagtattatgtatgtatccatgtaacaaaactgcacttgtaccccctaaatctatgcaaagaaaaaaatatataagtagaaaatacatatttctgaatccaggttggtataaaaattattaaataaacaaatgaagaaaagactaactttccatatacaagaatttaaaattttctctggagatatgttgtccttaaggagatgcagcgtaactccccaatccttaagtatgagcgtgcgtggtgacttgctttgaagaagtact

SEQ ID NO: 101469 - DNA, 572 bp, Homo sapiens
tctccttgttttacctatgaagaaactgaggctcagggaaaaaaaacggagttgtccagggtcactcaactagtggtagagccagaaccaaggtaggacttctgcagtgttctttccagtattccaggctgcttaagacgtacagggtctggcacatggtaagcccttaataagtatttgtggaaatgagttatatatagtttgtgcctctgagaaacttactgtctagttaaggtaattaaggcaaaaaacaaaactgccatgctgatcagtagtgggattgcgcctgtgaaaagccaccgcactccagcctgggctacatagcaagatccccatctcttaaaaaaaaagaaaaaaattgataagacaagctgttataaggcttgcgtatgataacattatagaatttcaaagatgagggagaattctcttcaaacatttattccacaaatatatattgagttcctgctatgtgctaaactcttttggcccctagggatacagcaaggaacaagatagaccaaatcccttccctcatgtagtgtatgttctggtggggagagatagacagc

SEQ ID NO: 101470 - DNA, 613 bp, Homo sapiens
atccttcccttctcacgaaagcctgttttcaatttcatcattctttaattcacaaatggctcacacatgtaactccagcattctgggaggtcaagactggaggactgtttgaagccaggagtttgagaccagctaaaacttgatcaagtccttcaattttgttgaaaactacagagagaaatatgcctgacttatgaaaagatgctacccagtcattgatatcactgccttctcaccaacattctgatttgtctctctggtggtgtggaaggcctctcaccacaatgtactatttgggatgtctggctaatgtgcctttctttgtaaagtggaaggtagaaaatatgaaagatcaatcgtagaatctagaaagcccccttagaaatacctatgggctttcattattttatttcacccttactgcatacaccattaactctagcactgactgtggttatttcatccatcaagtcttatctgtttggttacctgcaagttccctgaaagcaagataaaggtcttaacctcttcttaaaatcctagagcctacatctcagtgttaggtgcatgtaagactcccagcaaatgtttactgaatgaatatgtaaatatg

SEQ ID NO: 101471 - DNA, 555 bp, Homo sapiens
cactcaggctggagcgcagcggtgtgatctcagctcactgcagcctccaacctcccaggctcaagggatcctcccaccttagccttccaagtagctgggaccacaggcacctgtcaccatgcccagctaattttttgtatttttggtaaagacaaggtttcactatgttgcccaggttgatctcaaactcataagctcaggtgatctgcctgccttggcctcccaaagtgctgagattacaggtgtgagccagcacacctggccaaaaggctttatcttatttaacctaataacacatagaaataggtactgttattatccccattttgttgatgaggaaatgaaggattataaagccttatttagattaaatagttaccaagaagctgagccaggctttgaactcttgagctaatattcacagtttaatttgactaggactataagtgtggtagaaagctgaggcatctgaaggttttatgtgtcacattggaccatgagccaaattcagtttcaccagatatcaaagacccaggctaggtacaaggcccagaa

SEQ ID NO: 101472 - DNA, 307 bp, Homo sapiens
atattatgaacaccttattttgtgacagttttgtatagaaactcatctttaccaagtttttctaaatcatcccatttaatgttcatggaaacaacagctctttctttttcactctgtttcattggtttatttactgtttaagttttaaagtacagtaacattacaatggcatgaacaggcttgggaatgaatacagctgactcatagtaagcataagcattctggaaaatatccaactagcaatggggattcagtatgccctggcttcagtcagtaagccttacagagggaaggagaacttgaattc

SEQ ID NO: 101473 - DNA, 314 bp, Homo sapiens
tttacaatcattagctcctttaatcctccatctccctgtgaggtcaagaccattatgcccacctcattgcaaattaaaaagtgaggctcaggctgggcgtggtggttcacgcctgtaatcccagccctttgggaggccaaggcgggtggatcacctgaggtcgggagttcgaggccagcctaaccaacatggagaaactccgtctctactaaaaatacaaaattagctggtcgtggtggtgcatgcctgtaatcccagctactcgggaggctgaggcaggagagttgcttgcttgaacccgggaggcggaggtt

SEQ ID NO: 101474 - DNA, 423 bp, Homo sapiens
gaaaaacatctctgccacgttcccagcaatgaaatgaccacagtacactctccctcgttcttaggagcaggagaaacaccttctcctcggactcccaaaagcaaatacgacacctcaagtcctcctaacagcggggacggggaccgtggagggaaatatgttgagccctgggcatgcagcctgaccgtcacttttgcaacctgagctgaaaagaggagcagattttgaggtgttcaactccgggaaagcccagacaggttcacctggtgggcgccccagtaaggcgtctgcattctttttaaggttcatccctattaagccgggcacccaggtcaaatcttccctctttcccctaccccagactcttcgcattaaaaaaacgatgacgacacagggttttgcttagcgggctgaggttgcaac

SEQ ID NO: 101475 - DNA, 1275 bp, Homo sapiens
ttacttaaaattttaaagtttttaaaaaagtaatagtgttgtatttttttaaagggcttaaatgcttaaaaaatctagttaaacttacactcttccttggaaaactgaactttaaaacaaagaagtaaggaaataatgtcagactagctaaaggaagtaccacaaaattcaagtatgtttcttaaaagacactaacagatgtttgttcatgccttatcaatttttatttaacatttaatcctaacatgtagctatttggtttcaaaaccaaaggcagatggtagaaatggtgatttagaatggtggaagatagactgctataaatgtgttggactaacggtaagcactgatgatgaaaacaaaaggagacagaaaaactattagaactagactcaaaaattgtaaaccttaccatgagggcctctatatatcagtaagtccctaagctattgtataatccagcaaaaacatagtattaaaaattatttaccaagtcaaaagactataaagcatcaaactgaggtaaaatgtgcttattaaggaaggttgtaaaactaattacagattgggtcagaaggaaagtctagttcatttacacaaatatgaattgtacagagacattcttggacccaaagatattatttaaaatgaagctcaggccaggcacggtggatcatgggctataatcccagcactttggaaggcttaggcaggaggataacctgagctcaggaatttgagaccagcctaggcaactagtgagacactgtttctgtttctacaaaaaaatagaaaaattagccgagtgtggcagcacatgcttgtagaccctgctactcaggaggctggggtgggaggatggcttgaactcgagaggtagaggccacaattagctgtgattgtgccactgtaccacaggttgggtgacagagtgggaccctgtctcaaaagaaaagaaaaataaataaattgaatcaagaattagagctgttggatctatcaataatagaatgaaaattatgaagaaagttatcaaagggctaccctccaaaggctctggggtcatttatagaaacaagcgtattaagtcatctaaggaaggcattacacactctttatagttttacagagcataaaagaagccaggaagcttgagtttattttacatagtgagtacatttctactaatattttacaatgaaattgcacaaaatgaaaaagaagccatcctctaagtatggttgtaaaatccaaaattaaattgctgttactaag

SEQ ID NO: 101476 - DNA, 630 bp, Homo sapiens
gagaaatcaaaacaagtataaacagtaaaaacaatgctaatactattaataggctatactcagatgcaaataagtatctgtactgtatttacattatcaaagtggaaaatgagaacatgaataagaaattcaactcatgatactaaaacaacaaaacaaatatatggagaggatgtaaataatacacatataaattgagacgaagtctgactctgtcacccaggctggagtgcagtggcatgaccttggctcactgcagcctctgcctctcgggttcaagtgattctcctgcctcagcctcctgagtagcccactgccgtgcctgactaattttttttttctaaatttttagtagagatggggtttcaccatgttggtcaagctggtcttgaactcctgacctcaggtgatacacccacctcggtctcccaaagtgctgggattacaggtgtgagccaccatgcctggtcctatgtagccattttttaggggaaggtcaaaatagacttcttgaaaatttaatgaaaaagagaacaataatgttgtaatggctttccagagttagatataacttgtggtaatggcttagaaattgcagatgaaatggatgagtttctagaagaaatatag

SEQ ID NO: 101477 - DNA, 766 bp, Homo sapiens
cctgtaagaagtgcctttcacctaccgccatgattctgaggtctctccagccatgtggaactagtctcactccgtcacccaggctagagctcagtggcataatctccactcaccacaatctcccagggattcaagcaattcccctgccttggcctcctgagaagctgcagacactcaatgccagactgtgaaatcagccaggagggagactgtccctgcaaagcccaggggcagagctgcccaagaccatgggaacccaccatttgcatcagcgtgacctgaatatgagacctagagtcaaaggagatcatttcggagctttaaaatttgactgccctgctggatttcgggcttgcatggaccctataacccatttgtttggccaatttctcccatttggaatagctagatttacccaatacctgtatgcccattgcatctaggaagtaactagcttgctttcgattttacaggcttatatgtggaagggacttgacttttctcaggtgagacttcggactgtagacgtttgggttaatgctgaaaagagttaagactttgtgggacttttggaaaggcatgattggttttgaaatgtgaggacatgagatttgcgggggcgggcaggggcagaatgatatggtttggctgtgtcaccacccaaatgtcatcttgaattgtatctcccagaattcccacatgttgtgagagggtctctaggggaggtgtctaatcatgaggggcagtctttctcatgctattctca

SEQ ID NO: 101478 - DNA, 149 bp, Homo sapiens
cattcttatggggagacttgtgcccattttatggacgagtaaattgaggccgagggacgttgctgggaaaacatggaaggtgcttgggttcaacttggtgtctcaacttcagcagtggcactggctggtttctttagatttacttcaag

SEQ ID NO: 101479 - DNA, 338 bp, Homo sapiens
gtagggattgcttgaaagagaattaacagcaagaggaaaccctagtggatgaaattgaaaaaacaaaatcaagaatgtctgaagttaatgaagaattgaatcttattagaagtgaattgcagaatgctgggattgatacccatgagggaaaacgtcagcaaaagagagcagaggttctggaacaccttaaaagactgtacccagattctgtggtaatgagaatgaatagttaatttaaacaaaaaaactaagctttcctgtttgctttcaacagtatcttctcatttgggattagaaatattaccattattacaaagcaatattatttcagaccatct

SEQ ID NO: 101480 - DNA, 442 bp, Homo sapiens
gcaggtgccccacctgttaggagcctccccacactgaaaggctgcctccctcctttcccaaaaaagaaatccggagtgtattggcccttttctacagaagtccaagggaaatgactcagggagaatcctagcagaggttgaatccaatgctctgatttatactgtgtctcggtggccacctccgatggatgtgtcatctcagacctgttgcagccggagcctcaagtccaatatcagatgaagctgaacccacaattcggccaccgcctccttccagagtttcagatggccaggtgggcagaggcgggcagtgcagagaccccagacgtgccggccctgtcctccctaccttctcaagattaggaaggggtgctggaggggacaggggcagcttgggagtggtgaggaagctcctagattcggggctcatcccctggggcct

SEQ ID NO: 101481 - DNA, 1675 bp, Homo sapiens
cagctaccatatgatccagttaattctactagtgcttatatatccgaggaaaatgaaatcagaggctgggcacagtggcacacgcctgtaatcccagcactttgggaggctgaggcgggcggatcacgaggtcaggagtttgagaccagcctgaccaacatggtgaaaccccatctctactaaaaatgctaaaattagccaggtgtggtggcatgcatctgtagtcccagctactcagggggctgaggcaggggaatcacttgaacctgggaggcagaggttgcatcactgcattccaacctgggcaacagaacaagactccccgtctcccccacaaaaaaaaaaaaagaaaagaaaatgaaatcagtagcaatatctgcattcccatgttcattgcagcactattcataatagccaggatacgggatcagcctaagtgtcaacagatgaatgaataaagaaaatatgagatatatatatatatacatacatacacacacagtggaaaattataatcctgtcattgtgacaacatggatgaacctggaggacataatgttaagtgaaataggccaggcacagaaagataaatactacaggatcttacttatatgtgcaatataaaaaagttgaactcatagtagagaatagaatggtgattaccacgggctagacggggagagggaaagttggggaaatgttagtcaaagcatataaaatttcagacaggaagaataagttcaagagatctgttgtacaacatggtgactatagttaataacgatgtactatatacttgaaaattgctaagagtaggttttaagtgttcttactacaaaaaaaaatgaagtcatacatatgttaatcagctcagtttaggtattccacaacacatacatatttcaaaataatgtgcagaattacatacaatttttatcaattaaaaaacacttaaaaaaattcatacagaccacttgtaaaataacgttttgagttaaccagggaaattttattttaaatagataattagattataccaaagaattattaattttacgtgtaaaatggaattgtgattatggaaaagtcttgtttttagaaatgcatactgagctatatgggggtaatggtatataaaatctgggatttatttttaaatataaaaaataagagagtgactaaatgatgggtatatacacacttaccatactggttatctctatttttaatcatatttaagaaagaaataacagtactgtctttcactggactggcacataactgtccttaaaacgcctgccattaaaagaatattggaaacaaaaagtaaactgcctattgatttcactatgatgatctgacctggataaagaaaatgtgaaaaatcggccaggcgtgagccaccacaccagcctctttttttcttattaaagtgaaattcacataatgttaaattaacaattttaaagtatgcaattcaatggcacagtacattcacaatgttgttaaactatcaccaagcatattcatcaccccagaagaaaatcttgtacccaattagcagtcaccctcattttcccctgcccccagccccagcaaatgccaatcagcattctgtctctatggatatactttttctgtacatttcatataaacagaattatatctattgtga

SEQ ID NO: 101482 - DNA, 673 bp, Homo sapiens
cagctaccatatgatccagttaattctactagtgcttatatatccgaggaaaatgaaatcagaggctgggcacagtggcacacgcctgtaatcccagcactttgggaggctgaggcgggcggatcacgaggtcaggagtttgagaccagcctgaccaacatggtgaaaccccatctctactaaaaatgctaaaattagccaggtgtggtggcatgcatctgtagtcccagctactcagggggctgaggcaggggaatcacttgaacctgggaggcagaggttgcatcactgcattccaacctgggcaacagaacaagactccccgtctcccccacaaaaaaaaaaaaagaaaagaaaatgaaatcagtagcaatatctgcattcccatgttcattgcagcactattcataatagccaggatacgggatcagcctaagtgtcaacagatgaatgaataaagaaaatatgagatatatatatatatacatacacacacacacctggtttttaaaacaacactgtcatctaccctcatagtcattgtcaaactacactcagatttgctttttcactgattattgtgtaggtaaattctgtaaaagtgctgttacatgaagtcttatgctttgagaagcctaaaaggaaaacacatttatggaaaggtttttatacc

SEQ ID NO: 101483 - DNA, 1667 bp, Homo sapiens
cagctaccatatgatccagttaattctactagtgcttatatatccgaggaaaatgaaatcagaggctgggcacagtggcacacgcctgtaatcccagcactttgggaggctgaggcgggcggatcacgaggtcaggagtttgagaccagcctgaccaacatggtgaaaccccatctctactaaaaatgctaaaattagccaggtgtggtggcatgcatctgtagtcccagctactcagggggctgaggcaggggaatcacttgaacctgggaggcagaggttgcatcactgcattccaacctgggcaacagaacaagactccccgtctcccccacaaaaaaaaaaaaagaaaagaaaatgaaatcagtagcaatatctgcattcccatgttcattgcagcactattcataatagccaggatacgggatcagcctaagtgtcaacagatgaatgaataaagaaaatatgagatatatatatatatacatacatacacacacagtggaaaattataatcctgtcattgtgacaacatggatgaacctggaggacataatgttaagtgaaataggccaggcacagaaagataaatactacaggatcttacttatatgtgcaatataaaaaagttgaactcatagtagagaatagaatggtgattaccacgggctagacggggagagggaaagttggggaaatgttagtcaaagcatataaaatttcagacaggaagaataagttcaagagatctgttgtacaacatggtgactatagttaataacgatgtactatatacttgaaaattgctaagagtaggttttaagtgttcttactacaaaaaaaaatgaagtcatacatatgttaatcagctcagtttaggtattccacaacacatacatatttcaaaataatgtgcagaattacatacaatttttatcaattaaaaaacacttaaaaaaattcatacagaccacttgtaaaataacgttttgagttaaccagggaaattttattttaaatagataattagattataccaaagaattattaattttacgtgtaaaatggaattgtgattatggaaaagtcttgtttttagaaatgcatactgagctatatgggggtaatggtatataaaatctgggatttatttttaaatataaaaaataagagagtgactaaatgatgggtatatacacacttaccatactggttatctctatttttaatcatatttaagaaagaaataacagtactgtctttcactggactggcacataactgtccttaaaacgcctgccattaaaagaatattggaaacaaaaagtaaactgcctattgatttcactatgatgatctgacctggataaagaaaatgtgaaaaatcggccaggcacgtgggtcacgcctgtaatcctaaaactttgggaggccgaggcaggtggatcacctgaggtcaggaatccgagaccagcctggccaacatggtgaaaccccgtctctactaaaatacaaaaaaatcagccaggcatggtggcaggcgcctgtaatcccagctactcaggaggctgaggcaagagaattgcttgaacccgggaggcggaggttgcagtaagctgagattgtgcccactgcactccagcctgggcaaggagcaagactgtctt

SEQ ID NO: 101484 - DNA, 549 bp, Homo sapiens
atgacgaggtctgtttgaattctccttcacttcgggcactaggctggctgtaaatcacgaagtcaggaggagataagaaagacaaaaaatagatccaagtaaacgtgagaatttagcacgataaagagagcagaatcaattagtggaaataaggtgaattattcaataaaattatgttgggaccagatagccatatggaaaagaaaattatgttggcccaatcaatcatcatttggccacgttgtggcctgttataactccagttccacagggctccaaaggcaaccatgcagttcatctgcaactcttcacaagagcccagaaaatatcagctcttaggattagccttcaccttatgccaagacaaacacatttaaaaacaagacatactttgggatgccgaggaaggcagatcacgaggtcaggagttcaagaccagcctggctgatatggtgaaaccccatctctactaaaaatacaaaaattagccaggcgtggtggcacgcacctgtaaacccagctactcgggaggctgggacaggagaatcg

SEQ ID NO: 101485 - DNA, 157 bp, Homo sapiens
agggaagatcactaagcctctcacagagtctgtcactcaggctgcagcacagtggcacaatcacggcttactgcagccttgacttgcaggctcaggtgatccacccacttcagcctcctgagtagctgggattataggcacgtgccaccatgtctgg

SEQ ID NO: 101486 - DNA, 138 bp, Homo sapiens
ttgtcacccatagaaaattatctccccacattatctgacattctgccaaaaatgatactattttctgttactggatttgctgctatctatcctgtaagctctttcttcactgcttctcgggtttccattaattttttt

SEQ ID NO: 101487 - DNA, 340 bp, Homo sapiens
cttaagggccaaggcagagaaatgccacaggggcagaggcaccagagagtttccactaaagcaatgctcagtggtgcctagtgggccactacagagagtccccactagggtaatgtccattggatccatgggagcaggggtgaccccaagaacccagaactctagagctagggccaccagcatgtaactgtacactgggagagccacaggcacaagactctacttgggagagcttcagtatggctgtgccaagcaaagccatggcagcaaggttgcctggagccttggcaacccaacttctaccccagggtgtccagagggcaggacatggaataaagga

SEQ ID NO: 101488 - DNA, 322 bp, Homo sapiens
ctggtaacctgactgtgctgtttactaaacattaccaagcatgtcgggcgcggtggttcatgcctgtaatcccagcactttgggaggccgaggcgggcagatcacgaggtcaggagatcgagaccatcctggctaatatggtgaagccccatttctactaaaaatacaaaaaattagccaggcgtggtggtgggcacctgtagtcccagctactcaggaggctgaggcaggagaatggcgtgaacccgggaggcggagcttgcagtgagccgagatcatgccattgcactccagcctgggcaacagagtgagactccatctc

SEQ ID NO: 101489 - DNA, 803 bp, Homo sapiens
gcagactgggaacaagaagacctgcagggtcaactgacatgaggaactacttcccccttgaaaatgcaagaagaaccagtctcggcataaggtagacacctaatatagcagaggagaaggtcagaaataacagaaggtttgcatgaaattattgaatcaaagctcaccaaacatcttggtcattagttttatgagacagtaaaccacgatactatcatcagtgttttttgtttctgatatggtttggctgtgtgtccccactcaatgccagcccgtgaaagcagctgggagggaggctataccctgcaaagccacaggggcggagctgcccaagaccatgggaaaccacctcttgcatcagcatgacctggatatgagacatggagtcaaaggagatcattttggagcttaagatttgactgccctgctggatttcagacatgcatggggcctgtagcccctttgtttcagccaattcctcccatttggaatggctgtattcacccaatgcctgtattcactcaatgcctgtatccccattgtatctaggaagtaactaactcgcttttgattttacagctcataggcagaaggtatttgccttgtctcagatgagactttggactgcggacttttgagttaatgctgaaatgagttaagactttaggggactgttgggaaggcatgactgttttcgaaatgtgaggacatgagatttgggaggggtcagggtggaatgctatggtttggctctgtgtccccacccagatctcgaattgtactcccataattcccacgtgttg

SEQ ID NO: 101490 - DNA, 301 bp, Homo sapiens
agaaagagaacgtggattactcatgtcccagtaaatgtttaaaaagtccattttattgttcccatataaatatatttacaaattatcagaattttcatcatcaattgctttttcctttcaattattaactttagaaatttatataatttttggaatttatcaaaataaaaaattccaagttctgtactcatttttcggataagactatatttaaaatgtttcctgtattttatcttgtagttccctcagtgcattctttttcttctagtctcagtattttcttaccccttctgccctatat

SEQ ID NO: 101491 - DNA, 200 bp, Homo sapiens
atgttgctcaggctggccagctccgctttaattgtgggaaatgttacattgtttctttcctctttaatgtgtagcttcattccattgccctatagaattttatactaatgcattacttttatggctgaaagtgttttattgctcactttgtcatacttctctgccacacaatatatgtatgaatgaaaattaaaatattt

SEQ ID NO: 101492 - DNA, 128 bp, Homo sapiens
gaaagatttctttgtagcatgtgtgctgtttgacaacattttccctacagtacgatgtctttcaaaattggactcaatcctctcaaatcctgttgctgctttgttaacaaaatttatatattattcta

SEQ ID NO: 101493 - DNA, 484 bp, Homo sapiens
aaagatttatctgtagcttgcgatgctgtttggtacgatagcgttcacccacacaagaacttctttcaaaattgggagtgcatcctctcaaaccctgctttggttttatcaactgattttactgatattcgaagtcctttgttgtcatttcaacgatgttcacagcatctttgccagcagtagatttcatctcaagaaaccactttctgtatccacccatatgaagcaaatcctcatctgttcaagtttaatcatgagactgcagcaattcagtcagatcttcaggctccaccacttctagttatctagctatttctaccacatttgtagttacttcctccactgaagtcttgaagtcaaatcaagactcagttatctgtgaaggttggaatcaatttcttccaaactcctgttaatgctgacattttaacgtcctcccatgaagcatgatgttcttaaatggcatctagaatggtgaaccctt

SEQ ID NO: 101494 - DNA, 435 bp, Homo sapiens
tgtggactttcttttctcaagccctttcctgggcctctccttggaaacagtcattcggtcagctcaaactgtgggacacaactctttccatttataggaggcattaatgataggattgtttttaggaaacaataggaaagttcttaggtctttgtctaagacctaagaactttgtatctaagacaatgtccaattttctgtattaaccaagaaaaatttttttcttgctcaatttgtggaggttttgatttatatttaatgctgtgccaccagtcacatttggctatttaaatttattttggttaaaattaaagtaaaaattcagttccttagtcacatttcaagttctcaacactcacaaatgatgggctactgactactatgcatggtggtacagtcaaagaatatttccatcctcatagaaagttttttttt

SEQ ID NO: 101495 - DNA, 382 bp, Homo sapiens
tcctcaaggacataagagttagagaaaggcggcgaattacccactcagaacagtgccgtgaatctgaaagtcaatagccacccatataaccactggattgttagcacttaaagttgccttcgaaaaacacagttaaaaaatatactcagaagctcttgtcatccacatgccacagatgtgtgaggacatttatggtaacaacaactaacatatggatgagaatgtacagtaagtgcaggagaagcgctcagtaagtgctcgtcctgtggaaggcaggccccctttagaagtcagggcataccgacctctccaggcacatgatcctgggaagcactgctgcccttgctatgaccttcacaccctgccagtgctggtttccctg

SEQ ID NO: 101496 - DNA, 159 bp, Homo sapiens
ccctttcattggttttgaaagagctttactgcacatattatcaaacataactcagtgaacattttttgagcaccaataatgttcaagcaaataatttcaaaataacagagtattcattaagacagaagcatgccctggatgctggagaaacacttggtc

SEQ ID NO: 101497 - DNA, 367 bp, Homo sapiens
ggcatacactgacttttaacattatttagagtaaccaacctaagggaggtgacatccaagtcatgaaatcatagagtaacagaatcttggaacacaaggaacctctgggatgacctggttgtacctcctatccagcagaaggagtctaatccctagagctcaggagcttgttcatctggccccacctaaacacatctactcacaagaagctctttcccttagaggccaggctgtttctttggaaattgattttaatatctagaaactcttccttatatttgctctcttataggccttagtcacccatccaccactcctcagctggaagcagccaagaataacatcttattctaccagtgacaatcct

SEQ ID NO: 101498 - DNA, 377 bp, Homo sapiens
tacatctcttttgcccacattccaatagttagagctaaatcatatggccacacctaactgcacagaaggctgggaaatagattttagctgtgtgacttagaaggaaatgggaatcaagtctggaaattacataacactctcttgtttttgacttttttaaaattttctccctttattcccattcccaatcctatagttatttaactacataccctagtgtatttaatatatgtccttctgatctaccttctgtacagacaataaccatttataaacatgtccaaaaaaaaactacacagaactcttaggtatacttgaaagatatcataaaaatctaattacaaaagtacaagaagattactgactcccagatccat

SEQ ID NO: 101499 - DNA, 125 bp, Homo sapiens
agggaagtagggggacgataggggctgggtgggggcggtcagaggcaagtacgtgcagctggcaggggccctgcgcgggcgggggtgcgccctccccgcagttcgcgcaggtggaccggagaccc

SEQ ID NO: 101500 - DNA, 437 bp, Homo sapiens
ggcggtggagaaatagaccacatttcttgattgaagaagctgcaaaatcacattgcaaagcagtgtagatacagggtatgttgaaagttgtggccatttttgcaatgtcacagtcatagagaaaattgaagaattttaagcagggaattgatataattggattggacttatagaaacatgatttttacagaggtgtggaaaatggataaatgaggacaaatttggagggaaagagaggttagaaggataattcattaattcaattgagaaatattgtcagactgatctatggctagtgttagcgaaaaaagagaagatgaagtaattttgaatgataaaggaggtagaggcttgatgaatattcagttctgggaaataagggacccagagaagtaaagtatggctccaatattctgactttgtaaactcagaaatca

SEQ ID NO: 101501 - DNA, 382 bp, Homo sapiens
tgagacagagtcttgctctgttgcccaggctggagtgcggcggcgtgatcttggctcactgcaagctccacctcccaggttcacgccattctcctgcctcagcctcccgagtagctgggactacaggcacccgccaccacgcccggttaattttttgtactttttagtacagacagggtttcactgtgttagccaggatggtcttgatctcctgacctcgtgatccacccgccttggcctcccagagtgctgggattacaggcgtgagccaccacgcccggcctacagtatcttctttcaagttctttcaaccttgttacttaagatctaaattaagtccataatgaggcatctgagtgtagccttagactctatacagatg

SEQ ID NO: 101502 - DNA, 389 bp, Homo sapiens
cagttcactattagtcttccacatttcctcttcactatggcatctattcacctggcctcattcactgaggacttttacatgacccgttgttcctctcagtaacttcaatactgacctgttggttccttgacttcctcaactccaataatcatttcacttcagccacccaccactacgattacaccctagaccttatcactaccagtaactgttctactttcaaaatttcacttcaagcatctcattctctaacaccttacttactctagtattcccattgcaaaaatcctctggggtcagtggtatctctctaattcgctgactactttttccctatccatgaccccctcctgtttttactcaggtcctcaccttcaattcatgatctg

SEQ ID NO: 101503 - DNA, 482 bp, Homo sapiens
attttgttttgcggtgcctttccactggtctataagaaacgtgacataaggactacgtctgattcgattctgactccccagcacccaattaaatggcagccaatgtcattcttttttttggaaacaaggtcttgctctgctgcccaggctggaatgcagtggcatgatcttggctcactgcagactccacctaccaggttctagtgattctcctgcctcagcctcctgagtggctgggattgcgggcgcctaccaccacactggctaattttcgtatttttggtggagatggagtttcaccatgtgggtcaggctggtctcaaactcctgacctcaggagaatctgcctgcctcgggctcccaaaagtgtgggattataggcgtgagccactgcgcctgtccatggatccttccaaagtcttcaaatctctcccacatccgggcttcatcctcccctgcctgtctccatgcctttccggtgt

SEQ ID NO: 101504 - DNA, 213 bp, Homo sapiens
atcgggctgtgcgtgaacatgcggagcctgccctggtacgtcccggccaaccccgactccttcttcccacgctgctacagcctctgcaccgagagtgagcagcaggagttcctggaagacttccggcgcaccatggcatccagcatcctcaagtgggtggtcagccaccagagctgcagcaggagcagcagaagcaagcccagggaccagagg

SEQ ID NO: 101505 - DNA, 140 bp, Homo sapiens
gtgtcatgcaagcattttgtatgcggagcttcattgaaatctcacatcaacctgataggaagatatcatcacgcctactttatcgacaggaaaactaaaatctccaagaagggaagtgacttgaccaagggaaccgattg

SEQ ID NO: 101506 - DNA, 176 bp, Homo sapiens
tgtcttctactgaatatttgggaaatgttaatgctagtcatctaactgttaaaatcaaactcttttaccctatgtagttctcattaaatgatgttgatgattttatacaaatgtgttgacattttaccatattatgtttttaacagggtataaacttcagactatatatatatata

SEQ ID NO: 101507 - DNA, 463 bp, Homo sapiens
aacagatagctagaaagacagagaaaatagttggattgaccttttaaaaaatggtggagacatcagagcatattgagaggtggaaaggaaggagtacacagggaagggcctaggaaaaatggtaaagacaaagaaaataatgagggacacaaaacccttgcattctggaggagaaaggcaggaataaatagggcctaagatacaggtgaacaaatggctttggggacaaaaagataaccctctttctcagaaactgggagaaggatgaaaagactgagatattgatctgtggatgtaaagttatgagtaattacttgactctccaatttattttgaacctgttgtaaaatgccccagattttatagttttatcctcaggaaaatagccatagacaacctaaggtaaactgcgaatatccagccatccacaaggtatataccaaaacctggcagagacacaaca

SEQ ID NO: 101508 - DNA, 436 bp, Homo sapiens
aatggaaccctgtctagaatgccagactctctgctgaccattctctctggtcagaactggatcactttatttgatgtaaattgtatttgatttatttttttcttttttaagagatgaagtctcactatgctgcccaggctggtctcaaactcctgggctcgagtggcccttccgcctcagcgtcccaaagtgctgggattacacgtgtgagccacagcactggccataaattgtatttgatttttacagctacctgtatttagccatgtgaaagtgattttccacttatgtcagagatacaaagtttcgtttagggataaattgtaaaaaagaatataggcctgggtggtggctcatgcttttaattcccatactcagcttgagtaccggaaccaagactagtcgaggcaacatagtgaacctcatttctttaaaa

SEQ ID NO: 101509 - DNA, 446 bp, Homo sapiens
catggattgaaagactcaatattgttaatatgtaattctccctaaattgatctacagattcaatataatcccaattgaaatccaagcaagctttttttaaaaatagaaattaacaatctgattgtaaaatgtatgtgaaaacacaaaagacctatgaacaaagttggataacttacactgtgcaatttcaatacttaactaaaaagctacaataatcaagacatggaatcggccaacatacaatcatatagtccagtgggagagcatatggaaagtctacatatagacacatatggtcaattgattgttggcacaagtgccaagataattctatgggaaaggacaatcttttcaactaatcatactgggactattggatatccatatagaagaaaagaacctcaaaccttatttcacctatacacaagattgaatccaatggatca

SEQ ID NO: 101510 - DNA, 350 bp, Homo sapiens
ggcctccatgatgggcctcccaatgttcttttgccctgggacagcgtgtcctccggtggcttcctgaggaagaacagctggagggtgaaagctctggcccttgcatgcctggaatgcctctgtgccaccttcctactcacccggcagtttggcgggacacaaacttcaggagggcaatgaggcgcccttaaaactggcatggccgcaggccccatggagtctgcaggtgccctggctctcacctgtccctgcattctgaggctctgctgtttctccctaagagggtctttcttacccctggtgggtccctgcagcccagagactctgcctttggcctggggccttctgaa

SEQ ID NO: 101511 - DNA, 273 bp, Homo sapiens
tgagtcccctacctttctttggcatccctacctcctgtgagttattttgttttcttcaccttactttttttttggagtgtggttatgagaggacaagaggcttccatatctcaaaatctagccatgcagacaagcagagctggcgtggggtaaaaggccgggtaactcgagggttgctggctcagcacaattaaacatagtaccgagaacggcatccctgtttcaggtaggagtctcctgtcaccaggtgagctcaaaccaaaggtctgtttg

SEQ ID NO: 101512 - DNA, 590 bp, Homo sapiens
agggtcaggacggactagaggcgagcaatcctggtggcaccaggcgttccccgacccgcccgggtcgccagctgcacggaccctgggcagatgcgcgcagcggctgcggcacacggcggggagcggctgcttggccccatcctaaggcagcagaatgcccagagctggtccctggctccaggcgcaggccgagtaggagctgggcgggcagcggcgtcgggcaggcccttccagccgggctgacaggccgctctgacccagccatcagactccgcttgcgtcctggcagcgcggaccctagggcaactttgctgcagtggccaagccgggggcggaactgacccgtacccctgaaccgagcaagcctaggagcaggtgcgccggcggcgctgtgaagcggcactcatgacaggcaggctgggcaccgccaccccgaaacctccgagggaggaccagccagcccaggttggcgctggagctgcagcgccacctgcaggccaaggagtctttttctgggaggctggagctgcagcgccacctgcaggccaaggagtctttttctgggaggctggagctgcagcgccacctgc

SEQ ID NO: 101513 - DNA, 723 bp, Homo sapiens
tgctgggtgtatgacatgcttcagttcttcttagccggggactaaacacagtggaaagtctgtttcgggaggggatggtgagttcctgtcatcctctaactcacattaaaggacaaatgagaggggcagggtggcaggtggccatggattgttgtcccaactgacttgtatcatcatcatagaaaaacaataatacagtggtccccccttatcctcggggaatatgctccaagacccccagtagatgcctggacccatgggtagtacagaacccttcatatacatatgtttttccctagccatacactacgctaagagaaagtttaatttataaatcaagcacaggccaggtgtggtggctcacgcctgtaatcccaacactttgggaggccgaggcgggtggatcatctgaggttaggagtttgagaccagcctggccaacatggtgaaaccctgtctctactgaaaatacaaaaattagccgggcgtggtggtgcgtgcctgtagtcccagctactcgggaggctgaggcgggagaattgcttaaacccgggaggcagacgttgcagtgagccgagatcgtgccactgcactccagcccaggcaacagagcaagatccatctcagtaaataaatcaataaatcaagcaaagtaggagattaacagcaataactaaagataaaataaaatgattataacaatatgccttcattactactctt

SEQ ID NO: 101514 - DNA, 196 bp, Homo sapiens
agggggcggcggcgacagcggcggccgcaagggacgcgtccggggcccgcgctcagggggagcggtagcggcttggcagctgctccccgcgcccccgcggcctagccaggggagggggcgcagcgccggggccatggatccgcgtcaggccgctgcttcccgccggcgggcccggggcggggcggacccgtccccg

SEQ ID NO: 101515 - DNA, 755 bp, Homo sapiens
tcacggctgcgtggataaaacccaaagggaatccagaatcaagctcggcctcgcaggagtttataacttttgtacttttccctcccttgtaacgaaaagctaatcgcaaacgtttctaggaacacatttttctcctgatagacgttcccaaggtggagggcgcgagaagactggcccgtggggtgaggagccccggcccgacctcagcggcgccacaaagccatgaagaggggaaataattttccaaggggctaagagttggactttctgaagccatcgaaacctgctgctaggctctcccgctggggttttgagagaggtaggtgaggagggatcaaacatctccacccgctcttgaaagaaccgccttgagctgcgcccaacttctgcaatcccggttttccccaagttcaaggggaagggccctggcgcccaatgcccagcctccccgacaacatcctcgccagggtgcgcctgccccgcgggtccgctgtccccggcgggcggccctgggttcgaggacccggcttcccggaggcgcgactctccagcaaacaagcggagctccagaaaaaacaccgacgcgaagggggtggacagagggtgggaagccgcggggttgtcgcccacccggaggcggaatgtaacgcgctgtgggaaacgtggcaggagccctgaggcggcgtctttttcctcaggcgcccgccgagggtcccgcggaaagcctcgcgggccgccctcgcggcccgcagccc

SEQ ID NO: 101516 - DNA, 387 bp, Homo sapiens
acatcctaccacacacaggacagtccccaagacaaaggactatgtggtccagaacatcaatagtgccaaggttgagaaaccccagccttgagttttatttcatttttctagtaattcatttaattatattttttaaagtttagatctatgatgagttagaaatttaaaaacaaccctggtcctttatggactgaaagagtctgcaacctccaagcacagggtggctcaggaagctagaagaggctcagtccttggacacccatcgtcttgtagtcagttaccctattatttcatcggggaggtccctgagtgactttctgatgaactccgctctgtagccataagtagcaggaccattctttccactccttgatcagatccttattg

SEQ ID NO: 101517 - DNA, 551 bp, Homo sapiens
gaaaaacccagcgtcagggtctataattccagactcccccaaaactccttataagtggactaaaaatttttttaaaatctgcctcaacacacctttactaagagtattattttcctatattttatcttatttagttcagtcaattaaacaaaagtatagcaattaaagccaggtacagtggcttactcctataatcccaacagtttgggaggccaaagtgggaggactgcttgaggacaacagttcaagacaatccagggtgacacagtgggaccctgtctccaccaaaatatatacacacacatatacatacacacacacacacacacacacaaacacacatatacatacacacgataggccaggtgcagtggctcatgcctataatcccagccatttggtaggctgaggcaggaggactgtttgagcccagaagttcaaggtcagcctgggcaacataacaagactccatctctacaaaaagaaaaaacaactttagccaggcaaggtggtacatgcctgtagtcccagctacttgggagaaggggtag

SEQ ID NO: 101518 - DNA, 155 bp, Homo sapiens
ccttcagctgctgcccctgcccgggctgggcgcgccttgctgtcctcctggctctgacaccaagtcatttggagttcacttgttttccctcgaccccccgctcttcatctgaaaagggatcagcacagattccatggttctctgacctgaagcag

SEQ ID NO: 101519 - DNA, 410 bp, Homo sapiens
ctctggattttcaggacttatctcaagtaaggtacttgttgactgaatgctctgcttgattttaataacaataaatttctcttggtggtagatgatcaagtgattgatcgtaactaccttctacctgggtaaatatgcctttcttaagctcagacacgatgttcagttggtgtgtttcagacctctctacctttgtgcatgaggcagatactgcagaaccccttcaattcagttaatgtgtattttaaggtgacttggacttagataatcgtccatagcatccttttattttactcattatttgtctgttaccaaccgaaagtttcttggaattgttcaagaattattctggaaattacatgttgatatttaatataaacatgttttaaactttagtcttttctttaaaa

SEQ ID NO: 101520 - DNA, 367 bp, Homo sapiens
gatcatttcaaaaatctgcaagtaatttggttgctcagagctaaggacacattcagtcatcgggaagcttcagtcttagagaaaccctcacaagcaagcccactgtaactcacttcatgagaccaggcagccacttagattttagcaacagaggacagtgtttattcattgtattccagggaggagacttgctttatctaacaagctgagtaggtcaacttttcttattgactgtctcccagctctttgctgcatctccgtctggtggcccctgctgcctgggctactccaccttattccaccttattcttcaaagtgcttcctgaactccagttacctacctacctggcccctcccccccattaat

SEQ ID NO: 101521 - DNA, 251 bp, Homo sapiens
agccacagatgggaccatctagttgcaggaaaccacctcagggctcccacggactctaccttatggttttccagttaataatgtggaccaaaaaagcacaactggaccaatatataaaataaacacactcctttactacaacaattcgggaaactaaattttcaatgatggaaggaatggttatatggttaaaaccaaatgctaatgttggatacatttattaattcaataaatgaatattcatttattta

SEQ ID NO: 101522 - DNA, 473 bp, Homo sapiens
caacattgtaacttccatatcaagtgtaataaagttctcatttcaggacacatttccacatttctaaagaaagtgacaataaaacatcaacagttcttggatgttgaaacatagccaaaagtgagaccatcaggagaagggcctaagaagaactagattaacaggaagaaggtgaaaaagtgataataaatcttttaatcctgccacctacacaggcgattctccacctaccagaggtgagagcatatcttactaggtcactaacagcagcaaagtctctgaagaaggttttccagttaataatgtggaccaaaaaagcacaactggaccaatatataaaataaacacactcctttactacaacaattcgggaaactaaattttcaatgatggaaggaatggttatatggttaaaaccaaatgctaatgttggatacatttattaattcaataaatgaatattcatttattta

SEQ ID NO: 101523 - DNA, 317 bp, Homo sapiens
tgtaggtctatgaacttacaaacgtactcccaaggatagtcaaaatctccctgcaagtatgcatcaaagaagagttgtaatgtctggcggcgaagttcaaggggaaaggtggaaataactgagaggatttggttttccagttaataatgtggaccaaaaaagcacaactggaccaatatataaaataaacacactcctttactacaacaattcgggaaactaaattttcaatgatggaaggaatggttatatggttaaaaccaaatgctaatgttggatacatttattaattcaataaatgaatattcatttattta

SEQ ID NO: 101524 - DNA, 238 bp, Homo sapiens
aatttgcaaatggctatgaaggttataaggacatgttacggcgatgagctaggttttccagttaataatgtggaccaaaaaagcacaactggaccaatatataaaataaacacactcctttactacaacaattcgggaaactaaattttcaatgatggaaggaatggttatatggttaaaaccaaatgctaatgttggatacatttattaattcaataaatgaatattcatttattta

SEQ ID NO: 101525 - DNA, 764 bp, Homo sapiens
tcatctcaaatgactttattagcccaaaaaagtacaaaaattattttccccacataatattaatggtgggaatcaaaatgaatcagtagatgggggatccagattggaatgctgctacaccatagtagaatccttctgggaacctacggtgggaaaggatcacttgtagcaaaaagatccagagttgtgcagagggaccacgtcagcagtgatcacttttcagtaaccgtctttttctgctgatcattttagggtcactatgaggtcagactggatggtgggagtggataccaattttttttttactgcctacatatgcttcatgagctataatttgtctttttttccaccacagatctctgtttcttttccttactttcatgcccataatttatcttacagatgtggtttaatgctttgctgatttgacatagctttcttttccatttcattgattgctacttaaagatgcacaaggctttcagggcctcacatgaatgatgagatgagatccaacgtcaagaatctgaagcaaagacacttgtggtttcaggacgtgtaaatagagcttggtgattttctgttgagtttgttgggggaatgcataatgattaggattaggtgtttttctattttaaaaagctgcttctagaggcatagaagacaattctgatacactatttaaattttccatacaaatccaggcatgtttatgcaaaagaaaaaaaacaccagtacaaaacaaacaagatatgatctgactg

SEQ ID NO: 101526 - DNA, 341 bp, Homo sapiens
tcaatgtgatcaagtcccacgttggaagtgctttcaaccatattattgtaccatgaaagggagacgggcttcagagataagatctttgaactctgcccctacctggctgtgtgatcttgaggtagtcactcaccctctctgggcctcagtttcctggttgaattacatcatcaatgcttgacctctgtgctgcacacatgggtattgatatggtgctatcgtgatacagtgctatatgatagcgtgccacaagtcggtgctacttatatttggcaaatgatttggtttttcctagtataaatctgagcagattcaacatcataaaatcaggtaagcccact

SEQ ID NO: 101527 - DNA, 1191 bp, Homo sapiens
agtgtttcagaggtcctaattaatatgataagaaaatagattttcatttttagcattatggctgatgactagatgttcagataaatcttattggtacctcatgctttaaaaatctggataagccttcaagaacatatttttgtatgggatggctaaactggtgtgaaaaggaaggaaattcttctgattccaagaacaagaaggaagtataaatctagtgggataagtgctaattcctaataacctatcattcctaatggcctatagcctgaagtttaaagggtcacacatacagggtcaggagacaaatcttgggtagagtctgagcaagaaagagggttggattcgagccccctgaatagagccatggtcttgaaagggcaactctttcaatgagtacaaaatttgtcccacagaaagaggcaataaggataaattatcttagccttggatgtgaacagaacaattaaaaagaagtctgcttcagataactcctcatcaaaagtctatactcacacagatttaaggctaggattcacagtacttatgtgactttaaaaaatctaaattgaaattttagttacaagttgtcccaggtcactagtgccccaagacagaagcaaacatatgtccttcttttaaagaggaaggaactctaaactcagaccacaaagaactcccagagttaaaattccaaggaatatgacctcaaaattagaaatcaccaaagacatgagcgtaagccaccatgagcactgtcaacagaaacaataatctgtagattcatcccacaaatactataaatattagaaactgttgagctatagactgggtatggtggctcatacctgtagccccagcactttgggaagccaaggtgggaggattgcttgagcccaggagttcgagactagcatgggcaatatggtgagaccccacctctatttaaaaaaaaaaaagaaaaagaaaaaaagtgttcagttatagaatataaaatgagtatgtttaatatgtcaaaataaatgtttttaaagacttaaaaatgataaaagaacaagaaactattaagactggaaggtagatatgaaaaacaaccaaatagaacttctagaaatgaaaaagtgtgaataataatgaaactagaaacctcaatggattagacacagctaaagaaggaattaatgaaccaga

SEQ ID NO: 101528 - DNA, 765 bp, Homo sapiens
gaaaacaagataaaagctccatgacattggtctgggcaatggttttttaaatatgatccccaaaagcacagacaacaaaagcaaaaatagacaaataatattatatcaaactaaaaagcttcacagcaaaggaaacaacagtgaagagacaacctggaaaaaatatttgcaagccacacattctgataagggtttaatatccaaaatatacaagtcaatagcaagaaaaccaagaacccaattaaaagctaggcaaaggacctgaatagacttttctcaaaaaaaagacatacaaatggtcaacatgtatatgaaaaagtgctcgacattattaaccatcagggaaatgaaagttaaaacctcaatgagatattacctcacacatggcagaatggctattatcaaagatggcagggcacagtggctgatgcctgtaatcccaacactttcggaggcctaagcagaaggatcgcttgaacccaggagttcgaaaccatcctgggcaacagagtgagtctccacaaaaaataaaaattaaccaggtatggtggcgtgcacctgtagacccagtgacttgggaggctgaggcaggaagatcacttgagcccaggagtttgaggctgcagtgagctgtgattgcaccactgcactccagcctgggtgacaaagtgaaaccatgtctcaaaaaaaaaaaaaaaatgcacaaaagttaaggtgttggcaaggaagtggagaagagggtacccttgcacactgttggtggga

SEQ ID NO: 101529 - DNA, 374 bp, Homo sapiens
aggatcatttggacaatatgggattttattagaaaagttcctatagtaggacatttgttcctaatccttttaagttagactgaagcagttttctaagttactatggaaaaataggtttctgccgggagcagtggctcacacctataatcccaacactttgggaggcagaggtaggagcccaggagttccagaccggcctgggcaacagagcgagaccctgtctctaccaaaaattcaaaaattagccaggcatggcagtgtacatctgtaatctcagcaacttgggaggctgagatgggaggattacttgagcccaggaggttgaggctgcagtgagccaaggtcgtgccactgcactccaacctgggtgacag

SEQ ID NO: 101530 - DNA, 351 bp, Homo sapiens
gcggccgcctactactactaaattcgcggccgcgtcgatgattgtggcattttgctctaaatattgtttcctccctgatttagaaagtaatttaaaatgtacatagaaacataaaccaaaaaagaatattttgtcgctttgaatatgaaaagtgatattgatatactattattgctgtactgtgatggagtatatcacaggttatggaggttatttcaatattgaaaaaatgctagttgagtatacatacattcctgcaccattgttaataaattatattctttttgatgtgttgcttagcttcttgggaccctttactcactagacttttattgacagctgtgttccaaa

SEQ ID NO: 101531 - DNA, 398 bp, Homo sapiens
ataggaaaggttgtcaagcataaatggttggggtaagaccactctgcatggtcacacattcaaagagcttgacaagagctatgcttgtgactgatcctatggaacattttaaagcaggatcttggtgtcttctctacccacacctccacagctctcctttggaggctcaccatgcccctagaggacttcacatggactcccctctctctaagcccacatcagctaaccctttcccgtggacctcccctttcataaaatgaacctgtcctgactctcatcctggaggggtgaatttgcatttccagggaagttttctggaactatgaaaaccttaccttcaaagccccatagcctcgtggaaaggcaggaaccttcctagggatgcttttttggcatcc

SEQ ID NO: 101532 - DNA, 428 bp, Homo sapiens
tctcctgtccatatcagtggtgatagagaaagtagattccatgctgaggagactgggacagtggatatgggtgaggggtggagaggagagagggtggccatcagggagagtggtggggtggaagagatttagggctgaagaaatgaagaataccatttggagctttgtttactttgatctttctgtgcaagagtagacacccagttggccattggagatggaagcctagagttaggtacaagatttaagttggagatataatttgggggtcatcgacatatatatgatacgtggttccagaatctcaatctccaggcttctttcagttcactctctcaggcttggtgctcaccctccccaaatcagggcatacaggaacttctgaatctcctgtaaaccatgcacaggtcatgaagaactaggagcac

SEQ ID NO: 101533 - DNA, 625 bp, Homo sapiens
ctcacgggtaagaaaggggtttccattattttattttattttgcattagtctttttatgcatatccttgtatgtttaaagaccatttgcattctattttctgttaactgtctgttcacatccttttgcctattcttcgggttcttctcatagtttaaaattcttcatatatagggctacaattagccctctgtgataaatgctgcaaatattttcagctatccaaaaaaatcttttttcttctctgtcacccaggctggagtgcagtggcttactgcatcctcaaactcctgggctcacagtcctcctacctcagcctcccaagtaggtggaacccaggccaggtacttaatttttttttttttttttttttggtagagccagtcctactaggttgcccaggttggttttgaattcctggtctcaagcagtccttctgcctcagcctcccaaaatgctgggattacagctgtaagccaccgtgcccaaccagaaatatattttatttatcatacatttattcaacaaatattttaaaatgctgtttaataagctagagaatattctaggtgctgaaaatgtagcagtgaccaaaacagaaaaaaaaataaccatctcattatgaa

SEQ ID NO: 101534 - DNA, 253 bp, Homo sapiens
ccattttacagaagaagaaaggaagaccctgagagataaagtaacatgttcactgtcatagaattagtgagtgacaaagtcaggatttgagcccagatctgctcagttccaaatcatctgccctattgtggatggcagatacctggtgctcctgcttttgttcctcatgccctgtgctcttggcagaaattagggcttcatgattcttaccagcttagcacttcagtagcctataccagttgattagagttgg

SEQ ID NO: 101535 - DNA, 526 bp, Homo sapiens
ctgtggagagcgtccagtggacatgggggcctataacacctgaggctgctgggcctcctctgggaggaccccaggccctggaggacaaatagaagttgtcagtggaaggagggaagatgacagggaggcaggatagtcacatggggctggaaaggagaagtcgcccagagcatttgagccagaaaggcctcaatcaccaggaaggaaagctgagccttggtgggaaggagtgcaggacgaatgtgaccagaggtgcccctgggaagatattctgagcgcctggaacagaggctggcttggctgatgggcaggactgggtcagggaatgtgtgacaagccatcagggtgagagaccaggtggctggattagaagtgtcacctggtcatctgggcatggtggctcacgcttgtaatcccagcactttgaggggctgaggcaggcggaggatctcttgaggccaggggttcaagacaagcctggccaacatggtgaaactctgtctttattaaaaatacaaaaattaac

SEQ ID NO: 101536 - DNA, 403 bp, Homo sapiens
ggcagccgagttcaatgagggatgagttggtcatcacgggagagggagagacatgcgaggcatcacctacccacttgcctgctgcttttcctagcagggactgtgcctgaaaaagcctcccctgccaagcttcagatcaccacggttgcaccggaagctgagagcttgcccaacgcctcccactactcaagggtcagtcactcactatagtgactgagtgcatggcctggacagcaacctgctcagttttccaacaacctgtgatggttgcaatggtcacattcatcttacagctgagaaaagtggggcttcagaagggaggggacttgtccagggtcacatggctaaaaagcagcttctcgggggcctccaactgcatggccctctaaggcccactcctttc

SEQ ID NO: 101537 - DNA, 602 bp, Homo sapiens
ggggaaaaatctcaccaaaatctcttggatgcagcaaaagcagtgttaagaggaaagtttgtagtcctaactgcctttgtcaagacagaaagatctcaaattagcaatgtaactttgtacctaaaggaactagaaaaaaagagcaaataaactccaaagctagcagaagaaaataaataactaaaattagaaaagaacttaatgaaattgagacgtaaaaatctataaaaagatcaacgtaaccaagaattggtttttcaaataaataaataagattgatatgcctcctagctatatgaacaaagagaaagaaagagaagacccaagtaaagcccgatcagaaatgacaaaggtgatattataactgaccccacaaatacatcctcagaacccaaatatactcagagatgactgtggacaactatgcacataaattagaatatctagaggaaatgggtaaattcctggaagcacacaatctcccaagattgaatgaggaagagattgaaaccctgaatagaccagtatcaacttctgaaactgaatcagtaataaagaacctgctaaccataacgaaagccctggttcaggtgaatttacag

SEQ ID NO: 101538 - DNA, 908 bp, Homo sapiens
  misc_feature (287)..(287): n is a, c, g, or t
  misc_feature (366)..(366): n is a, c, g, or t
  misc_feature (441)..(441): n is a, c, g, or t
  misc_feature (474)..(474): n is a, c, g, or t
agtcgctgtggcactcagtcctacggcctccgaggctgggtagtcagtgtgtcgctggccttagccagactccacaggccacgctggctgcgaatggagccgaggactcgcgcggaggcgagatgctaccagccggcgagatcggcgcctctcctgcagccccgtgctgctctgaaagtggtgacgaaaggaagaacctcgaggagaaaagtgacataaatgttacagttcttattggaagtaaacaagtcagtgaaggtacttacaatttcatcagaaattcctanaagaattcgaagtgccttaaaaaatgcagaagaatcaaagcaatttcttaatcagtttctggagcaggaaactcatctnttcagcgccattaacagccatttgctgactgcgcaaccttggatggacgatcttggaaccatgattagccagatngaagagatcgaacgtcatcttgcttaccttaantggatttcacaaattgaagaactaagtgataacattcagcaatatctgatgaccaataatgtaccggaggcagcctccactctagtgtctatggcagaacttgacattaaacttcaggaatcatcttgtactcatcttcttggtttcatgagagccacagttaaattctggcataaaattctcaaggacaagcttacaagtgattttgaggaaattttagcacagcttcattggccattcatcgcaccccctcaatcacaaactgttggcttaagtcgacctgccagtgccccggagatatacagttacctggagacactgttttgtcagcttttgaaactacaaacctcgtcagagatgaattacttactgagccaaagcaactcccagaaaaatactctcttcctgcctccccttctgtcatcctgcccatc

SEQ ID NO: 101539 - DNA, 1045 bp, Homo sapiens
  misc_feature (424)..(424): n is a, c, g, or t
  misc_feature (503)..(503): n is a, c, g, or t
  misc_feature (578)..(578): n is a, c, g, or t
  misc_feature (611)..(611): n is a, c, g, or t
agtcgctgtggcactcagtcctacggcctccgaggctgggtagtcagtgtgtcgctggccttagccagactccacaggccacgctggctgcgaatggagccgaggactcgcgcggaggcgagatgctaccagccggcgagatcggcgcctctcctgcagccccgtgctgctctgaaagtggtgacgaaaggaagaacctcgaggagaaaagtgacataaatgttacagttcttattggaagtaaacaagtcagtgaaggtacagataatggtgatctcccttcttatgtgtctgcattcatagaaaaggaagtcggaaatgaccttaaatctttaaagaaacttgataaactcatagaacagaggacagtaagtaaaatgcagttagaagaacaggtacttacaatttcatcagaaattcctanaagaattcgaagtgccttaaaaaatgcagaagaatcaaagcaatttcttaatcagtttctggagcaggaaactcatctnttcagcgccattaacagccatttgctgactgcgcaaccttggatggacgatcttggaaccatgattagccagatngaagagatcgaacgtcatcttgcttaccttaantggatttcacaaattgaagaactaagtgataacattcagcaatatctgatgaccaataatgtaccggaggcagcctccactctagtgtctatggcagaacttgacattaaacttcaggaatcatcttgtactcatcttcttggtttcatgagagccacagttaaattctggcataaaattctcaaggacaagcttacaagtgattttgaggaaattttagcacagcttcattggccattcatcgcaccccctcaatcacaaactgttggcttaagtcgacctgccagtgccccggagatatacagttacctggagacactgttttgtcagcttttgaaactacaaacctcgtcagagatgaattacttactgagccaaagcaactcccagaaaaatactctcttcctgcctccccttctgtcatcctgcccatc

SEQ ID NO: 101540 - DNA, 546 bp, Homo sapiens
aaaagggaggtgccacacacttttaaacgaccagatctcaactcactatcccaagaatagcaccaaggtgatggtgctaaaccattcaagagaaactgcccccatgatccaatcgcctcctaccaggtcctacctccaacattgggaattataattctacatgagacttggtggggacacagatccaaaccacgtcacactctgacccagaaggctcagtgtgtttcagctttggattcccaagtagagatccagtgttttcacttccagaatgcttttatacttgattacacactgtttccatgcctttgcttgacttcctatcataacgatagccctttatctggtattcacgtatcaagcttcccctttgctttgccagtacatttgcagcgtcttcaatccctgagtggagagagaaaggtttgaaagtggagactgcggtgatgatgaagatgagtgcattggaggctctggtgatggaatgataaaagtgaagaatcagctccgcttccttgcagaactggcctatgatctggatgtgga

SEQ ID NO: 101541 - DNA, 433 bp, Homo sapiens
agggagctcagtggcctctcaattcccaaagcacattctgtcacttctactcaactggcccttctcttattaatgcctggtattgttaggtatgtctttatatatatttgtcatctgccctcaagtagttttgaggacaaaaacaaatgggtttaaaacttccttacaccattccctccatgacaccaagcacagtgctatcacacagtggatgcttaataaattcattaatttagtctgcgtaaattcattgagtggctacaatctgacaaaaattctgtaaggcaggccaggtgcagtggctcccgcttgtaatcccagcactttgtgaggccgaggcaggcagatcacctgaggtcagaagtttgagaccagcctggccaacatggtgaaactccatctctactaaaaatacaaaaattagccgggtgtt

SEQ ID NO: 101542 - DNA, 1428 bp, Homo sapiens
atttaaaacactctatcctgaaagagtccactgcttccaagtgagaaaagccaaggagtcccctgcgttgggggtgtaataacctagactagagcttatagactgaagcccatgtgcttctccatgctcaaacgcagaactaaaaatgggtataaagtcagaaaattgcagaatataagtctgtgtttcaaaaagcaatcaggaaaaaacaaacaaaaaacttgttttagaatacaaatgcaagaaaagttcaatttcaacagcagaaagatggcctggggcagtgagatgctttccttagctgtacttgaagttttatggaacgccatttaaattcagacatcaagggaatgaatgcagttttaaaaatccgaattatttctggagtctacaatgtcagtgttagaactaatgctgggttgttttgttttttcatttgcttgcactggaaggccttgaaaacacacaggagtgtagagtatcgtcagctctgatgctcagtttcttcctggcaatagaatggttttatctgtgccccaagcttttgccaatttaaactctaaactaaattttcaatgacaccagcatgtttgctttaaatttagcaatagaataggcaatggactgctttgcatttccttagtttttcattctgaaacagagcaaaacatcttcccaaagagatggagacaatctcttctgggtagattccaagtataacctgtcccagggtcctcttgctcagctgtgactaacaaaagtctgttcaatttaactacttagataagaagcgcaatgcttttatttaaaaatttaatattttctatggggctgtattttccaaataatagcaacaaaactgtcctaacgttttcactgttctgtaattttgttttaatatagaggatacccataatttcttaacactggaaacatcattctgaacgatgtaggaagcggtcagtaacgtgaatgatgttattgtaccgtctccagctttttccttcttcccccagatggtcgcacctgtgcatacatccctgtgcatgtgggggcacatgagtgggaaagtgggtgtcactcctattttctgtcctagagtgtcagcgttggaagggatttttttttgttcctccagtccggccctctagttgatagtccagtagtctgttaacaatttgtaaggacctgggttatattttaaaggtggttgttgttgttgtttgggttcacttatgtatatgcagcttgactgttcaacccagatttttaaacaataaaaagatttaatgtcaccacaacaccaaaacaaccaaaacaaaacaacaaagagaaaaagacaagaggagggcgacacacaacgcaaccagacagaagagacgaagaccaaacagacacaaaagaacaaacgagaacgcaaaagaggaa

SEQ ID NO: 101543 - DNA, 442 bp, Homo sapiens
ggctgctgatgggcgaggagaccctgtgcccttctccctgggccccggaggatgagggcagaaagtgagggttgttgggtgatgggggcaaactgatgtgctgtgggcttttcacagcccccagcggtgaatgctgaggggaacactgggggctgagaaatgtggaagaaagtacattggtttgatctgaggactccacacaatgagcatttccaagaggctggagttgagcagcttcacaagccggtgggtgacactctgagctgctgctttgtcttttcacaggtacttgggatgcaaaaggacagctggagacagcctcttcctgcttgatggaggcagccaggaaaggcagcggcttcttctctgaacagttattccttttctgcttctgaagctgcatcctcagctcctccacctgcctctgctcttgctggagttt

SEQ ID NO: 101544 - DNA, 498 bp, Homo sapiens
gcggaacttgcaatgagccgagatcgagccactgcactccagcctgggcgacagagcgagactccgtctcaaaaaaaaacaaagaaaacatgtaactatgggaaaataatagtggcattatgggctgggcgcagtggctcacgcctgtaatcccagcactgtgggaggctgaggcgggtggatcactggaggttaggagtttgagaccagcttggccaacatgataaaaccccatctctactaaaaatataaaaaattagctgtgcgtggtggcgggtgcctgtaattctagctactcaggaggctgaggcaggagaatcacttgaacctggaaggcggaggttgcaatgagctaatatcgagccactgcactccagcctgggcaaaagagtgagaccttgtcttaaaaagaatggtggcattataaggttcctgggtgcctaggggcccgaggagggaggaggggctgcccccagctggaaggaggagcagggaagg

SEQ ID NO: 101545 - DNA, 255 bp, Homo sapiens
gtttcactctttcacccacgctagagtgaagtgttatgatctcggctcactgaaacctctgcccccccaagttcaagcaatcctcctgcctcaacctccccttatcagaaaaaaaaattgatgaactatttcataagccacccctgttgaagagtcattagaaggattcctgaacactgactaccaatttacttaaaatacttaaaaagatgtaacgcggccgggcactcatgcctgtaatcccagcattttggg

SEQ ID NO: 101546 - DNA, 209 bp, Homo sapiens
aaagtatgcagcctgtttgggtatggtgacagaatcgaggcagggacggcctgacatgtgtttattggtgagcagtcttgtgtctcttccattgacatgtaactctcatgagagcaaggactattacctctttagttcatttgtcttacccagcacttagaagagcgactggcctggcacacggtaggttctttttttttttttttttt

SEQ ID NO: 101547 - DNA, 432 bp, Homo sapiens
tgagacaggttttgttgtgtcagccaggctggagtgcagaggtgcaatctcggctcactgaaatctctgcctcttaggttcacgcgacttgtgcctcagcctccagagcagctgggattccaggcgcccaccaccacaccaaaccactttttgtatttttagtagacatggggtttcaccatgttggccagactggcctcaaactcccgacctcaagtgatccgtctgtctcggtctcccaaagtgctgggattacaggcatgagccactgcacctggccaactttttattcttcttctagttctcaggttgtcctaggcagatttttagtgccgttacaaaaaccatcctttccccttctccatgttccatttatcttcctggtttagaaaaaagtgtcttccccttgtttctccaccgcaaaatgtacac

SEQ ID NO: 101548 - DNA, 811 bp, Homo sapiens
agccggattgaaagagagccaggcccttgagggggagggggctgccaagatggcgtcggcctcctccgggccgttgtcttcggtcggtttttctccgttgatcccgcggtcccttcctgtacctcgtcctcagcatctggaatcaagagtcccatggcatctgaggtgccttatgcctctggcatgcccatcaagaaaataggccatagaagtgttgattcctcaggagggacaacctcatcagccttgaaaggtgccatccagttaggcattacccacactgtggggagcctgagtaccaaaccagagagtgatgtcctcatgcaagatttccacatggtggagagtatcttctttcccagtgaagggagcaacctgacccctgctcatcactacaatgcctttcgtttcaagacctatgcacctgttgccttccgctacttctgggagctatttggtatccggcccgatgattacttgtattccctctgcagtgagccgctgattgaactctgtagctctggagctagtggttccctgttctatgtgtccagcgacgatgagttcattgttaagacagtccgacataaagaagcggagtttctgcagaagctgcttccaggatactacataaacctcaaccagaaccctcggactttgctgcctaaattctatggactgtactgtgtgcagacaggtggcaagaacattcggattgtggtgatgaacaatcttttaccaagatcggtaaaaatgcatatcaaatatgacctcaaaggctcaacctacaggcggcgggcttcccagaaag

SEQ ID NO: 101549 - DNA, 490 bp, Homo sapiens
tcacatttttttttaattctaaggctttgaaacccaatttgtattttacatttaaagcatgtctcaattcagactagtacatttcagctccatggctggtggctactatattagaaagcagatttgtctaaagcaaaggcatagctcaaatcatttctctgggaacctcccaatttattcctcataattctcctcatattagtaacaattcaaaattagtaataatgtggcaaaacatttgtacttcaaaaaatattgcaccataatggttaaagaaattggttctgtggtgtcaaactttagagtctgaatcttgaatcagcatctaactttacagacctggattcacttagcctcagtattctcaaatagtggagttatctacttcactgtggttgaaaggattaaatgggaaattcgagtaaggcacctacaaagtctggtaagtagtctgggtactcaatgaaaattagttacagttgctagaggt

SEQ ID NO: 101550 - DNA, 446 bp, Homo sapiens
gtcgactactaatatgaggagaattcagactagtacatttcagctccatggctggtggctactatattagaaagcagatttgtctaaagcaaaggcatagctcaaatcatttctctgggaacctcccaatttattcctcataattctcctcatattagtaacaattcaaaattagtaataatgtggcaaaacatttgtacttcaaaaaatattgcaccataatggttaaagaaattggttctgtggtgtcaaactttagagtctgaatcttgaatcagcatctaactttacagacctggattcacttagcctcagtattctcaaatagtggagttatctacttcactgtggttgaaaggattaaatgggaaattcgagtaaggcacctacaaagtctggtaagtagtctgggtactcaatgaaaattagttacagttgctagaggt

SEQ ID NO: 101551 - DNA, 555 bp, Homo sapiens
cagagtctagcatacagaagatgtaaagccacattctgtgaaggtaagtagatgtgtttacctcttttgcactgtactggtgcattatggggtaaatgtgtattacttttccttgtattgcttagcacagagttttgcctatagcaggcaccagactgtgggcttggtagtacatgactattggtgattacagatcaaaaaggacttgaaatgatcagtttaaggtcttgatgggtattgaagactcaaaggatgatggcaccctgggagtgatccacagaaggacagattatttgaagatgttaataactaaagacaacatggatgttaaatgatgaaaaaaagttggatggaaaataaaccattggatctgcctctggagtccaagaagaatattattcttcctacctcccccttactctggctcttcctattgtagccacatgggtcagtaatgccattgaaaaacacaattttagactaagtggggtcgcagaaattttggtctatcttaaattgatgacatcttattaaagaatttattgtataaaaaaa

SEQ ID NO: 101552 - DNA, 297 bp, Homo sapiens
ggcagaggtaacagcagagatgagacagcatgatgccttcagggaccatgtagcttgtaaatggattttaatcttttgtcgtaaagacaataaagagcccctggaaggttttatttggtttaaagatctatctacctttattgtttttttttttctctgatgacaaatcatatatgctcattataaaaagcaatgaacacattacaaatatatatatttatctagatacatatgtgtgtgggtatgtgtgtgtatatatataagtgtatatatataaagtaaagcatatatatctat

SEQ ID NO: 101553 - DNA, 151 bp, Homo sapiens
tcatttaattttttcgccacttggttctgtgatgctgtggcttagtaggcctgtctctgttctcagcccctttgcacacttcctagtctttgaggcttttcccaaagttcaacccttaagccactctctgtagcttttcagactgttttac

SEQ ID NO: 101554 - DNA, 1057 bp, Homo sapiens
aattacttctgcactaacctaatatatctcttgtcacagactaaggttctccttgccactgactaatgtaagaattggaaactcacatgtcgtgctcatagatttacttaattcaacaaacttctttttgttttactacagtatggcactgctataggaataaggaaataaaaacaaataattcctagttcaagctcttgagaaactagtgtgatgcaacctcaaggaatgcagcaagtcatacctgtcattaatgtcagtgaataatatgtgtatagatctctatctcaaagttctaaataaaaattaagtgctactcatttattcataaggtacacacacatgcatgctcatgtgccacatacatacatacacacacacacacacagtggacaaaatttgagaaaaaaagaaattcatactctgataaagggtgttcatagggacctattttaaatttggtaatcagggaaaagaaatccctaatgaggtgacacatatctgaaacaaaaagggtaagtatggattaggcaagtgaaaagctggagataagagtatgctaggtaatgtttaaaagcttagagacagaaaagggcaatgtatgttcaaagaccacgaggtaaaagtgatgtgagctgaggctggaaatgaaggcagggtcagacctcagagggcatgtcctcttcttgcaggtttgcattgcctggacacatgctttccgccacacgtatatatggacgatccttaaaatttgttaacaaatgactggagttagcctgtttgctttgagttatttgatgagcatgtttgatattgttccctgtcttccttatttccctcttagatctgagacttgttattagagaaataggatagtaaattaagtttcgagtactctattatgttacagatatttgcttgtccaatgagaaatccttaaaatatggccttttctgtatttatagattgtctttcattaacaataaggcacaaaggcatcgcagaaacgatgggaaaatgtgatgaagagcatcccaagagctgaaaatgcattggc

SEQ ID NO: 101555 - DNA, 975 bp, Homo sapiens
atagaaagataagatggttttggtgtcaagttcaccaaaccctcaacaggtgcaatttgtttccacagagcaaaaaaagaaaacattgctagtatagccttgataccgaaaataggtgtatacaagaaattatataggcaaattttactcatgatcatagatacaaaaaatcctaaacaaaattgttggccaggcgcagtggctcacgcctgtaatcccagcactttgggaggccaaggcaggcgaatcacttgatgttaggagtttgagaccagcctggccaacatggtgaaaccccgactctactaataatacaaaaaatagctgggcatggtgggcacacacctgtaatcccagctacttgggaggctgagacaggagaatcgctggaacccaggaggtggaggttgcagtgagccaagattgtaccactgcactccagcctggctgacagagcgagactccatctcaaacaaaaaaaaagttagcaaacaaatcctacctatgtattaaaaaaattatgacttagaagacaacagaagagaaaatagacaaattggattcaataaaatttcagaactattgtacatcaaaggacactatcaacagagtaaaaaggcaaccaacagaatgggggaggacatttggaaatcacatatctgataagggactaatatctaatatatataaaaactaaaacacaacaacaaaaaacaacctattggatttgaatagacatttcttcaaagatatacaaacttaaatgttcattgatggataaagaaaatatgtatacatacaatgagatgttactcaaccttaaaaaggaataaaattttgatacatgctataacatggatgaaccttgcgattattatgctaactaagccagacacaaaggacaaatatcctatgattccatttctgtgaggtacctggaacagtcaaattcatagagatagaaagtaaaagtag

SEQ ID NO: 101556 - DNA, 691 bp, Homo sapiens
ctccaccggggccctgaggtctctcctgcatggtggtgtcatggccagagcagcccacaaaagagatcttagcccagaacgtggggctctaaggagaaatgtccctaccaatgccagttacctggactctcagaattcagatgtttttggcatgaggaagaaagcactttgaggctttaactggaagacccattggggcacagaaatggttacaagggctggacatagtagctcacatgtgtaatcccaatattttgggaggctgtggcgggaggatcactggaagctaggagttaaagaccagcctggggaacatagtgagaccctgtctcttaaaaaaaaaaaacaaaagaaagaaaagaaatgtcacaaggagccgtaagagtagagctcttttcagtgccctggactcagctctaccactgatttctttgtggttctcagatcagcttctgccgctgtatttcaggcatatcgtcctgatgagagccctttgactttgacatgctgggagtttaaacacaaaatccaaagatcaacaaagccaggagggctgggcactgtggctcaagcttgcaatcccagcacttgggaggctgaggagggtggatcacctgaggtcaggagttcaagacccacatggccaacatggtgaaatcccatctctactaaaaatacaaaaaattagctg

SEQ ID NO: 101557 - DNA, 338 bp, Homo sapiens
agatccagtttcatctttttgcatatccagttgttccactgccatctgttgaaaagactattctttcccccatgtaatggttttttggcaaccttgttgaaaatcacttgatgtgtatgggtttatttctgaactctcaattccattatttggatctataggtcttttcttgcaccagtattacactgtgttgatcatcatggcttccttagtatgtttttgaaatcaggacacatgtgagtcctactttattgtttaggcttttctgggtcttttgcaattttttatgaattttagaatttgcaaatgtctacaaagactgtgttaaatctctggat

SEQ ID NO: 101558 - DNA, 231 bp, Homo sapiens
ttcattccaggcagagtgctcgggagacctttacctgttttacctgattacatcctctgagtcacaacgagaaaggaagccgagcaacagccagacctgatcttctttaattgtgctctgtggaccaaaggcaacagaattacctaggccccacccagaaaatgcagaatcctgggtcccttatgaagccaccgaatcaaaattgtggggagcaaccaggaacctgatttt

SEQ ID NO: 101559 - DNA, 476 bp, Homo sapiens
ttcattccaggcagagtgctcgggagacctttacctgttttacctgattacatcctctgaggtatgtgccatttatacctggggaaactgaggctcagaaaaatgaccttgtctgtggtcacacagctggtaaggggtaggaatggaatttaaacccagttgtctaacttcagggcccacatttcagccacaactgaggtttttcctaacctaaccccattgtggtggaattgcacaaaaaacatacttgagaggtgagtaatgtcatcattccattacatacaagttaaaagactatgcagtatgataccttttttgctatgcacacacatatatgtgcataaatagataggtagataaagagacagacacagacataaacaggaaaaaactgaaaaggcataaatcaatgttaccaatattttaacagtgattaccactggatgatgaataaattttaatcttaaaattcctga

SEQ ID NO: 101560 - DNA, 398 bp, Homo sapiens
agggtgttccaggacaaaaaagcagcttgagggtgcaagggccagaggcatgccagagcactgggtggttggaagaatgaggattaggaattcactctgcccaaccggaaccctgagaagggatgggtctgagacctgggtctcaggtcacagccattctcactcctccagaccctgggcctctgtgcctcccattccaaggtgttgggtcctcccattcctgagcctctgtgctgcagactcagggcctctggctgaggtgccccctgtgaacctgggtcattgcatccccgctctcagatgtcagatgtctctgttcattgggtcctctatgccctgggtctggtcttgctgtgccccctaatcctgggttgctctgtcccccagatcctgggtct

SEQ ID NO: 101561 - DNA, 545 bp, Homo sapiens
acttgctagaggctacttggctctagtatgtttggctctaagatcaggatgggtaaaatcttgggacaagagaagcaatgtagcaagtgtgagtgaccatctttctttttttatgggtcatttcaactttttctatgggaaaattaaaaaaaaaaaaccaactttttctgttcccaggctgaccctcccccctccgctttttttcattttgtgtctcagtaaaattccactgctgttcagcataattacttcttggatcttcacttcctctctatggtaagcctaaatgctgaccatctcaagcagtaattcaacaaatatttattgaatggcttctatgtgtgaaacacttggcactggagatacaaagatgggtaagaaaatatgtgccctaaaggagctcatagtctttgagtacaaagatagggttcaacaactaaactataatcactaaactttagattagaaggttgagaagagctctgtagaatcaaagaagaggtattacttaacaaggcctgagaatatgagggaaagtttcatgg

SEQ ID NO: 101562 - DNA, 408 bp, Homo sapiens
tctgcctcccaggttcaagcaattctcctgcctcagcctcctgagcagctggaattacaggcattcgccaccatgcctggttaacttttatatttttactagagacggggtttcaccatgttggccaggctggtcttgaactcctgacctcaggtgattcacccacctcggcctcccagagtgctgggattagagctgtgagccacctcgcccagccctaatgcagttctctctatagtcccaccacatgggcagagctgggtcatcagtgtctgtttacagatgtggaaactgaggctggcccctaaaagaactgtgaggcccaagctgacggtgccacaggctggaaggtggctggtccccaaatgaggagcacagctcccccacccccacacgtcctggactaca

SEQ ID NO: 101563 - DNA, 303 bp, Homo sapiens
accaaaaagtacagctatgatttgtaatagagtaactgaaggcagcccctggaatgatctttaaaaataaatgagatcaagttctgctcttgctcaaaattgctcaatggctttccaaagttaagttcaatagaaagtctttcctatggcctgtaaggttggcctgattcctcttaggtgacccttctctcctctgactccaccatagatattttcccttttccccaagttaatttcctccttggggactaaatatttttcttggggccttttggactttgcctccagatgtaagcatggctg

SEQ ID NO: 101564 - DNA, 189 bp, Homo sapiens
gagatcatgccactacactccagcctgggtgaccaaaaaagaaggatttagtccttatctggatctggtatgaccaggtggcaagggtagggcagtaatatacacaatagccattctagggttgaatagaaaagaatatttagcaacactatggaacttcagcagcagagcccagccattgcactccgg

SEQ ID NO: 101565 - DNA, 287 bp, Homo sapiens
tttacttctactttgcttcccttaccaaaagatagaccaaaaagggtcaaaaggattaatggagatacaaacaagtggcctttaaaaatatgtttttttaggctgggtgcggtggctcacacctgcaatcccagcactttgggaggccaaggcagccagatcacttgagctcaggagttcaagtcctgcctgggctacaaagtgatacattaaggaaggttaaggttgggaattgatggttagatttagtaatgtggtgctcactaatggtcttatatcctgtatcc

SEQ ID NO: 101566 - DNA, 618 bp, Homo sapiens
ggggaactctgaccttgcggaggaaacttgtttccctttttttcttcccgccgactttcactcgataaaaccctgctttattcaccctttaaaccttctccaaacctaaattttcctggccttgggacggacaagaacccagtcttcagatgaaggaaggaaaagtcctgcaacattcttggcgtgcaacgttggggctcttgaagagctccagaattgggattctattttcaaggaatgtcctagacaacatggcattattaattgaaaaggaaatatattccagaaatctattctgttaccagctgtatcagaattccacagtgcatctggttcttgggcaagtcactgaaacgtgggtcaaatgttgaaagctactgtactgtgatgtgaaaataaaggacagttataacaaaatactgcaaactcagtggctgaaaacatcagaaatttatcatctcacatgtctggaagctagaaatttgaaatccaggtgctgtcaaatccatgcttcctctgaaacctgtaggggaacatccttccttgccagccgtctctggtgccctttgtctcataggtacatcattccaatcctccccttttgcattgtattctccc

SEQ ID NO: 101567 - DNA, 340 bp, Homo sapiens
  misc_feature (179)..(179): n is a, c, g, or t
  misc_feature (228)..(228): n is a, c, g, or t
taaattgagacaaggtctcactctgtcattcagcctggagttcaatggcacgatcttggctcactgcaacctacgtctcccaggttcaagcaattcttgtgcctcagcctcctgggtaactgggaataagaggcacgtgccaccatgcctggctaatttttgtatttttagtagagatngggggtttcaccatattggctaggctggtcttgaactcctggcttcatngtgatccacccacctcggcctgccaaagtgctgggattacaggcctgagtcactgctcccagcctaatttttttgtttgttttttcttgtatttttcgcagaaacagggttt

SEQ ID NO: 101568 - DNA, 323 bp, Homo sapiens
cctccctggggtggtttgtgagttggctgattttgttggggaagaaactgaaacccaaatgtcatggggtgacttgctctaggtcacaccaggtaaataccagattatgggcacagaacacattgtcccggccctggcattactctaatcgcggcctttgtcgtgaggcttctgtcattcattgattgctcattgtgacaccataagttcccatagggcagggactctgtgtttcctttgttcttcagaaggacttcagccagacctgccagacctgtctgtgcagctcatgccttgtcgaagaccaccacataatttaacca

SEQ ID NO: 101569 - DNA, 328 bp, Homo sapiens
aaaaatagatataaaagagcattgtaaagcattatattctatttaaaataggattctactcaattctatttaagaatattaaagcaatattatccagcattttaaaatatgaacactgcatgaggtaataaggacattattagctatggtagccatgggagggaagacactaaatatttttaagcgtaaatatacaccaaaggagaaggattaacatgcattttggcttcaatttacataagaaataaaagtcaaacatggcatagtagattttaattacaaggagagactagtttgatattgatatttgcaaactttatgccatcac

SEQ ID NO: 101570 - DNA, 714 bp, Homo sapiens
gcagagaccccaactggcaatgcttgtttcagactgtggtgccaatatgacctgacgtggaggatgtttaggcaactaagcatagtttggtcagcatccgaacatcctccacatcaggggatactggcacctcatttgtgttgctggaaaactaaagccagtcactgccccccaggtgcatccttgccctggggcttgacctcaaacccctggcaaacatcagcatgagggaacagcccctcctgaatggccagccacctgaccctcagccttgttctactctcatcctgccctggatggtcagggaactgcttcagtcactataaggtcagcagtggctgtgcccacggatggaggagcagaccctgcattggcctcatcctcctttatccccacactgtgttgctcccattccacctgccacttaatgaatagtaaacacatttgctcttccttatgattttcttagtaacattttcttttctctagctagcttactttattgtacaaaatatagtatgttatacatgtcacatgcaaaatatgtgttgatcaactgtggatgccatcagtaaggcttctggtcaatggtgatgcgattgcttagttacattttggaggagttaagttatatgcagatttttgactgtgcagggggtcgacgcccctaacccttgagtttttcaaggctcagctggaattgtcttgggtgct

SEQ ID NO: 101571 - DNA, 198 bp, Homo sapiens
ccaacagcctaggtgggcttcctgtggagaggagggaggagaagtcaatgacagggatttcatgaccctcacagaagctttctcagggagaagaggcctcatctaagatttttgtttgtcttttgagacagtgtctcactctgtctcccaggctggagtgcagtggtataatcttggctcacttcaacctctgccttg

SEQ ID NO: 101572 - DNA, 146 bp, Homo sapiens
ttctacccagccacttaaaaacctgttgtagcttaactttctaatgatgttaatgacttgatcaacatttgcacttgaataacatatgcattgtagcataccatacctaacaataaagtaagccataatattatttatgaatcaat

SEQ ID NO: 101573 - DNA, 807 bp, Homo sapiens
aaatgttaattagtaatgatgagatggggcttccttgttttgttcctaactctgctaagaataattttaagaatgatgttagcttggctgttggtttaacctaggtaatatttatcttgtagaagaaatattctattatgagttttatgaagcctctttttttcctcccctttctctaagttaggaattttaaattaaggttattgaaacagatatgatcttccttattgcacctcttgatgaactagatgatgttatcaaatcttctgatcttaaaccatccttgcattttggagataaacaatattgccagtgcagtgttttatttgggacatttgaatctaacatcacatattagcttggcctgtggcttttgttcagtgcagtatctttgtcaagttcttttttttttttttttttttttgagacagagttttgctctgttgccaggctggagtgtgcaatggcgcaacctcggttcactgcaacctctgcctcccaggttcaagcgattctcctggctcagcctcccaagtagctgggattacaggcgtgtgccaccatgtctggctaatttttgtattgttagtagagacagtgtttcaccatgttgaccagaatgttctcaatctcttgaccttgtgatccgccccccacctcagcctcccaaagtactgggattacaggcatgagccaccatgctcaacctctttgtcaagttctttaagggtgttatgttcatttcataaaatgaactgggataacttttatagatttctgtgccctaaaatagtttttctattatag

SEQ ID NO: 101574 - DNA, 917 bp, Homo sapiens
cctggtgccccccaggggtgacacatatggtagacagggtcagctttctcaaatgctgtatacagcatggctgggcacattcatgtaggctaagccactcctttacctggccctaatgccctgtgatgaaaaagcctgtgccaggagagtgaacccaaatttcagaccactggtctaggacttaagtccaatagttaatttcaggtccaagagttaggacccaaaagggactgaccctggccaaagccactgtatggcacacctctgggaacccccattcatatggaatacaatgctagtaatgccccctggggatgtgcagctgctgctgaggcaaagaatgtgaggaacaaccattgcttgaggaccatgcattatgtttgtacatcacatgtgatttcttttactcctggccacaacataaggacatattattagaccagtttcatagatgaaggtagtaataagtggggccagaatttgagtatctctttcctgctccaaaactgttggtcaagcttcttcctctataaaatgagatcagtagctcagtgatctccaaggtccctttcagctgaggttctgaggctgcactgttcagtatggtggccgtaagctacaagtgactattttaatttaaattaaataaaactaaaaatctagttctttggtcacactggccacatttcaagtgctcagtagcaccagtgcctagtggtgactatgttggatggtgcagatgtagaacatttccatcatccatcaagttgtatttgcacagcactggtctagggatttagataaagaagaagacatgaacaaacagcataaaagcagaaatacaaggccaggtatggtggctcatgcctgtaatcctagcactttgggaggctgaggtgggaggatcatttgaggct

SEQ ID NO: 101575 - DNA, 311 bp, Homo sapiens
gaggcctgtgagcaaaagagtgatatgatctgaataaaattttaaacagagagctgcaattgatttatagagaacagaccatgtagagagcatataaggtggctgtgagagtccctaggcaggctactgccatgacatagtgacgatgatgtgacttggaccagagtgaggattaacggaagtggtaagcaattattggattccagattggggagaaagaacttgattactcaaggttttggcctgaaagtatggaggaatggagttactattttttgagatggaaaagagagtttgagttgcaggttggg

SEQ ID NO: 101576 - DNA, 223 bp, Homo sapiens
ttgaggttaataaatcagctagtatttttttaataatgatatgccttatgtttaaaagctaagaaaaaagggactattatataattccatttgcaaggacttttccatagtgacatacatcccagaaataccttcacctactccaggggttttaaactgccaaataggtcctactgactggccagcatagcacgaaggtctaccttaaacattctgccccctc

SEQ ID NO: 101577 - DNA, 825 bp, Homo sapiens
ggggctccttgtggctgaccctccatgctgtggcagagttcttgggacaccaggcagggaaagggctgggggctccacccatgagccacagacctagggaggtcccagcatggttgccggggcttctctgcctcttggctccggcaggctgggtcaatggcatcacgaacaatgtctccagcctctgtcttctcccagtgccttagtggatgaggttgccggagtaatgaataaaacactaattattttatctcatatatataattttgagatggagtctcactctgtcgcccaggctggagtgcagtggtgtgatctcaactcctgcaacctccgcctcccgggttcaagcgattctcctgagtagctgggattacaggcacccaccaccatgccctgctaatttttgtatttttagtaaagacgggtttcagcatgttggccactctggtcttgaaactcctgacctcaggtgatctgccctccttggcctcccaaagtgctgggattataggtgtgagacaccgtgcccggctatgaataaaacactattttaaagcatgattgagttcatggcagctctttgtaattaaatattttcttaattgatggatactaaaaatacaaccagtatcatgtgtatgggggacagtccacaaacttttggacttgaaaaggggtcttcatatcccacaaacaagtggggaagaggatctttgtgttggcataaatcgggttatggcttgtaagtaagacagtgctctagatggccagcaacatccccgtggtcagtccagagtgatgtcagagcacgtgtgtgtgaga

SEQ ID NO: 101578 - DNA, 216 bp, Homo sapiens
tggtggttgccaggaggtgggggagggagaaatcaggagtgagcactcgtgggcatggggtttcttttgtgagtaacgaaaatattctggaactagacagcagtgatggttgcacaattctgaatatactaaaaacaactgaactgtatgctttttttttttttaagatagagtctcactctgtcgtccaggctggagtgcagtggcatgatctct

SEQ ID NO: 101579 - DNA, 625 bp, Homo sapiens
tgataataaaaatcatagcaatacagagcggtaacaaggggttagcttgtgcagactgattttctacatcagattaatttaaaatgaggaaataattttcttcttaataaatgtaactttcattaatggcacctatgtttccaaacatgagtgccactggggaaggcaatacgagctgggtgaccttcctggagagagaccagaaccatgctggggagaagtcccctgcagaccaggctgttccagggacagttctctggttgcactggcaatgaggcatcaggcagccactgcacttcctctgcacccctctttcctcatgtaggaaatgaaagaacaggaatagcactctcttggttctcttttcgctctcctctttaggattctaactcgtaaacagagaacagtgtgcgttgaagcttaccctgccaaatcgcctccattattctcaaaaagaccatgggacacaacacaagaagaatatttacaattggttttgaaccttaacttcaatatttcctaccttgtatgtggcagaaaatttatcttactttctggaaaacatgtttcgttctactgtaatctttattatttaaaactatttatgtaatcttattttcagggg

SEQ ID NO: 101580 - DNA, 220 bp, Homo sapiens
aattgcagcactttgggaagctgaggtgaaaggatcacttaagcgcaggagtgacagatcagcctgggcaacatgacaaggccctgtctgtacaaaaaaatttaaaaagtagctgggcatggcagggcacgcctgtagtcgaagctactcaggaggctgaggtgggaggattgtttgagtctgggaagtggaggttgcagtgagctgagcttgcgccact

SEQ ID NO: 101581 - DNA, 542 bp, Homo sapiens
aaaaacgatgtatatgtgtgaaagcagttttaaaattctaaaatactaaacatgtatttttaaatatactataaaacagcttttcatcagttgtatttattttttaatatatcctcaactatcactcctgctttccaatatgccttagaactagttttcctaataggcatatgttcttttcttcataaataactgtttagtccttttcttcagattcaaactatactgctataaactcctagaaagcatatgtctgggaggaagttaaatttatttttgatctcttatttttaaacaaatttactttaattagagctcattaagtcggattttatatactaacactaccaattgaaaaataataaaaaatgaatgtgaagtaggcctaaataagtcaacgagattcaaaactacaattgaaccagatttttctgaaatttctccaatgtgttcagttatacaaaactggttttgggtaatatgacacctgtcattgaagttaccccttcatccagtgcaaatttaggaggaattttaattaa

SEQ ID NO: 101582 - DNA, 215 bp, Homo sapiens
cctggatcacgttttcttcatgtgttaaatacaatttattctctcaggacaggataactttgggaatttaatgcaaaagcaagtaaagttcaaatattagtttctcttccagataaggatcaagtgcaaattctatcatttagaaacaacatgatgcaggtaaatgcatgacaccccgacatttgaggcgcctgatttcagactcttctctgtgc

SEQ ID NO: 101583 - DNA, 789 bp, Homo sapiens
tcatgcttcagtgtatgttattaaaaaataagaattattttttaaaaagcataatcacaataccattactgcactagaacaaaacaagacaaatgacattaaattgccaaatatacagtcactattacaatatttctgacagactcaaatgctttttcagagttggtttatttaaatcaggatccaaaaagctcagctggattcagttcaggtctcttaatttatgtcttttcatttatttgttgaagaaactggagtctgtgtcctgaagaatttcccagatttttgaattttgctgattgaatccttgtgtttttttaagcatgtttttctctactgtatgtttcctgtaaacttttagttaaatctcaaagtgtgataagattcaaatatatataaagtatgaaaaggttcaaatatgtatatttatatatatatttaaaagttggtcttcagtgactgcatactttctgttttgttgtattgtaagctttacgtctactctcattgttattcacttacctcactttacaatattataaatagctttatttgtttggaatgcttgctatgtgccaagagatgtcctaaccattttgcattaaaaaatgaaaaggaaacaaaaaattaacaaaaaggaaaccttatctatgcatgtttttgctcacaattttgagtttgaaaaaatggtaaactcagttttaatttaatgacaataaagaatatcaatagtagaaaacacttaagctataacaatgttagttatgagatatgtgtgtgttcacccac

SEQ ID NO: 101584 - DNA, 337 bp, Homo sapiens
atctcttttcccacttcataaaagcaaaatatgtaagactagcatctggtttttgtcccaataaaaaaatcccacaactttcaagatatcactctagctttctaaagtagaaaggcaattcaggcaacaaaaaatattttttaaaaatctatagcccaaatcaccaaaaggtaaggaaagaactttcctagcaagctctggagaagacctaatttggacatcaaaatggagctttcagacactaatcaaggccattaattaaaaaaattttttcagaaaaataaggcaggttggatctcttttcccacttccataaaagcaagatatgtaagactag

SEQ ID NO: 101585 - DNA, 737 bp, Homo sapiens
tcagactttacccaagagaaagcgattggagaattgcctaatcctggtatcatgtttccggctatgacaggaagagatagatcataatagataaaaatggaaaatgttgtgaaaaaatcaaatacttctaagaaagacaaaacgcaagactcagctgtggtgagtgttaaaggaaatgagtgtcgcaactagatgaagctcaagacatatatttaaacatgttctaatggtggaacagtgagaagaacagctaagaataatggcctaagacagtctcagaaacccagggctcagcccctgactctttaccctcagtgattctccccatcaaaccccatgatctgtctgggcagtcttattctcaacacctcccttgatggaagtctaatctcagcttctagatattctaaccagaggtctaagtcaatcctttctgaaatttaaattcaattctttttttaacctgactctcaagagaaaaattcaggtactttctatttccaattcccttctctaaactgaaacataatgtaacttacttactcttctccccatgaaatagcttacaactttttgacctctaccaatggaataactctcacacacatactcctatgatcaggcctctgataaatattcaattatgttttccacttcttcccagggagttgcctgcaacagaaactgcaaatggcatacgaaagtttcctaattaaaaaataaaccatatgagtgat

SEQ ID NO: 101586 - DNA, 420 bp, Homo sapiens
tctggagggggcccagggtgctgcatgtctaagaaggatgctggaggctgcatttctaagtgatgccaacgatgctggccagtggcccacattttgagcacccaaggcaaagaggacacattacaccggacagcaatagtcaaggtcaacctgatccacgactttccccaggaaagccagttcttgtagcagaaagagttcagctagccttgggccacactccaacacttcaagcagcagcacgtactgtgcccaagcatttaataatgcacaagacctttacgcctgaagcatgatgaagagaggcaaaaaaagcagataacaacatcaccactgtttattgggctcgctgactttatgccaggcactgtgctaagaacattaagtgcatttttcagtgtatcctcccagcctgcagta

SEQ ID NO: 101587 - DNA, 339 bp, Homo sapiens
tagtaaaattcaaggtgagatttgcgtggagacatagaacaaaaccgtatcgggctcctcatcaccagtgatcttctcagctgctctcaaaccctccagtctttagaccttgtctacttacagctcagatcagcaagtcagaaatttgaggccaggtacagtggttcacacctgtaatcccaacactttgggagactgaggcgggaagatcacttgaggccaggagttagagaccagcccgggcaacatagtgagactctgccgctacaaaaaatttttaaaaattaaccatgcccagccctcattttcaacagttttagaaataattactatctgaaa

SEQ ID NO: 101588 - DNA, 269 bp, Homo sapiens
aattttagagtgaggaagtccagcgaagggggtgttggtattgtcactccatctctcacctcccctttcagccactcatcttcttccataaagaactttgtcatggacagaaagttttgtttcttgaaacctgtgtcttatgagatttcaagcaaatttcactttgcttttaaaattgtgccacacctcttgtaattctccttgagaaacaataagaggaagagccagcactcctctcagggaataaggcaggctcaggagcccaaatg

SEQ ID NO: 101589 - DNA, 437 bp, Homo sapiens
aaaatatttattatctggccctttccagaaaaagtttgccagcccctgccataaaccacagcagacaagagattaagctgtaggtactgaaatcagaccaacctgggttcaaaacctgtctttgccactaactgcttatatagcttgtcgaaagtcatctaatggttctaaaactaaaacttctaattttttttaaagaaagataggccaggtatggtggcttatacctgtaattacagcactttgggactacaggtgtgcgtcaccatgcccggctaatttttgtattttcagtagagacgggggtttcaccatgttgcccaggatgttctctaactcctgggttcaagtgatctgcctgcctcggcttcccaaagtgtcggcattacaggtgtgagccatcgcacctggctagacctcacgttctaatgacagga

SEQ ID NO: 101590 - DNA, 962 bp, Homo sapiens
tttgatcttcctggaattactgtaaatttctgatttgctgatagcaccttttcttatttgtcggagccgccatgaattcgtttatataaacttttaattttactccttttagctactgttgttacctgttttacttttatatctattttaagccctaccatacaccgttattattcatgctttaaacaattgtcagttgtcttttttttttttagacggagcaagactcccgtctcgggggcttaaaaaaaaaaaaaaggcggtttttaaaggaatcggggtaatggggcccagaagtgtgggtttggcctcagtataagtagacagaagggtcttgggtccagaacgataagggtgcataacgggcaaagtgcctaagtatctctataaaacgctattattcgtgatggtggattcacattttcacaaggtgacctggaatactcacccgtgagaacaacccgtggtttacaaaacactacagtataacatgagtgccagcagagggaacagataacaaataataaggggaaagcaggtgtcttaaacagccataagatataaagatgcagttaggatcagaggggaaaaccctcacagcgagtacgggacaacatatacgggctgctagcacactccaggcgtggaaattagagagccaaatacagacaatacaatctattgaggtgtacccactagaggcataatatttacaacacaaactaagggaacgttgaagaaaaccccccagacggaggatatagcagcttcaacaaaacaattgcacgccgttttatgtactaacaacccgcgggggctaaaagcgtggcgagacaacaaaggggcttcacccagaaaccgaaagtgggacactcgtggaaaaacccccgaaatgtgggaagaaccccgattccccccaggaggagaagacacgcctatagcgttattaaggacctgtagaa

SEQ ID NO: 101591 - DNA, 310 bp, Homo sapiens
ctagttggcaggattgtaagtagaccgaattctaatttttcccaacacatagtggtaattggaggttactgttatgaatactccatctgactacgactaagagagtgaggggtggttttaatgaaccctctaagctctctcagttccttcccttccacaaaatgcaagagcaaaagcaaactacaaacaggccttgtgctcaaccactggaaatgcctcctgggataagaatggcagcacttgaaaattctgccctctactgatgagacttcctgctgcctttggacataactaagccaggaaactttaa

SEQ ID NO: 101592 - DNA, 144 bp, Homo sapiens
acttatgaaatgtgcacgtgcgtgtgtgtgtgtatgcatgtttggccaggttaaaaaacaaaccaactgttcttgcaagggtacgatcccaagctttgccatgcacatagccaaatatcctcatattcaggacacataaatttg

SEQ ID NO: 101593 - DNA, 315 bp, Homo sapiens
ttccagtttgggataattatgaatgaagctattgtgaacatttgtttacaagtgtttttatggccatgttttcatttctcttgggtaaatacctataatggaattgctgaattatatagcaattagtgtatgattaactttataggaaatatatatggttagtgtatgattaactttataagaaaccgccagacaaatttgccagagtggttgttaagtgtctcatcccactaacaatggagaagagttcccattgctctacatcctcatcaacacttaaaatggtgaaaacgctttaaattgttaatattttgg

SEQ ID NO: 101594 - DNA, 300 bp, Homo sapiens
aaggaagcctgtgttagcttaaaaacccatctactaaaaattcagagactatacatatcagggctctctaaagtcagatgaagggggcacacattctttcacagctcatatcttcataatacttaaaaaatagtcaaatgataccatttcacatataaaacaaagctctagtacactgcagcaatgaataaatggtcattgctatttatcccaaacactctcaggagaagaagcaaatcttactgagaaaattgttagttcagttttggacattctaaatttgaggtgctcgcagaacac

SEQ ID NO: 101595 - DNA, 295 bp, Homo sapiens
tggcaaatgaaaataattatttggtttaaagtatcctccacctccatttcactggatgtcagtaggtggcccacccacccttctctcccttcacacatagcacatagctcaggtgtgaggaaacaagattacataggtaggtgtggaagctgccttgacttaacagcccttagcttcatatagcaactcttctcccatgggcacagcttccacggcctagcaatatgaacacctggttacactctcagggaagcccacatgtggtatgggttcccgtcaggcatttatcctttgt

SEQ ID NO: 101596 - DNA, 428 bp, Homo sapiens
aatctagaacagttcctatcctttgtagtcttttttaatcaacattttaaaaagaaaccaggacagttgtcttgtaaaatatccaacaacctggattcacgtgattgttagttctcatttttgcaagaatatcatataattaagtgttttgtacatctcattttatcatattagggaggcacatgatgttggtttgcctcattattggtggtactaaatttgatcacttaaagtggtgctcactttagtaaaggtatattttactctaattttagcttccactgatgaaggctgcctgcctatattagttattaaactgatggtttcacatcctcacatttttgactgaattgatcatgcaccctactatgaaccaagggaatttcccccccagcttcctagtgaaatggggtatggttgtttcaata

SEQ ID NO: 101597 - DNA, 315 bp, Homo sapiens
ttttcccaattaaaagagccacatcctgctcctagcttatttctattaatgacagcacaagcgtcaaattataagattatgcgtttgggcacccctttttcttctgttctggctaatactttacttgtatcatttatgagtcctcactagtcttcagtccttaatctgatttcaaaaactatggaaatgggaggttcagaggggtcatagcacacgtcaggctggtcacttcctggattacagactttgtactgagtgttattatacaaacatgttccttttggaattactaggcattcataataactatagaac

SEQ ID NO: 101598 - DNA, 150 bp, Homo sapiens
gcggccgcctactactactaaattcgcggccgcgtcggctgctaaatgagaaaaatcactgtttgtttttaaactcaaaggtataagatctttaacttacttttctgccttaagtgtggctgccaaagtagtagagcaagtttcaactta

SEQ ID NO: 101599 - DNA, 872 bp, Homo sapiens
ggcttttgactgatgtagttaattcttggtaattcaccatattaacacatttaagacatacgacaataaaatcatctcataagatgcagaaaaaataattttataaaattcaccagtgactcaaacaaaaaatgttagcaatctatgatgagtagggaaatcttttaatctgaggttatgacaatactcaaagtttcatagtgactgggaacaggaggaagatgcccattattattacctctactctgaatgattctttaagttctagacgttgcagtaaggcaaaaaaaaaacaaaacaaaacaaaaaattacaggtacagaattgcaaggagaatagcatgtctttatttgaagattcaattattgtattcctatgaaaacaaaattatcttcagaaaaacaatttaagaaatattagcaaagtacatggataaaagaaaacatcaatatagtaaaattaggtagtaacttgagcaaaatagtcagaataagcaactacatatatcctctcctccataaaagcattgagaacatgaacaaaaatcctcagaatataatttttcaaaactctggaaataaaagtgtttagcaatctaggtagtgtttattcaatagcaactgaatattggtaagagcaataaacgttgtggtgttttaacttgctctgttacaatttcccactcccagtttgaaggtagcttttaaaataagtgactctggggcgaaaaagggtgatctttcaaagccctattttcagataatttttataattttccctgtatcatggttccaacaaagatcccactcataaatctgtctttattcacagctcctgaagtgtgaacagcttttctaggtttgtttctcaaa

SEQ ID NO: 101600 - DNA, 373 bp, Homo sapiens
ttctttcttgtagtttctttctgctgcagttccccatcttttcattatctacattttccccactagattattttaatcttttaatcacagccattttaaagtccttctttgatagtttcagtgtcttgttaattctctaggcccaattttattgattgtctcttaacaatgtgttgttttccttgctttttgtgtggctcttaacatttgattaaatggaacatatgttgagcagaatagtagagacttacgtaagtagaaatttctcctgcaaatgggcacatcccttctctctagctgtttttatagggtaggaactggcaaactcttgtctgtaaaggaccacataagtaaataccttaggctttgtggc

SEQ ID NO: 101601 - DNA, 758 bp, Homo sapiens
agaaggcggtggctgaggcggttccggaggttctagtgtcggagttgggtgcaggcaggtgccatgggcccgcttgaggcacactgaggggacgcggggctgggccatggccggcgctcgggccgccgccgccgctgcctcggcggggtcctcggcctcttcaggcaaccagccgcctcaggagctggggcttggggagctgctggaggagttctcccggactcagtaccgggccaaggatggcagcgggaccggcggctctaaggttgagcgcattgagaagagatgtctggagctgtttggccgagactactgtttcagcgtgattccaaacacgaatggggatatctgtggccactatccccggcacatcgtgttcctggagtatgagagttctgagaaggagaaagacaccgtttgacgagtaccgtacaggtgagcaaggttgcaagaacctcatccaccgcgagcaagatggcccggtgcagaggacggtttgtctgcccagtaatccttgttcaagggcaaagcacatttgcaggtcggccacactggctggatggggagagctgtatggacgctcaggcctacaactattaacctcagggggttgcagatgatgcctgggcagaatgtggaggacgtccacggaggaggaactgtgcctcttcgaagtggtgacacgcattctttggaaagggtcagaggctatgacttcaagctgctcgaaaacctgtcaatacaatacattctgagac

SEQ ID NO: 101602 - DNA, 395 bp, Homo sapiens
tgagattcagttttttggtctataaaatgtggataagaggtgttcctatgtcctcaggttgctgtgaggattaaaggagataaacttgttgggggcttaacccaatacttgccatacagtaggcactcattaaatgacaatggtgaggatgggtactccatcaataaaagcagtatcaacactaaaatagtaataatagcacctaacatttattaacctatttgatgcccacaggtatctataaggtaggcaaattatatttccatgttacagatgaagcaatggaagcacaggggttgagtcgctttgcccagggtcacacagctaagaagtggcagagctgaggtttgaacccagacatccttgttctggaatctgtgctcttaacctttacc

SEQ ID NO: 101603 - DNA, 322 bp, Homo sapiens
atctgaggtgacacaaagacatttttaattttaatagtcatatttattttaacgtatgctttaaaatgtaataagcaagttgtctattattattattattgctgcttatgatagatgaggccaaaataggtattaaagtttttttcttattttttaaaatttctttttaaaaattaatagagacagggactccctattttccccaggctggtctcgaactcctgggctcaagggatcctcatgcctcagactcccaaagtgctgggattacaggcgtgagccactgggcttggcctgaaggtttaaaagtgagttaataacc

SEQ ID NO: 101604 - DNA, 411 bp, Homo sapiens
tgtgatggagtttcgctctgttgccgaggctggagtgcagtcgccaatctcggctcactgcatcctccacctgccgggttcaagtaattctctgcctcagcctcccgagtagctgggatcacaggcacctaccaccatgcccggctaattttgttttgtatctttagtagagacagggtttcaccatcctggccaggctgatcttgaactcccgaccctgtgatccacccacctcagtctcccaaagtgctgggaatacaggcgtgaccacagcacccggcctacagcatctctttaattaagctcattcatataccttcactgtcaggctaaacgcgatggcttatgtctgtaatcccagaactgtggcaggccaaggcgggtggatcatgaggtcaggaattcaagacc

SEQ ID NO: 101605 - DNA, 377 bp, Homo sapiens
gccccacctgatctccccacccccgggacctccctgccctcatctcccactgccctcccccttcatggctctgctccagccacgctggggatcttgagtttcctcacacacaccaggctgccgccagcttcagggccttagctgtcgccattctctttgcctggaatgttcttagaaatcctcttcactgtcccctcatctcctgcatgcctctcctcaaaggtcacctcactggaggcctcctggccactgtatctaaaacagtagcccctgccattctctgcaccctttcctcacacctgacaatgtattgttatcctgaatatttaattattttttacctgctcctcctccaactcccaatgagaatgtctgca

SEQ ID NO: 101606 - DNA, 388 bp, Homo sapiens
ccgcttaatcacgagtgaagtcaggtcacttaatccatgtccaagagctctcccattgacagttgcctttcctggacagcaggaggctgttgctcttcttgcatgtgtcactgagagaacagatgtcctggagcatagatgggtcatcatcttagatgttggggtccaattctggctagggagaaatttatctcatcctgggaatgggtgggttacttgtatcaaatcctggaactgtccacatcttctgaacccatcactaatgaagaaagagaattctggggcaatggatggatcaagagctcttcaatgaaggtattttatcagttggactaaggccaggttttggcaggggagtcaatgggacaaagggtgagctgtggcttta

SEQ ID NO: 101607 - DNA, 277 bp, Homo sapiens
ttttgtaatttttttttgtagagaaggggttttgccatgttgcccaggctggtgttgaactcctggtctcaaactcctgggtcaacctgccttgagctcccaaagtgttgggatgacaggcgtgagccactgcacctggcagtgagcaccttctaaaaggctcctcgcgggcctcacctgagcctagtcctgggtgagttcctgatctaggactggaaccctggtctcctggccccatgaactgttctggacccctgcgaggtactttttagagtct

SEQ ID NO: 101608 - DNA, 203 bp, Homo sapiens
aaagtcaaatcagaagatgcctgcatcagcctcactgccccccaccgccccagcaggcagtatcttcagatgaggagaagcaactgaggtataaggatctcaggggaagacacacctgccgtggttctcaggggacaggattatctccacggaaaaccccaaagggctaacagacattgctatagctgatgataaggattcag

SEQ ID NO: 101609 - DNA, 247 bp, Homo sapiens
tggcttgctgttgggtggcttaacgactgctatttttcagtccacagaagtcagaacagctgctttccatttctcccacgaagtctttctggggcccagcagcacttatcatggcagggtttgtttagtttgtttacagggttccctctcctgcccctgaagaaaattctagtattcagaaatgtacattgaacaatataacaaacacatggtacccaccgctcaggactagccattgcactccggg

SEQ ID NO: 101610 - DNA, 107 bp, Homo sapiens
atattactttaccatgctaattctctcactagttttataactgttacttttttttttaagtttgctatgtggttaattgtatcatctatgaaaactggcagttttgt

SEQ ID NO: 101611 - DNA, 355 bp, Homo sapiens
gataaaacagctgaaagtctggagaaataagtagcagaatcaaagagcccgaatgatccgcaggctgtatgatcagctcgaaacagccagcaggtgatcaagcaagagacgctgtgaacaatgaggcttggagtggagctgctcccgcgcccccacccctcagagctctgggacgttggggcacagggttacagaacaggcagcaagtatttcttaaattatgtaagtactacttggatatattcttcttacaaaaaatttaagtatcataggcagggtgcagtggctcacgcctgtaatcccagcacttcaggaggctgaggcgggtggatcacctgaggtcaggggttcaaga

SEQ ID NO: 101612 - DNA, 544 bp, Homo sapiens
ctgccttccttttatatatccttttttaatatttatttttatttttaagacatcatgcctaagcccctgccttcctgccagatctggcctcttcagggggagaagtgcaggagatgaccacttcagtctggaagccttcctctctggctgtcaaattctattcaacttcttaggattcaagtttaaaaaaaggcgagaacactctaattgtttccttcctagaatcatgtgtcttttgccccatagcccctcaaagtataaagacgtacaggacatcatcgcttcctccaaaaagttgaagatccagataggggaagatgtgggtgcccacacaaagtcaagactgtttacttccaggcagttatcagctgtgtcatcctgggcaagtaacttaacctcttaggctcaatttctttacctgttaagtgcaaatagtaggaccttccttttctcccaagggttgtgataagaataaaatcaggaagccgaggcaggaggattgcttgaggctagcctgggcagcatagtgagaccctgtctctac

SEQ ID NO: 101613 - DNA, 486 bp, Homo sapiens
acctccagagtcagagaggagaatgagtgagggaggaaagcagaaaggaagtcatcgcccacactcgctgtggcaatagcgcctcacttagcagctccatccccatgttgacacgttgatgaggcccggcccttgcccttgcgtgggtgtgagactgtggctctccatacctgctcactgggcccagagcaatttcctatttttgtgggcagacttgacctagtccaaaggccaaggtctcccgaggatttgacgctaatcccgttggatatttctcatacctccctcatgcctcatctggtattgttcctttctggactgaatagatcttgtttcttcctcattacaagtttctgcctgtgtgaagttttagaaagcttcaggacacattccatatttgaggccgaagccacaaaaagttaatatttggagcggtaggataggagaggaagagctacaggcagaaatctggatttgattaaaaaa

SEQ ID NO: 101614 - DNA, 208 bp, Homo sapiens
aagaaaacaaaagattgtttttcttctttatttgagaaccattttatgtagattgcaggaaggttgtgaattaaaatatgtttagattttttcattccgttcattaagaaacatttgatttaagctgcagagaggatatgcatttaagaatatgtttagaattgtggttgaggtggcaaccaccatgcaattatcagtttattaacag

SEQ ID NO: 101615 - DNA, 313 bp, Homo sapiens
cctggttggttctttcaggtccaaatggagagagttcacacaggacttctttccatttagtatataaggctggaacaaatgcgggacgatcagaacacaatgactcccgaagagatcgttgcctgaggatgtcaatagattcccgagggcaagggcagggtagactgagaatgtttctaaaaggatcttggactcattctggttccctgaggagttacagggaagctgaacaggtgtttgaatcctccttgcctctgagactggccaaatgccacgctttttaaggaagtattggtgcttaaagtcttttcca

SEQ ID NO: 101616 - DNA, 531 bp, Homo sapiens
atgtcttggcgagcgtcgacgaatgaataatcatatctggtgttatcattgcatacaggaataatattaatagcattgtaaactatcatctgacattaaaaagaccattaagctatattataaaacactttataccagtaaatatgacaatttatgtgaaattattaccaaactacacagaaaggaatggaaaatataaatagtcctatattacttttaaaaaactaaatcatttttgtaaaccttcttacaaagaaaactccacatccaggtagcttcgccagtgaatttgaagatgaaataacaccaatttcacacaacattcccaaagaataataaaaagtgataataggtattttcctcttatttattagcacagcataatcttgatcccaaaacctggcaagaacattacaagaaaggaaaatagcagatacatggttgcaaaatgatcaagtaggcttttttccaggactagaagaatggtttaggattcaaaaatcaatcaatgtaatttaccacattaataaa

SEQ ID NO: 101617 - DNA, 524 bp, Homo sapiens
tggcatcagaggagtcctattggagaatgaatgctttcaccacttctaagcagtaaaaaagcctttctctacctatgcaccccaacccccagcacccaggggtattagtagaggctacatgggagcagtagcttctcagccagagacatgtcagtggaggtggagtggagagtcaggattcccacccagcccaggggaatcaagaagctgccccatctgtagtgtaaatggaggacaagtggggaacctgaacatctacccccaacttgccgaaatgaaatggcacctcactatcttcatctgctggagcaaaatcaaacaaagccaactaacacagaaaatttaagtaagatctagagtcttataatacccaaagtgtgcagattttaattaaaaattgtctggctgagtgtggtgactcaagactgtaatcctagcactttgggaagccaaggtgggtggatcacctgagtctaggagtttgagaccagcctgcgcaacatggcgaaacctcatctctacca

SEQ ID NO: 101618 - DNA, 272 bp, Homo sapiens
tcattctttctctcctgccaccccgtgaggaggtgccttccaacgtgatcataagtttcctgaggcctccccagccatgtggaactgtgagtcaactaaaccacttttctttataaattacccagtctcaggtatttcttcatagcagcatgagaacagactgatacagagctggatcattcctcattatgggaggctttcctgtgcattgtagggtgtttaccaatgatgaccgtctgcacaatccctgaaataaagaacagcttgacaga

SEQ ID NO: 101619 - DNA, 695 bp, Homo sapiens
gcaacagatgctgcagcccctcgaggccaagtgacttgagaccttggaggtccaaaggtcacacaactaccttcctggggccccacctggcatcctcctctccctacagccaggacaggctgcccagcctcagaaccaccacttgttgtgactattaaaccccatgtcccaatgatgcctggagaccatgcctcaggcactttacactgttagtggtaatggtgacacattatctgagttttgttgcttgtaaatttcttttatgctgataagcttggaactggattggaattgagtgggggacattgtccagtgtccatcaagaatgtaatggtaaacatttaatgtttttttctccttcttccccacagtatcagttttcttattgaatttgggaagcaatagcaattgattaagttgcagtggagcttgccctaaaaggaaatgattgataatccgtttaggtctggcttgctcgcttttcccctcctgatttccttggccactttttcaattaccaactgtatttagcttggtttgcttgttgtaactcatttccccttcctccaggatctgcagggaagttgtaatgtaatgttagagtagtgacatctaattatttccctgagacatcagttagaaatgtaagaatacttcttccttgaggtgggcagacgagggatgtgagtctgtga

SEQ ID NO: 101620 - DNA, 286 bp, Homo sapiens
agtgatagattttattcacttccttttccattcacaaattagctcagcacctgcaatatcacaaatggccagcagatgggagcaaataactttgcaaaaaataccgaaagcaccaagtcctatgcaagagtatccaattcatcaggtccgtaaactttttaaatttctcaatctttctgtgccttcaaaatttaagtctcaaatgactgcatgttttaattactaagccctaattacttactaggaatgtgatcatttgaggagacatttcattaatatgtgttta

SEQ ID NO: 101621 - DNA, 586 bp, Homo sapiens
aggaagtcttttccatatcttatggtacaattacaaaagaattctatctagaaaaagaacacagcctacaaaagattaaaggcattcagatcaaggtgttttgtcaagatttcctaggtgtcctctttattggtgccgttacaaggtaagtggagacagacataagcaattgctcggcgtagcctctcctacagaagagttacctcaatgaactgagaacattctacccactctcacattccagcttactcacccacatctaccttcatgtttaagagcagcattcagagactataaaagcaaggaatttaagtcttctgctactttaaggcaaattgcatcaagaggactatcacaaaatgcaaacacgatgaaagaatttcctcttctttgcagaacgcaattattctgcattaacaatgtcaagttctgcattcactagacctcccagatttttattcttatccctgtataaataatcaaagctgcatgtatctcagaatgttgattagaaaatactacaaggcaggcatggtggtgcacacttgtagccccagctactcaggaggctgagttgaaaggattg

SEQ ID NO: 101622 - DNA, 517 bp, Homo sapiens
gcttaattcttaatctgaattaatggcttaaatccagtgtcttaatcatggaacagtgtagttaggaaaaatacttggaaaatcagtcttacagattgcagtctattagccagatgtagcggtgtgcacctgtaatcctagctactcaggaggctgaggcaggagaattgcttgaacccgggaggcaggggttgcagtgagccgagatcgtgccactacacttcagcttgggcgacagagtgagtgagattctgtctcaaacgtaaaaaaaaaaatgtggttctgtaacaagagcactatctggattgacatatgtaagaaatgtaatcttgataatatcccagtttcatttagcagtcttttaaaaagtcatcagtgtgattttaaaaatataagcaagtcattgaattatgattcttaatctgtttttgcttctcatacatatactatcctaatatggtctttgaaaataatacaagaaactccagtgtcgaaaaacacagctatcctttctttt

SEQ ID NO: 101623 - DNA, 133 bp, Homo sapiens
cgcacagctgattaagtgggggtactgggctttgaaccgggactatcccagctggtgttctaaacccctattctatgctgcatttttcttttgctttttttctgtgagagggaggaaggggccacttccctac

SEQ ID NO: 101624 - DNA, 795 bp, Homo sapiens
gctttaatatcttcgtgtgaaaatcggtctttgaggtttatgctatttttccctataacccctttttgctgtcttctattaaagctctaggcacagacatttctctcatcctgcacccctcaattcatcagagattttattatctggctcacagtgttgctgtccccactccaggtcttgccatcactatgcctgcggacaatccatttaatatttcactctctaggagcttaatctatgtggagataacaaacatattaaaaacagtatgatacttaaaaataacgttttaaggcatccatagaagtggcataagcctgtgtttgaaacaaagccgtaattgggggatggacacctcttttcttctaggttcacatttccatgtggagggacatcactgtgtaattcccttggcttctctttgcgcccagaggaggacttactaatctcattgaagaatttgggtgagcaactaggcagggcttaggagccagccacttgtagcctattcttggaagctgcaaattttccagaaacagatctctatgtgggtaggcctatagttttccaactgctactgttattgggtgagcgaattgctcaattccagcagacacttatttttttgagactgagcctctctctgttgccaggctagagtgcaatagcacgatctcggctcgctgcaacctctgctttccaggttcaagtgattctccttcctcagcctcccgagtagctgggactatagggcgtgccaccacacccggctaatttttgtatttttaatagaga

SEQ ID NO: 101625 - DNA, 105 bp, Homo sapiens
acgaagagctttgggttgctccttctggcgccaggagcccctacgcagggttaatgatgataagagaagtgagtgtgactcagcagatggaatgttccaatgctg

SEQ ID NO: 101626 - DNA, 413 bp, Homo sapiens
tgttgataacactgaaaccaagctgctaaaagctcatcacttggcttatcatgaggactcataagtaaagcacattgagagtgaaatggaggccacttgagagcggaataaataccaggaataggtgaggccagagttgggggcctcattgcattttgggtgaaggtatgatcctcaaagaagagttgccagtagggcacattcaaatgcgcaagaaggaatttgattaatttcgactaactttaggacgccaaaagtcctgatctggagggaaacattctgcagaaaaaatcatgtgatcaatgatgatactcatggttaggcaacctcattatttggttctctttgtagtaagaatgcagccagtgattatctcattaactgtacacagaccctgagacaagtgataaatt

SEQ ID NO: 101627 - DNA, 102 bp, Homo sapiens
aggtgccagaaaggaggtcaaaaaggcagggaccccaagaagaggaggaagcctatgagtcacctggcagagggaaggaagcaagcctttctcctggtgaag

SEQ ID NO: 101628 - DNA, 8465 bp, Homo sapiens
tgaatgaggaggggaggttgtggggccgccgccgcggagcaccgtccccgccgccgcccgagcccgagcccgagcccgcgcacccgcccgcgccgccgccgccgccgcccgaacagcctcccagcctgggcccccggcggcgccgtggccgcgtcccggctgtcgccgcccgagcccgagcccgcgcgccggcgggtggcggcgcaggctgaggagatgcggcgcggagcgccggagcagggctagagccggccgccgccgcccgccgcggtaagcgcagccccggcccggcgcccgcgggccattgtccgccgcccgccccgcgccccgcgcagcctgcaggccttggagcccgcggcaggtggacgccgccggtccacacccgccccgcgcgcggccgtgggaggcgggggccagcgctggccgcgcgccgtgggacccgccggtccccagggccgcccggccccttctggacctttccacccgcgccgcgaggcggcttcgcccgccggggcgggggcgcgggggtgggcacggcaggcagcggcgccgtctcccggtgcggggcccgcgccccccgagcaggttcatctgcagaagccagcggacgcctctgttcaacttgtgggttacctggctcatgagaccttgccggcgaggctcggcgcttgaacgtctgtgacccagccctcaccgtcccggtacttgtatgtgttggtgggagtttggagctcgttggagctatcgtttccgtggaaattttgagccatttcgaatcacttaaaggagtggacattgctagcaatgagctcccaaagccatccagatggactttctggccgagaccagccagtggagctgctgaatcctgcccgcgtgaaccacatgcccagcacggtggatgtggccacggcgctgcctctgcaagtggccccctcggcagtgcccatggacctgcgcctggaccaccagttctcactgcctgtggcagagccggccctgcgggagcagcagctgcagcaggagctcctggcgctcaagcagaagcagcagatccagaggcagatcctcatcgctgagttccagaggcagcacgagcagctctcccggcagcacgaggcgcagctccacgagcacatcaagcaacaacaggagatgctggccatgaagcaccagcaggagctgctggaacaccagcggaagctggagaggcaccgccaggagcaggagctggagaagcagcaccgggagcagaagctgcagcagctcaagaacaaggagaagggcaaagagagtgccgtggccagcacagaagtgaagatgaagttacaagaatttgtcctcaataaaaagaaggcgctggcccaccggaatctgaaccactgcatttccagcgaccctcgctactggtacgggaaaacgcagcacagttcccttgaccagagttctccaccccagagcggagtgtcgacctcctataaccacccggtcctgggaatgtacgacgccaaagatgacttccctcttaggaaaacagcttctgaaccgaatctgaaattacggtccaggctaaagcagaaagtggccgaaagacggagcagccccctgttacgcaggaaagacgggccagtggtcactgctctaaaaaagcgtccgttggatgtcacagactccgcgtgcagcagcgccccaggctccggacccagctcacccaacaacagctccgggagcgtcagcgcggagaacggtatcgcgcccgccgtccccagcatcccggcggagacgagtttggcgcacagacttgtggcacgagaaggctcggccgctccacttcccctctacacatcgccatccttgcccaacatcacgctgggcctgcctgccaccggcccctctgcgggcacggcgggccagcaggacgccgagagactcacccttcccgccctccagcagaggctctcccttttccccggcacccacctcactccctacctgagcacctcgcccttggagcgggacggaggggcagcgcacagccctcttctgcagcacatggtcttactggagcagccaccggcacaagcacccctcgtcacaggcctgggagcactgcccctccacgcacagtccttggttggtgcagaccgggtgtccccctccatccacaagctgcggcagcaccgcccactggggcggacccagtcggccccgctgccccagaacgcccaggctctgcagcacctggtcatccagcagcagcatcagcagtttctggagaaacacaagcagcagttccagcagcagcaactgcagatgaacaagatcatccccaagccaagcgagccagcccggcagccggagagccacccggaggagacggaggaggagctccgtgagcaccaggctctgctggacgagccctacctggaccggctgccggggcagaaggaggcgcacgcacaggccggcgtgcaggtgaagcaggagcccattgagagcgatgaggaagaggcagagcccccacgggaggtggagccgggccagcgccagcccagtgagcaggagctgctcttcagacagcaagccctcctgctggagcagcagcggatccaccagctgaggaactaccaggcgtccatggaggccgccggcatccccgtgtccttcggcggccacaggcctctgtcccgggcgcagtcctcacccgcgtctgccaccttccccgtgtctgtgcaggagccccccaccaagccgaggttcacgacaggcctcgtgtatgacacgctgatgctgaagcaccagtgcacctgcgggagtagcagcagccaccccgagcacgccgggaggatccagagcatctggtcccgcctgcaggagacgggcctccggggcaaatgcgagtgcatccgcggacgcaaggccaccctggaggagctacagacggtgcactcggaagcccacaccctcctgtatggcacgaaccccctcaaccggcagaaactggacagtaagaaacttctaggctcgctcgcctccgtgttcgtccggctcccttgcggtggtgttggggtggacagtgacaccatatggaacgaggtgcactcggcgggggcagcccgcctggctgtgggctgcgtggtagagctggtcttcaaggtggccacaggggagctgaagaatggctttgctgtggtccgcccccctggacaccatgcggaggagagcacgcccatgggcttttgctacttcaactccgtggccgtggcagccaagcttctgcagcagaggttgagcgtgagcaagatcctcatcgtggactgggacgtgcaccatggaaacgggacccagcaggctttctacagcgaccctagcgtcctgtacatgtccctccaccgctacgacgatgggaacttcttcccaggcagcggggctcctgatgaggtgggcacagggcccggcgtgggtttcaacgtcaacatggctttcaccggcggcctggacccccccatgggagacgctgagtacttggcggccttcagaacggtggtcatgccgatcgccagcgagtttgccccggatgtggtgctggtgtcatcaggcttcgatgccgtggagggccaccccacccctcttgggggctacaacctctccgccagatgcttcgggtacctgacgaagcagctgatgggcctggctggcggccggattgtcctggccctcgagggaggccacgacctgaccgccatttgcgacgcctcggaagcatgtgtttctgccttgctgggaaacgagcttgatcctctcccagaaaaggttttacagcaaagacccaatgcaaacgctgtccgttccatggagaaagtcatggagatccacagcaagtactggcgctgcctgcagcgcacaacctccacagcggggcgttctctgatcgaggctcagacttgcgagaacgaagaagccgagacggtcaccgccatggcctcgctgtccgtgggcgtgaagcccgccgaaaagagaccagatgaggagcccatggaagaggagccgcccctgtagcactccctcgaagctgctgttctcttgtctgtctgtctctgtcttgaagctcagccaagaaactttcccgtgtcacgcctgcgtcccaccgtggggctctcttggagcacccagggacacccagcgtgcaacagccacgggaagcctttctgccgcccaggcccacaggtctcgagacgcacatgcacgcctgggcgtggcagcctcacagggaacacgggacagacgccggcgacgcgcagacacacggacacgcggaagccaagcacactctggcgggtcccgcaagggacgccgtggaagaaaggagcctgtggcaacaggcggccgagctgccgaattcagttgacacgaggcacagaaaacaaatatcaaagatctaataatacaaaacaaacttgattaaaactggtgcttaaagtttattacccacaactccacagtctctgtgtaaaccactcgactcatcttgtagcttatttttttttaaagaggacgttttctacggctgtggcccgcctctgtgaaccatagcggtgtgcggcggggggtctgcacccgggtgggggacagagggacctttaaagaaaacaaaactggacagaaacaggaatgtgagctgggggagctggcttgagtttctcaaaagccatcggaagatgcgagtttgtgcctttttttttattgctctggtggatttttgtggctgggttttctgaagtctgaggaacaatgccttaagaaaaaacaaacagcaggaatcggtgggacagtttcctgtggccagccgagcctggcagtgctggcaccgcgagctggcctgacgcctcaagcacgggcaccagccgtcatctccggggccaggggctgcagcccggcggtccctgttttgctttattgctgtttaagaaaaatggaggtagttccaaaaaagtggcaaatcccgttggaggttttgaagtccaacaaattttaaacgaatccaaagtgttctcacacgtcacatacgattgagcatctccatctggtcgtgaagcatgtggtaggcacacttgcagtgttacgatcggaatgctttttattaaaagcaagtagcatgaagtattgcttaaattttaggtataaataaatatatatatgtataatatatattccaatgtattccaagctaagaaacttacttgattcttatgaaatcttgataaaatatttataatgcatttatagaaaaagtatatatatatatataaaatgaatgcagattgcgaaggtccctgcaaatggatggcttgtgaatttgctctcaaggtgcttatggaaagggatcctgattgattgaaattcatgttttctcaagctccagattggctagatttcagatcgccaacacattcgccactgggcaactaccctacaagtttgtactttcattttaattattttctaacagaaccgctcccgtctccaagccttcatgcacatatgtacctaatgagtttttatagcaaagaatataaatttgctgttgatttttgtatgaattttttcacaaaaagatcctgaataagcattgttttatgaattttacatttttcctcaccatttagcaattttctgaatggtaataatgtctaaatctttttcctttctgaattcttgcttgtacatttttttttacctttcaaaggtttttaattatttttgtttttatttttgtacgatgagttttctgcagcgtacagaattgttgctgtcagattctattttcagaaagtgagaggagggaccgtaggtcttttcggagtgacaccaacgattgtgtctttcctggtctgtcctaggagctgtataaagaagcccaggggctctttttaactttcaacactagtagtattacgaggggtggtgtgtttttcccctccgtggcaagggcagggagggttgcttaggatgcccggccaccctgggaggcttgccagatgccgggggcagtcagcattaatgaaactcatgtttaaacttctctgaccacatcgtcaggatagaattctaacttgagttttccaaagaccttttgagcatgtcagcaatgcatggggcacacgtggggctctttacccacttgggtttttccactgcagccacgtggccagccctggattttggagcctgtggctgcaaggaacccagggacccttgttgcctggtgaacctgcagggagggtatgattgcctgaccaggacagccagtctttactctttttctcttcaacagtaactgacagtcacgttttactggtaacttattttccagcacatgaagccaccagtttcattccaaagtgtatattgggttcagacttgggggcagaagttcagacacaccgtgctcaggagggacccagagccgagtttcggagtttggtaaagtttacagggtagcttctgaaattaactcaaacttttgaccaaatgagtgcagattcttggattcacttggtcactgggctgctgatggtcagctctgagacagtggtttgagagcaggcagaacggtcttgggacttgtttgactttcccctccctggtggccactctttgctctgaagcccagattggcaagaggagctggtccattccccattcatggcacagagcagtggcagggcccagctagcaggctcttctggcctccttggcctcattctctgcttagccctctggggatcctgccacctgccctcttaccccgccgtggcttatggggaggaatgcatcatctcactttttttttttaagcagatgatgggataacatggactgctcagtggccaggttatcagtggggggacttaattctaatctcattcaaatggagacgccctctgcaaaggcctggcagggggaggcacgtttcatctgtcagctcactccagcttcacaaatgtgctgagagcattactgtgtagccttttctttgaagacacactcggctcttctccacagcaagcgtccagggcagatggcagaggatctgcctcggcgtctgcaggcgggaccacgtcagggagggttccttcatgtgttctccctgtgggtccttggacctttagcctttttcttcctttgcaaaggccttgggggcactggctgggagtcagcaagcgagcactttatatccctttgagggaaaccctgatgacgccactgggcctcttggcgtctgccctgccctcgcggcttcccgccgtgccgcagcgtgcccacgtgcccacgccccaccagcaggcggctgtcccggaggccgtggcccgctgggactggccgcccctccccagcgtcccagggctctggttctggagggccactttgtcaaggtgtttcagtttttctttacttcttttgaaaatctgtttgcaaggggaaggaccatttcgtaatggtctgacacaaaagcaagtttgatttttgcagcactagcaatggactttgttgtttttctttttgatcagaacattccttctttactggtcacagccacgtgctcattccattcttctttttgtagactttgggcccacgtgttttatgggcattgatacatatataaatatatagatataaatatatatgaatatatttttttaagtttcctacacctggaggttgcatggactgtacgaccggcatgactttatattgtatacagattttgcacgccaaactcggcagctttggggaagaagaaaaatgcctttctgttcccctctcatgacatttgcagatacaaaagatggaaatttttctgtaaaacaaaaccttgaaggagaggagggcggggaagtttgcgtcttattgaacttattcttaagaaattgtactttttattgtaagaaaaataaaaaggactacttaaacatttgtcatattaagaaaaaaagtttatctagcacttgtgacataccaataatagagtttattgtatttatgtggaaacagtgttttagggaaactactcagaattcacagtgaactgcctgtctctctcgagttgatttggaggaattttgttttgttttgttttgtttgtttccttttatctccttccacgggccaggcgagcgccgcccgccctcactggccttgtgacggtttattctgattgagaactgggcggactcgaaagagtccccttttccgcacagctgtgttgactttttaattacttttaggtgatgtatggctaagatttcactttaagcagtcgtgaactgtgcgagcactgtggtttacaattatactttgcatcgaaaggaaaccatttcttcattgtaacgaagctgagcgtgttcttagctcggcctcactttgtctctggcattgattaaaagtctgctattgaaaga

SEQ ID NO: 101629 - DNA, 1502 bp, Homo sapiens
tgaatgaggaggggaggttgtggggccgccgccgcggagcaccgtccccgccgccgcccgagcccgagcccgagcccgcgcacccgcccgcgccgccgccgccgccgcccgaacagcctcccagcctgggcccccggcggcgccgtggccgcgtcccggctgtcgccgcccgagcccgagcccgcgcgccggcgggtggcggcgcaggctgaggagatgcggcgcggagcgccggagcagggctagagccggccgccgccgcccgccgcggttcatctgcagaagccagcggacgcctctgttcaacttgtgggttacctggctcatgagaccttgccggcgaggctcggcgcttgaacgtctgtgacccagccctcaccgtcccggtacttgtatgtgttggtgggagtttggagctcgttggagctatcgtttccgtggaaattttgagccatttcgaatcacttaaaggagtggacattgctagcaatgagctcccaaagccatccagatggactttctggccgagaccagccagtggagctgctgaatcctgcccgcgtgaaccacatgcccagcacggtggatgtggccacggcgctgcctctgcaagtggccccctcggcagtgcccatggacctgcgcctggaccaccagttctcactgcctgtggcagagccggccctgcgggagcagcagctgcagcaggagctcctggcgctcaagcagaagcagcagatccagaggcagatcctcatcgctgagttccagaggcagcacgagcagctctcccggcagcacgaggcgcagctccacgagcacatcaaggccaacacagatgctggctgaggatggcctcaggggctcctgctgaattccatttttcctgttgtcactgcaccctggtgagccctgcagtccttgccgttgatccacctggagcattcacagtgcatgattaggaccccaccccgaagccgccatggctgtcggtgcagagcgaggttaaagagatgggattgctgatgtctcattccgtgctggttgaatttgtagcttttacaagaagacgacgtagatgagaagctgagaagtaagcctaagccccgtgtgtttgactggggctcctcaaggtagtcctaggaggccagaagacataaagaagacacttgagttggggtcagtgctgccatctcagggtgaggccaggtctcacctccagaacccctctgcctctcctcttctggtgccccaggagctggcttcactgcttggaagagagcaccccgaccccagtcctcacgtcgctcctacaggccaggccttcaggccatgctcctcattcctggaggggtccctgggaaagcccaccccatcaccctctgagagatggccagagaccttagaaccatggctctggagccagtctctgggccagggtctcaaaagcacagaaagaagttcaaggttgcctttctctttgcattttaatcatttatttc

SEQ ID NO: 101630 - DNA, 7416 bp, Homo sapiens
tgtcccaggtggagtgggtcgtatggggccggccaagtccctggaggagtgggtcataacaggccagctgtgacctcagaggagtgggccgtatcgggctggtggagaccctgctggagtgggccatatcagcacggccatgtcctctccaagtcaagaaccctgcaaacatgggcgcatttccatttgggccataaacctttattgggaaaagtgaacctagagcttctgctgctttgtttcatgggtgtgagcctgtggttcttactgatgcttctactgagaatggtcctggatttcacctggagagcgccctaaagcttgacagaaagaacggatttagagatcagtattttttccagaaagatgtgcccagtagtatcaggagagaatctgtgggctgattcttacaaatcgccctccaggttccctttctggggactgatgctattattaatcaaattccatcaacaaaaccaaagtccgcgcttctgaaccgaatctgaaattacggtccaggctaaagcagaaagtggccgaaagacggagcagccccctgttacgcaggaaagacgggccagtggtcactgctctaaaaaagcgtccgttggatgtcacagactccgcgtgcagcagcgccccaggctccggacccagctcacccaacaacagctccgggagcgtcagcgcggagaacggtatcgcgcccgccgtccccagcatcccggcggagacgagtttggcgcacagacttgtggcacgagaaggctcggccgctccacttcccctctacacatcgccatccttgcccaacatcacgctgggcctgcctgccaccggcccctctgcgggcacggcgggccagcaggacgccgagagactcacccttcccgccctccagcagaggctctcccttttccccggcacccacctcactccctacctgagcacctcgcccttggagcgggacggaggggcagcgcacagccctcttctgcagcacatggtcttactggagcagccaccggcacaagcacccctcgtcacaggcctgggagcactgcccctccacgcacagtccttggttggtgcagaccgggtgtccccctccatccacaagctgcggcagcaccgcccactggggcggacccagtcggccccgctgccccagaacgcccaggctctgcagcacctggtcatccagcagcagcatcagcagtttctggagaaacacaagcagcagttccagcagcagcaactgcagatgaacaagatcatccccaagccaagcgagccagcccggcagccggagagccacccggaggagacggaggaggagctccgtgagcaccaggctctgctggacgagccctacctggaccggctgccggggcagaaggaggcgcacgcacaggccggcgtgcaggtgaagcaggagcccattgagagcgatgaggaagaggcagagcccccacgggaggtggagccgggccagcgccagcccagtgagcaggagctgctcttcagacagcaagccctcctgctggagcagcagcggatccaccagctgaggaactaccaggcgtccatggaggccgccggcatccccgtgtccttcggcggccacaggcctctgtcccgggcgcagtcctcacccgcgtctgccaccttccccgtgtctgtgcaggagccccccaccaagccgaggttcacgacaggcctcgtgtatgacacgctgatgctgaagcaccagtgcacctgcgggagtagcagcagccaccccgagcacgccgggaggatccagagcatctggtcccgcctgcaggagacgggcctccggggcaaatgcgagtgcatccgcggacgcaaggccaccctggaggagctacagacggtgcactcggaagcccacaccctcctgtatggcacgaaccccctcaaccggcagaaactggacagtaagaaacttctaggctcgctcgcctccgtgttcgtccggctcccttgcggtggtgttggggtggacagtgacaccatatggaacgaggtgcactcggcgggggcagcccgcctggctgtgggctgcgtggtagagctggtcttcaaggtggccacaggggagctgaagaatggctttgctgtggtccgcccccctggacaccatgcggaggagagcacgcccatgggcttttgctacttcaactccgtggccgtggcagccaagcttctgcagcagaggttgagcgtgagcaagatcctcatcgtggactgggacgtgcaccatggaaacgggacccagcaggctttctacagcgaccctagcgtcctgtacatgtccctccaccgctacgacgatgggaacttcttcccaggcagcggggctcctgatgaggtgggcacagggcccggcgtgggtttcaacgtcaacatggctttcaccggcggcctggacccccccatgggagacgctgagtacttggcggccttcagaacggtggtcatgccgatcgccagcgagtttgccccggatgtggtgctggtgtcatcaggcttcgatgccgtggagggccaccccacccctcttgggggctacaacctctccgccagatgcttcgggtacctgacgaagcagctgatgggcctggctggcggccggattgtcctggccctcgagggaggccacgacctgaccgccatttgcgacgcctcggaagcatgtgtttctgccttgctgggaaacgagcttgatcctctcccagaaaaggttttacagcaaagacccaatgcaaacgctgtccgttccatggagaaagtcatggagatccacagcaagtactggcgctgcctgcagcgcacaacctccacagcggggcgttctctgatcgaggctcagacttgcgagaacgaagaagccgagacggtcaccgccatggcctcgctgtccgtgggcgtgaagcccgccgaaaagagaccagatgaggagcccatggaagaggagccgcccctgtagcactccctcgaagctgctgttctcttgtctgtctgtctctgtcttgaagctcagccaagaaactttcccgtgtcacgcctgcgtcccaccgtggggctctcttggagcacccagggacacccagcgtgcaacagccacgggaagcctttctgccgcccaggcccacaggtctcgagacgcacatgcacgcctgggcgtggcagcctcacagggaacacgggacagacgccggcgacgcgcagacacacggacacgcggaagccaagcacactctggcgggtcccgcaagggacgccgtggaagaaaggagcctgtggcaacaggcggccgagctgccgaattcagttgacacgaggcacagaaaacaaatatcaaagatctaataatacaaaacaaacttgattaaaactggtgcttaaagtttattacccacaactccacagtctctgtgtaaaccactcgactcatcttgtagcttatttttttttaaagaggacgttttctacggctgtggcccgcctctgtgaaccatagcggtgtgcggcggggggtctgcacccgggtgggggacagagggacctttaaagaaaacaaaactggacagaaacaggaatgtgagctgggggagctggcttgagtttctcaaaagccatcggaagatgcgagtttgtgcctttttttttattgctctggtggatttttgtggctgggttttctgaagtctgaggaacaatgccttaagaaaaaacaaacagcaggaatcggtgggacagtttcctgtggccagccgagcctggcagtgctggcaccgcgagctggcctgacgcctcaagcacgggcaccagccgtcatctccggggccaggggctgcagcccggcggtccctgttttgctttattgctgtttaagaaaaatggaggtagttccaaaaaagtggcaaatcccgttggaggttttgaagtccaacaaattttaaacgaatccaaagtgttctcacacgtcacatacgattgagcatctccatctggtcgtgaagcatgtggtaggcacacttgcagtgttacgatcggaatgctttttattaaaagcaagtagcatgaagtattgcttaaattttaggtataaataaatatatatatgtataatatatattccaatgtattccaagctaagaaacttacttgattcttatgaaatcttgataaaatatttataatgcatttatagaaaaagtatatatatatatataaaatgaatgcagattgcgaaggtccctgcaaatggatggcttgtgaatttgctctcaaggtgcttatggaaagggatcctgattgattgaaattcatgttttctcaagctccagattggctagatttcagatcgccaacacattcgccactgggcaactaccctacaagtttgtactttcattttaattattttctaacagaaccgctcccgtctccaagccttcatgcacatatgtacctaatgagtttttatagcaaagaatataaatttgctgttgatttttgtatgaattttttcacaaaaagatcctgaataagcattgttttatgaattttacatttttcctcaccatttagcaattttctgaatggtaataatgtctaaatctttttcctttctgaattcttgcttgtacatttttttttacctttcaaaggtttttaattatttttgtttttatttttgtacgatgagttttctgcagcgtacagaattgttgctgtcagattctattttcagaaagtgagaggagggaccgtaggtcttttcggagtgacaccaacgattgtgtctttcctggtctgtcctaggagctgtataaagaagcccaggggctctttttaactttcaacactagtagtattacgaggggtggtgtgtttttcccctccgtggcaagggcagggagggttgcttaggatgcccggccaccctgggaggcttgccagatgccgggggcagtcagcattaatgaaactcatgtttaaacttctctgaccacatcgtcaggatagaattctaacttgagttttccaaagaccttttgagcatgtcagcaatgcatggggcacacgtggggctctttacccacttgggtttttccactgcagccacgtggccagccctggattttggagcctgtggctgcaaggaacccagggacccttgttgcctggtgaacctgcagggagggtatgattgcctgaccaggacagccagtctttactctttttctcttcaacagtaactgacagtcacgttttactggtaacttattttccagcacatgaagccaccagtttcattccaaagtgtatattgggttcagacttgggggcagaagttcagacacaccgtgctcaggagggacccagagccgagtttcggagtttggtaaagtttacagggtagcttctgaaattaactcaaacttttgaccaaatgagtgcagattcttggattcacttggtcactgggctgctgatggtcagctctgagacagtggtttgagagcaggcagaacggtcttgggacttgtttgactttcccctccctggtggccactctttgctctgaagcccagattggcaagaggagctggtccattccccattcatggcacagagcagtggcagggcccagctagcaggctcttctggcctccttggcctcattctctgcttagccctctggggatcctgccacctgccctcttaccccgccgtggcttatggggaggaatgcatcatctcactttttttttttaagcagatgatgggataacatggactgctcagtggccaggttatcagtggggggacttaattctaatctcattcaaatggagacgccctctgcaaaggcctggcagggggaggcacgtttcatctgtcagctcactccagcttcacaaatgtgctgagagcattactgtgtagccttttctttgaagacacactcggctcttctccacagcaagcgtccagggcagatggcagaggatctgcctcggcgtctgcaggcgggaccacgtcagggagggttccttcatgtgttctccctgtgggtccttggacctttagcctttttcttcctttgcaaaggccttgggggcactggctgggagtcagcaagcgagcactttatatccctttgagggaaaccctgatgacgccactgggcctcttggcgtctgccctgccctcgcggcttcccgccgtgccgcagcgtgcccacgtgcccacgccccaccagcaggcggctgtcccggaggccgtggcccgctgggactggccgcccctccccagcgtcccagggctctggttctggagggccactttgtcaaggtgtttcagtttttctttacttcttttgaaaatctgtttgcaaggggaaggaccatttcgtaatggtctgacacaaaagcaagtttgatttttgcagcactagcaatggactttgttgtttttctttttgatcagaacattccttctttactggtcacagccacgtgctcattccattcttctttttgtagactttgggcccacgtgttttatgggcattgatacatatataaatatatagatataaatatatatgaatatatttttttaagtttcctacacctggaggttgcatggactgtacgaccggcatgactttatattgtatacagattttgcacgccaaactcggcagctttggggaagaagaaaaatgcctttctgttcccctctcatgacatttgcagatacaaaagatggaaatttttctgtaaaacaaaaccttgaaggagaggagggcggggaagtttgcgtcttattgaacttattcttaagaaattgtactttttattgtaagaaaaataaaaaggactacttaaacatttgtcatattaagaaaaaaagtttatctagcacttgtgacataccaataatagagtttattgtatttatgtggaaacagtgttttagggaaactactcagaattcacagtgaactgcctgtctctctcgagttgatttggaggaattttgttttgttttgttttgtttgtttccttttatctccttccacgggccaggcgagcgccgcccgccctcactggccttgtgacggtttattctgattgagaactgggcggactcgaaagagtccccttttccgcacagctgtgttgactttttaattacttttaggtgatgtatggctaagatttcactttaagcagtcgtgaactgtgcgagcactgtggtttacaattatactttgcatcgaaaggaaaccatttcttcattgtaacgaagctgagcgtgttcttagctcggcctcactttgtctctggcattgattaaaagtctgctattgaaaga

SEQ ID NO: 101631 - DNA, 8327 bp, Homo sapiens
tgaatgaggaggggaggttgtggggccgccgccgcggagcaccgtccccgccgccgcccgagcccgagcccgagcccgcgcacccgcccgcgccgccgccgccgccgcccgaacagcctcccagcctgggcccccggcggcgccgtggccgcgtcccggctgtcgccgcccgagcccgagcccgcgcgccggcgggtggcggcgcaggctgaggagatgcggcgcggagcgccggagcagggctagagccggccgccgccgcccgccgcggtaagcgcagccccggcccggcgcccgcgggccattgtccgccgcccgccccgcgccccgcgcagcctgcaggccttggagcccgcggcaggtggacgccgccggtccacacccgccccgcgcgcggccgtgggaggcgggggccagcgctggccgcgcgccgtgggacccgccggtccccagggccgcccggccccttctggacctttccacccgcgccgcgaggcggcttcgcccgccggggcgggggcgcgggggtgggcacggcaggcagcggcgccgtctcccggtgcggggcccgcgccccccgagcaggttcatctgcagaagccagcggacgcctctgttcaacttgtgggttacctggctcatgagaccttgccggcgaggctcggcgcttgaacgtctgtgacccagccctcaccgtcccggtacttgtatgtgttggtgggagtttggagctcgttggagctatcgtttccgtggaaattttgagccatttcgaatcacttaaaggagtggacattgctagcaatgagctcccaaagccatccagatggactttctggccgagaccagccagtggagctgctgaatcctgcccgcgtgaaccacatgcccagcacggtggatgtggccacggcgctgcctctgcaagtggccccctcggcagtgcccatggacctgcgcctggaccaccagttctcactgcctgtggcagagccggccctgcgggagcagcagctgcagcaggagctcctggcgctcaagcagaagcagcagatccagaggcagatcctcatcgctgagttccagaggcagcacgagcagctctcccggcagcacgaggcgcagctccacgagcacatcaagcaacaacaggagatgctggccatgaagcaccagcaggagctgctggaacaccagcggaagctggagaggcaccgccaggagcaggagctggagaagcagcaccgggagcagaagctgcagcagctcaagaacaaggagaagggcaaagagagtgccgtggccagcacagaagtgaagatgaagttacaagaatttgtcctcaataaaaagaaggcgctggcccaccggaatctgaaccactgcatttccagcgaccctcgctactggtacgggaaaacgcagcacagttcccttgaccagagttctccaccccagagcggagtgtcgacctcctataaccacccggtcctgggaatgtacgacgccaaagatgacttccctcttaggaaaacagcttctgaaccgaatctgaaattacggtccaggctaaagcagaaagtggccgaaagacggagcagccccctgttacgcaggaaagacgggccagtggtcactgctctaaaaaagcgtccgttggatgtcacagactccgcgtgcagcagcgccccaggctccggacccagctcacccaacaacagctccgggagcgtcagcgcggagaacggtatcgcgcccgccgtccccagcatcccggcggagacgagtttggcgcacagacttgtggcacgagaaggctcggccgctccacttcccctctacacatcgccatccttgcccaacatcacgctgggcctgcctgccaccggcccctctgcgggcacggcgggccagcaggacgccgagagactcacccttcccgccctccagcagaggctctcccttttccccggcacccacctcactccctacctgagcacctcgcccttggagcgggacggaggggcagcgcacagccctcttctgcagcacatggtcttactggagcagccaccggcacaagcacccctcgtcacaggcctgggagcactgcccctccacgcacagtccttggttggtgcagaccgggtgtccccctccatccacaagctgcggcagcaccgcccactggggcggacccagtcggccccgctgccccagaacgcccaggctctgcagcacctggtcatccagcagcagcatcagcagtttctggagaaacacaagcagcagttccagcagcagcaactgcagatgaacaagatcatccccaagccaagcgagccagcccggcagccggagagccacccggaggagacggaggaggagctccgtgagcaccaggctctgctggacgagccctacctggaccggctgccggggcagaaggaggcgcacgcacaggccggcgtgcaggtgaagcaggagcccattgagagcgatgaggaagaggcagagcccccacgggaggtggagccgggccagcgccagcccagtgagcaggagctgctcttcagacagcaagccctcctgctggagcagcagcggatccaccagctgaggaactaccaggcgtccatggaggccgccggcatccccgtgtccttcggcggccacaggcctctgtcccgggcgcagtcctcacccgcgtctgccaccttccccgtgtctgtgcaggagccccccaccaagccgaggttcacgacaggcctcgtgtatgacacgctgatgctgaagcaccagtgcacctgcgggagtagcagcagccaccccgagcacgccgggaggatccagagcatctggtcccgcctgcaggagacgggcctccggggcaaatgcgagtgcatccgcggacgcaaggccaccctggaggagctacagacggtgcactcggaagcccacaccctcctgtatggcacgaaccccctcaaccggcagaaactggacagtaagaaacttctaggctcgctcgcctccgtgttcgtccggctcccttgcggtggtgttggggtggacagtgacaccatatggaacgaggtgcactcggcgggggcagcccgcctggctgtgggctgcgtggtagagctggtcttcaaggtggccacaggggagctgaagaatggctttgctgtggtccgcccccctggacaccatgcggaggagagcacgcccatgggcttttgctacttcaactccgtggccgtggcagccaagcttctgcagcagaggttgagcgtgagcaagatcctcatcgtggactgggacgtgcaccatggaaacgggacccagcaggctttctacagcgaccctagcgtcctgtacatgtccctccaccgctacgacgatgggaacttcttcccaggcagcggggctcctgatgaggtgggcacagggcccggcgtgggtttcaacgtcaacatggctttcaccggcggcctggacccccccatgggagacgctgagtacttggcggccttcagaacggtggtcatgccgatcgccagcgagtttgccccggatgtggtgctggtgtcatcaggcttcgatgccgtggagggccaccccacccctcttgggggctacaacctctccgccagatgcttcgggtacctgacgaagcagctgatgggcctggctggcggccggattgtcctggccctcgagggaggccacgacctgaccgccatttgcgacgcctcggaagcatgtgtttctgccttgctgggaaacgagcttgatcctctcccagaaaaggttttacagcaaagacccaatgcaaacgctgtccgttccatggagaaagtcatggagatccacagcaagtactggcgctgcctgcagcgcacaacctccacagcggggcgttctctgatcgaggctcagacttgcgagaacgaagaagccgagacggtcaccgccatggcctcgctgtccgtgggcgtgaagcccgccgaaaagagaccagatgaggagcccatggaagaggagccgcccctgtagcactccctcgaagctgctgttctcttgtctgtctgtctctgtcttgaagctcagccaagaaactttcccgtgtcacgcctgcgtcccaccgtggggctctcttggagcacccagggacacccagcgtgcaacagccacgggaagcctttctgccgcccaggcccacaggtctcgagacgcacatgcacgcctgggcgtggcagcctcacagggaacacgggacagacgccggcgacgcgcagacacacggacacgcggaagccaagcacactctggcgggtcccgcaagggacgccgtggaagaaaggagcctgtggcaacaggcggccgagctgccgaattcagttgacacgaggcacagaaaacaaatatcaaagatctaataatacaaaacaaacttgattaaaactggtgcttaaagtttattacccacaactccacagtctctgtgtaaaccactcgactcatcttgtagcttatttttttttaaagaggacgttttctacggctgtggcccgcctctgtgaaccatagcggtgtgcggcggggggtctgcacccgggtgggggacagagggacctttaaagaaaacaaaactggacagaaacaggaatgtgagctgggggagctggcttgagtttctcaaaagccatcggaagatgcgagtttgtgcctttttttttattgctctggtggatttttgtggctgggttttctgaagtctgaggaacaatgccttaagaaaaaacaaacagcaggaatcggtgggacagtttcctgtggccagccgagcctggcagtgctggcaccgcgagctggcctgacgcctcaagcacgggcaccagccgtcatctccggggccaggggctgcagcccggcggtccctgttttgctttattgctgtttaagaaaaatggaggtagttccaaaaaagtggcaaatcccgttggaggttttgaagtccaacaaattttaaacgaatccaaagtgttctcacacgtcacatacgattgagcatctccatctggtcgtgaagcatgtggtaggcacacttgcagtgttacgatcggaatgctttttattaaaagcaagtagcatgaagtattgcttaaattttaggtataaataaatatatatatgtataatatatattccaatgtattccaagctaagaaacttacttgattcttatgaaatcttgataaaatatttataatgcatttatagaaaaagtatatatatatatataaaatgaatgcagattgcgaaggtccctgcaaatggatggcttgtgaatttgctctcaaggtgcttatggaaagggatcctgattgattgaaattcatgttttctcaagctccagattggctagatttcagatcgccaacacattcgccactgggcaactaccctacaagtttgtactttcattttaattattttctaacagaaccgctcccgtctccaagccttcatgcacatatgtacctaatgagtttttatagcaaagaatataaatttgctgttgatttttgtatgaattttttcacaaaaagatcctgaataagcattgttttatgaattttacatttttcctcaccatttagcaattttctgaatggtaataatgtctaaatctttttcctttctgaattcttgcttgtacatttttttttacctttcaaaggtttttaattatttttgtttttatttttgtacgatgagttttctgcagcgtacagaattgttgctgtcagattctattttcagaaagtgagaggagggaccgtaggtcttttcggagtgacaccaacgattgtgtctttcctggtctgtcctaggagctgtataaagaagcccaggggctctttttaactttcaacactagtagtattacgaggggtggtgtgtttttcccctccgtggcaagggcagggagggttgcttaggatgcccggccaccctgggaggcttgccagatgccgggggcagtcagcattaatgaaactcatgtttaaacttctctgaccacatcgtcaggatagaattctaacttgagttttccaaagaccttttgagcatgtcagcaatgcatggggcacacgtggggctctttacccacttgggtttttccactgcagccacgtggccagccctggattttggagcctgtggctgcaaggaacccagggacccttgttgcctggtgaacctgcagggagggtatgattgcctgaccaggacagccagtctttactctttttctcttcaacagtaactgacagtcacgttttactggtaacttattttccagcacatgaagccaccagtttcattccaaagtgtatattgggttcagacttgggggcagaagttcagacacaccgtgctcaggagggacccagagccgagtttcggagtttggtaaagtttacagggtagcttctgaaattaactcaaacttttgaccaaatgagtgcagattcttggattcacttggtcactgggctgctgatggtcagctctgagacagtggtttgagagcaggcagaacggtcttgggacttgtttgactttcccctccctggtggccactctttgctctgaagcccagattggcaagaggagctggtccattccccattcatggcacagagcagtggcagggcccagctagcaggctcttctggcctccttggcctcattctctgcttagccctctggggatcctgccacctgccctcttaccccgccgtggcttatggggaggaatgcatcatctcactttttttttttaagcagatgatgggataacatggactgctcagtggccaggttatcagtggggggacttaattctaatctcattcaaatggagacgccctctgcaaaggcctggcagggggaggcacgtttcatctgtcagctcactccagcttcacaaatgtgctgagagcattactgtgtagccttttctttgaagacacactcggctcttctccacagcaagcgtccagggcagatggcagaggatctgcctcggcgtctgcaggcgggaccacgtcagggagggttccttcatgtgttctccctgtgggtccttggacctttagcctttttcttcctttgcaaaggccttgggggcactggctgggagtcagcaagcgagcactttatatccctttgagggaaaccctgatgacgccactgggcctcttggcgtctgccctgccctcgcggcttcccgccgtgccgcagcgtgcccacgtgcccacgccccaccagcaggcggctgtcccggaggccgtggcccgctgggactggccgcccctccccagcgtcccagggctctggttctggagggccactttgtcaaggtgtttcagtttttctttacttcttttgaaaatctgtttgcaaggggaaggaccatttcgtaatggtctgacacaaaagcaagtttgatttttgcagcactagcaatggactttgttgtttttctttttgatcagaacattccttctttactggtcacagccacgtgctcattccattcttctttttgtagactttgggcccacgtgttttatgggcattgatacatatataaatatatagatataaatatatatgaatatatttttttaagtttcctacacctggaggttgcatggactgtacgaccggcatgactttatattgtatacagattttgcacgccaaactcggcagctttggggaagaagaaaaatgcctttctgttcccctctcatgacatttgcagatacaaaagatggaaatttttctgtaaaacaaaaccttgaaggagaggagggcggggaagtttgcgtcttattgaacttattcttaagaaattgtactttttattgtaagaaaaataaaaaggactacttaaacatttgtcatattaagaaaaaaagtttatctagcacttgtgacataccaataatagagtttattgtatttatgtggaaacagtgttttagggaaactactcagaattcacagtgaactgcctgtctctctcgagttgatttggaggaattttgttttgttttgttttgtttgtttccttttatctccttccacgggccaggcgagcgccgcccgccctcactggccttgtgacggtttattctgattgagaactgggcggactcgaaagagtccccttttccgcacagctgtgttgactttttaattacttttaggtgatgtatggcgttgctggaaggtccggctcgatc

SEQ ID NO: 101632 - DNA, 9001 bp, Homo sapiens
tgaatgaggaggggaggttgtggggccgccgccgcggagcaccgtccccgccgccgcccgagcccgagcccgagcccgcgcacccgcccgcgccgccgccgccgccgcccgaacagcctcccagcctgggcccccggcggcgccgtggccgcgtcccggctgtcgccgcccgagcccgagcccgcgcgccggcgggtggcggcgcaggctgaggagatgcggcgcggagcgccggagcagggctagagccggccgccgccgcccgccgcggtaagcgcagccccggcccggcgcccgcgggccattgtccgccgcccgccccgcgccccgcgcagcctgcaggccttggagcccgcggcaggtggacgccgccggtccacacccgccccgcgcgcggccgtgggaggcgggggccagcgctggccgcgcgccgtgggacccgccggtccccagggccgcccggccccttctggacctttccacccgcgccgcgaggcggcttcgcccgccggggcgggggcgcgggggtgggcacggcaggcagcggcgccgtctcccggtgcggggcccgcgccccccgagcaggttcatctgcagaagccagcggacgcctctgttcaacttgtgggttacctggctcatgagaccttgccggcgaggctcggcgcttgaacgtctgtgacccagccctcaccgtcccggtacttgtatgtgttggtgggagtttggagctcgttggagctatcgtttccgtggaaattttgagccatttcgaatcacttaaaggagtggacattgctagcaatgagctcccaaagccatccagatggactttctggccgagaccagccagtggagctgctgaatcctgcccgcgtgaaccacatgcccagcacggtggatgtggccacggcgctgcctctgcaagtggccccctcggcagtgcccatggacctgcgcctggaccaccagttctcactgcctgtggcagagccggccctgcgggagcagcagctgcagcaggagctcctggcgctcaagcagaagcagcagatccagaggcagatcctcatcgctgagttccagaggcagcacgagcagctctcccggcagcacgaggcgcagctccacgagcacatcaagcaacaacaggagatgctggccatgaagcaccagcaggagctgctggaacaccagcggaagctggagaggcaccgccaggagcaggagctggagaagcagcaccgggagcagaagctgcagcagctcaagaacaaggagaagggcaaagagagtgccgtggccagcacagaagtgaagatgaagttacaagaatttgtcctcaataaaaagaaggcgctggcccaccggaatctgaaccactgcatttccagcgaccctcgctactggtacgggaaaacgcagcacagttcccttgaccagagttctccaccccagagcggagtgtcgacctcctataaccacccggtcctgggaatgtacgacgccaaagatgacttccctcttaggaaaacagcttctgaaccgaatctgaaattacggtccaggctaaagcagaaagtggccgaaagacggagcagccccctgttacgcaggaaagacgggccagtggtcactgctctaaaaaagcgtccgttggatgtcacagactccgcgtgcagcagcgccccaggctccggacccagctcacccaacaacagctccgggagcgtcagcgcggagaacggtatcgcgcccgccgtccccagcatcccggcggagacgagtttggcgcacagacttgtggcacgagaaggctcggccgctccacttcccctctacacatcgccatccttgcccaacatcacgctgggcctgcctgccaccggcccctctgcgggcacggcgggccagcaggacgccgagagactcacccttcccgccctccagcagaggctctcccttttccccggcacccacctcactccctacctgagcacctcgcccttggagcgggacggaggggcagcgcacagccctcttctgcagcacatggtcttactggagcagccaccggcacaagcacccctcgtcacaggcctgggagcactgcccctccacgcacagtccttggttggtgcagaccgggtgtccccctccatccacaagctgcggcagcaccgcccactggggcggacccagtcggccccgctgccccagaacgcccaggctctgcagcacctggtcatccagcagcagcatcagcagtttctggagaaacacaagcagcagttccagcagcagcaactgcagatgaacaagatcatccccaagccaagcgagccagcccggcagccggagagccacccggaggagacggaggaggagctccgtgagcaccaggctctgctggacgagccctacctggaccggctgccggggcagaaggaggcgcacgcacaggccggcgtgcaggtgaagcaggagcccattgagagcgatgaggaagaggcagagcccccacgggaggtggagccgggccagcgccagcccagtgagcaggagctgctcttcagacagcaagccctcctgctggagcagcagcggatccaccagctgaggaactaccaggcgtccatggaggccgccggcatccccgtgtccttcggcggccacaggcctctgtcccgggcgcagtcctcacccgcgtctgccaccttccccgtgtctgtgcaggagccccccaccaagccgaggttcacgacaggcctcgtgtatgacacgctgatgctgaagcaccagtgcacctgcgggagtagcagcagccaccccgagcacgccgggaggatccagagcatctggtcccgcctgcaggagacgggcctccggggcaaatgcgagtgcatccgcggacgcaaggccaccctggaggagctacagacggtgcactcggaagcccacaccctcctgtatggcacgaaccccctcaaccggcagaaactggacagtaagaaacttctaggctcgctcgcctccgtgttcgtccggctcccttgcggtggtgttggggtggacagtgacaccatatggaacgaggtgcactcggcgggggcagcccgcctggctgtgggctgcgtggtagagctggtcttcaaggtggccacaggggagctgaagaatggctttgctgtggtccgcccccctggacaccatgcggaggagagcacgcccatgggcttttgctacttcaactccgtggccgtggcagccaagcttctgcagcagaggttgagcgtgagcaagatcctcatcgtggactgggacgtgcaccatggaaacgggacccagcaggctttctacagcgaccctagcgtcctgtacatgtccctccaccgctacgacgatgggaacttcttcccaggcagcggggctcctgatgaggtgggcacagggcccggcgtgggtttcaacgtcaacatggctttcaccggcggcctggacccccccatgggagacgctgagtacttggcggccttcagaacggtggtcatgccgatcgccagcgagtttgccccggatgtggtgctggtgtcatcaggcttcgatgccgtggagggccaccccacccctcttgggggctacaacctctccgccagatgcttcgggtacctgacgaagcagctgatgggcctggctggcggccggattgtcctggccctcgagggaggccacgacctgaccgccatttgcgacgcctcggaagcatgtgtttctgccttgctgggaaacgagcttgatcctctcccagaaaaggttttacagcaaagacccaatgcaaacgctgtccgttccatggagaaagtcatggagatccacagcaagtactggcgctgcctgcagcgcacaacctccacagcggggcgttctctgatcgaggctcagacttgcgagaacgaagaagccgagacggtcaccgccatggcctcgctgtccgtgggcgtgaagcccgccgaaaagagaccagatgaggagcccatggaagaggagccgcccctgtagcactccctcgaagctgctgttctcttgtctgtctgtctctgtcttgaagctcagccaagaaactttcccgtgtcacgcctgcgtcccaccgtggggctctcttggagcacccagggacacccagcgtgcaacagccacgggaagcctttctgccgcccaggcccacaggtctcgagacgcacatgcacgcctgggcgtggcagcctcacagggaacacgggacagacgccggcgacgcgcagacacacggacacgcggaagccaagcacactctggcgggtcccgcaagggacgccgtggaagaaaggagcctgtggcaacaggcggccgagctgccgaattcagttgacacgaggcacagaaaacaaatatcaaagatctaataatacaaaacaaacttgattaaaactggtgcttaaagtttattacccacaactccacagtctctgtgtaaaccactcgactcatcttgtagcttatttttttttaaagaggacgttttctacggctgtggcccgcctctgtgaaccatagcggtgtgcggcggggggtctgcacccgggtgggggacagagggacctttaaagaaaacaaaactggacagaaacaggaatgtgagctgggggagctggcttgagtttctcaaaagccatcggaagatgcgagtttgtgcctttttttttattgctctggtggatttttgtggctgggttttctgaagtctgaggaacaatgccttaagaaaaaacaaacagcaggaatcggtgggacagtttcctgtggccagccgagcctggcagtgctggcaccgcgagctggcctgacgcctcaagcacgggcaccagccgtcatctccggggccaggggctgcagcccggcggtccctgttttgctttattgctgtttaagaaaaatggaggtagttccaaaaaagtggcaaatcccgttggaggttttgaagtccaacaaattttaaacgaatccaaagtgttctcacacgtcacatacgattgagcatctccatctggtcgtgaagcatgtggtaggcacacttgcagtgttacgatcggaatgctttttattaaaagcaagtagcatgaagtattgcttaaattttaggtataaataaatatatatatgtataatatatattccaatgtattccaagctaagaaacttacttgattcttatgaaatcttgataaaatatttataatgcatttatagaaaaagtatatatatatatataaaatgaatgcagattgcgaaggtccctgcaaatggatggcttgtgaatttgctctcaaggtgcttatggaaagggatcctgattgattgaaattcatgttttctcaagctccagattggctagatttcagatcgccaacacattcgccactgggcaactaccctacaagtttgtactttcattttaattattttctaacagaaccgctcccgtctccaagccttcatgcacatatgtacctaatgagtttttatagcaaagaatataaatttgctgttgatttttgtatgaattttttcacaaaaagatcctgaataagcattgttttatgaattttacatttttcctcaccatttagcaattttctgaatggtaataatgtctaaatctttttcctttctgaattcttgcttgtacatttttttttacctttcaaaggtttttaattatttttgtttttatttttgtacgatgagttttctgcagcgtacagaattgttgctgtcagattctattttcagaaagtgagaggagggaccgtaggtcttttcggagtgacaccaacgattgtgtctttcctggtctgtcctaggagctgtataaagaagcccaggggctctttttaactttcaacactagtagtattacgaggggtggtgtgtttttcccctccgtggcaagggcagggagggttgcttaggatgcccggccaccctgggaggcttgccagatgccgggggcagtcagcattaatgaaactcatgtttaaacttctctgaccacatcgtcaggatagaattctaacttgagttttccaaagaccttttgagcatgtcagcaatgcatggggcacacgtggggctctttacccacttgggtttttccactgcagccacgtggccagccctggattttggagcctgtggctgcaaggaacccagggacccttgttgcctggtgaacctgcagggagggtatgattgcctgaccaggacagccagtctttactctttttctcttcaacagtaactgacagtcacgttttactggtaacttattttccagcacatgaagccaccagtttcattccaaagtgtatattgggttcagacttgggggcagaagttcagacacaccgtgctcaggagggacccagagccgagtttcggagtttggtaaagtttacagggtagcttctgaaattaactcaaacttttgaccaaatgagtgcagattcttggattcacttggtcactgggctgctgatggtcagctctgagacagtggtttgagagcaggcagaacggtcttgggacttgtttgactttcccctccctggtggccactctttgctctgaagcccagattggcaagaggagctggtccattccccattcatggcacagagcagtggcagggcccagctagcaggctcttctggcctccttggcctcattctctgcttagccctctggggatcctgccacctgccctcttaccccgccgtggcttatggggaggaatgcatcatctcactttttttttttaagcagatgatgggataacatggactgctcagtggccaggttatcagtggggggacttaattctaatctcattcaaatggagacgccctctgcaaaggcctggcagggggaggcacgtttcatctgtcagctcactccagcttcacaaatgtgctgagagcattactgtgtagccttttctttgaagacacactcggctcttctccacagcaagcgtccagggcagatggcagaggatctgcctcggcgtctgcaggcgggaccacgtcagggagggttccttcatgtgttctccctgtgggtccttggacctttagcctttttcttcctttgcaaaggccttgggggcactggctgggagtcagcaagcgagcactttatatccctttgagggaaaccctgatgacgccactgggcctcttggcgtctgccctgccctcgcggcttcccgccgtgccgcagcgtgcccacgtgcccacgccccaccagcaggcggctgtcccggaggccgtggcccgctgggactggccgcccctccccagcgtcccagggctctggttctggagggccactttgtcaaggtgtttcagtttttctttacttcttttgaaaatctgtttgcaaggggaaggaccatttcgtaatggtctgacacaaaagcaagtttgatttttgcagcactagcaatggactttgttgtttttctttttgatcagaacattccttctttactggtcacagccacgtgctcattccattcttctttttgtagactttgggcccacgtgttttatgggcattgatacatatataaatatatagatataaatatatatgaatatatttttttaagtttcctacacctggaggttgcatggactgtacgaccggcatgactttatattgtatacagattttgcacgccaaactcggcagctttggggaagaagaaaaatgcctttctgttcccctctcatgacatttgcagatacaaaagatggaaatttttctgtaaaacaaaaccttgaaggagaggagggcggggaagtttgcgtcttattgaacttattcttaagaaattgtactttttattgtaagaaaaataaaaaggactacttaaacatttgtcatattaagaaaaaaagtttatctagcacttgtgacataccaataatagagtttattgtatttatgtggaaacagtgttttagggaaactactcagaattcacagtgaactgcctgtctctctcgagttgatttggaggaattttgttttgttttgttttgtttgtttccttttatctccttccacgggccaggcgagcgccgcccgccctcactggccttgtgacggtttattctgattgagaactgggcggactcgaaagagtccccttttccgcacagctgtgttgactttttaattacttttaggtgatgtatggctaagatttcactttaagcagtcgtgaactgtgcgagcactgtggtttacaattatactttgcatcgaaaggaaaccatttcttcattgtaacgaagctgagcgtgttcttagctcggcctcactttgtctctggcattgattaaaagtctgctattgaaagaaaaagaaagcgaacagtttttgtttgttttttttgccgtgtgtgctccatagtggaggcgctattttccaattgatgagaatgacaaacatatataatctatctatctatctatctatctatctatctatctatctatctatacagggggcttgaaccttactcacccaagagcttcttacggaatgtggtagaaaaccaagttgtaacgacactgtaacctacctgatgcctgttcgcgcccgccgtgagctgcgcactggccgtggccaccattcacctctgtaatttaatccgtttctcttggattgtctggacgtgcccgatggttctttcttttgctcagtggagttggaggttttgtgtttggttttctcattcttgtcttgttttgtgtgggtggattttcaccgaccaatgatatcctcttctgacggtcaccttctttccacttcactggagtccagtattctgtaccacatcacgcaacgtgttatcttgtggtgtaaataaagactgcgttacttgccactccca

SEQ ID NO: 101633 - DNA, 8424 bp, Homo sapiens
tgaatgaggaggggaggttgtggggccgccgccgcggagcaccgtccccgccgccgcccgagcccgagcccgagcccgcgcacccgcccgcgccgccgccgccgccgcccgaacagcctcccagcctgggcccccggcggcgccgtggccgcgtcccggctgtcgccgcccgagcccgagcccgcgcgccggcgggtggcggcgcaggctgaggagatgcggcgcggagcgccggagcagggctagagccggccgccgccgcccgccgcggtaagcgcagccccggcccggcgcccgcgggccattgtccgccgcccgccccgcgccccgcgcagcctgcaggccttggagcccgcggcaggtggacgccgccggtccacacccgccccgcgcgcggccgtgggaggcgggggccagcgctggccgcgcgccgtgggacccgccggtccccagggccgcccggccccttctggacctttccacccgcgccgcgaggcggcttcgcccgccggggcgggggcgcgggggtgggcacggcaggcagcggcgccgtctcccggtgcggggcccgcgccccccgagcaggttcatctgcagaagccagcggacgcctctgttcaacttgtgggttacctggctcatgagaccttgccggcgaggctcggcgcttgaacgtctgtgacccagccctcaccgtcccggtacttgtatgtgttggtgggagtttggagctcgttggagctatcgtttccgtggaaattttgagccatttcgaatcacttaaaggagtggacattgctagcaatgagctcccaaagccatccagatggactttctggccgagaccagccagtggagctgctgaatcctgcccgcgtgaaccacatgcccagcacggtggatgtggccacggcgctgcctctgcaagtggccccctcggcagtgcccatggacctgcgcctggaccaccagttctcactgcctgtggcagagccggccctgcgggagcagcagctgcagcaggagctcctggcgctcaagcagaagcagcagatccagaggcagatcctcatcgctgagttccagaggcagcacgagcagctctcccggcagcacgaggcgcagctccacgagcacatcaagcaacaacaggagatgctggccatgaagcaccagcaggagctgctggaacaccagcggaagctggagaggcaccgccaggagcaggagctggagaagcagcaccgggagcagaagctgcagcagctcaagaacaaggagaagggcaaagagagtgccgtggccagcacagaagtgaagatgaagttacaagaatttgtcctcaataaaaagaaggcgctggcccaccggaatctgaaccactgcatttccagcgaccctcgctactggtacgggaaaacgcagcacagttcccttgaccagagttctccaccccagagcggagtgtcgacctcctataaccacccggtcctgggaatgtacgacgccaaagatgacttccctcttaggaaaacagcttctgaaccgaatctgaaattacggtccaggctaaagcagaaagtggccgaaagacggagcagccccctgttacgcaggaaagacgggccagtggtcactgctctaaaaaagcgtccgttggatgtcacagactccgcgtgcagcagcgccccaggctccggacccagctcacccaacaacagctccgggagcgtcagcgcggagaacggtatcgcgcccgccgtccccagcatcccggcggagacgagtttggcgcacagacttgtggcacgagaaggctcggccgctccacttcccctctacacatcgccatccttgcccaacatcacgctgggcctgcctgccaccggcccctctgcgggcacggcgggccagcaggacgccgagagactcacccttcccgccctccagcagaggctctcccttttccccggcacccacctcactccctacctgagcacctcgcccttggagcgggacggaggggcagcgcacagccctcttctgcagcacatggtcttactggagcagccaccggcacaagcacccctcgtcacaggcctgggagcactgcccctccacgcacagtccttggttggtgcagaccgggtgtccccctccatccacaagctgcggcagcaccgcccactggggcggacccagtcggccccgctgccccagaacgcccaggctctgcagcacctggtcatccagcagcagcatcagcagtttctggagaaacacaagcagcagttccagcagcagcaactgcagatgaacaagatcatccccaagccaagcgagccagcccggcagccggagagccacccggaggagacggaggaggagctccgtgagcaccaggctctgctggacgagccctacctggaccggctgccggggcagaaggaggcgcacgcacaggccggcgtgcaggtgaagcaggagcccattgagagcgatgaggaagaggcagagcccccacgggaggtggagccgggccagcgccagcccagtgagcaggagctgctcttcagacagcaagccctcctgctggagcagcagcggatccaccagctgaggaactaccaggcgtccatggaggccgccggcatccccgtgtccttcggcggccacaggcctctgtcccgggcgcagtcctcacccgcgtctgccaccttccccgtgtctgtgcaggagccccccaccaagccgaggttcacgacaggcctcgtgtatgacacgctgatgctgaagcaccagtgcacctgcgggagtagcagcagccaccccgagcacgccgggaggatccagagcatctggtcccgcctgcaggagacgggcctccggggcaaatgcgagtgcatccgcggacgcaaggccaccctggaggagctacagacggtgcactcggaagcccacaccctcctgtatggcacgaaccccctcaaccggcagaaactggacagtaagaaacttctaggctcgctcgcctccgtgttcgtccggctcccttgcggtggtgttggggtggacagtgacaccatatggaacgaggtgcactcggcgggggcagcccgcctggctgtgggctgcgtggtagagctggtcttcaaggtggccacaggggagctgaagaatggctttgctgtggtccgcccccctggacaccatgcggaggagagcacgcccatgggcttttgctacttcaactccgtggccgtggcagccaagcttctgcagcagaggttgagcgtgagcaagatcctcatcgtggactgggacgtgcaccatggaaacgggacccagcaggctttctacagcgaccctagcgtcctgtacatgtccctccaccgctacgacgatgggaacttcttcccaggcagcggggctcctgatgaggtgggcacagggcccggcgtgggtttcaacgtcaacatggctttcaccggcggcctggacccccccatgggagacgctgagtacttggcggccttcagaacggtggtcatgccgatcgccagcgagtttgccccggatgtggtgctggtgtcatcaggcttcgatgccgtggagggccaccccacccctcttgggggctacaacctctccgccagatgcttcgggtacctgacgaagcagctgatgggcctggctggcggccggattgtcctggccctcgagggaggccacgacctgaccgccatttgcgacgcctcggaagcatgtgtttctgccttgctgggaaacgagcttgatcctctcccagaaaaggttttacagcaaagacccaatgcaaacgctgtccgttccatggagaaagtcatggagatccacagcaagtactggcgctgcctgcagcgcacaacctccacagcggggcgttctctgatcgaggctcagacttgcgagaacgaagaagccgagacggtcaccgccatggcctcgctgtccgtgggcgtgaagcccgccgaaaagagaccagatgaggagcccatggaagaggagccgcccctgtagcactccctcgaagctgctgttctcttgtctgtctgtctctgtcttgaagctcagccaagaaactttcccgtgtcacgcctgcgtcccaccgtggggctctcttggagcacccagggacacccagcgtgcaacagccacgggaagcctttctgccgcccaggcccacaggtctcgagacgcacatgcacgcctgggcgtggcagcctcacagggaacacgggacagacgccggcgacgcgcagacacacggacacgcggaagccaagcacactctggcgggtcccgcaagggacgccgtggaagaaaggagcctgtggcaacaggcggccgagctgccgaattcagttgacacgaggcacagaaaacaaatatcaaagatctaataatacaaaacaaacttgattaaaactggtgcttaaagtttattacccacaactccacagtctctgtgtaaaccactcgactcatcttgtagcttatttttttttaaagaggacgttttctacggctgtggcccgcctctgtgaaccatagcggtgtgcggcggggggtctgcacccgggtgggggacagagggacctttaaagaaaacaaaactggacagaaacaggaatgtgagctgggggagctggcttgagtttctcaaaagccatcggaagatgcgagtttgtgcctttttttttattgctctggtggatttttgtggctgggttttctgaagtctgaggaacaatgccttaagaaaaaacaaacagcaggaatcggtgggacagtttcctgtggccagccgagcctggcagtgctggcaccgcgagctggcctgacgcctcaagcacgggcaccagccgtcatctccggggccaggggctgcagcccggcggtccctgttttgctttattgctgtttaagaaaaatggaggtagttccaaaaaagtggcaaatcccgttggaggttttgaagtccaacaaattttaaacgaatccaaagtgttctcacacgtcacatacgattgagcatctccatctggtcgtgaagcatgtggtaggcacacttgcagtgttacgatcggaatgctttttattaaaagcaagtagcatgaagtattgcttaaattttaggtataaataaatatatatatgtataatatatattccaatgtattccaagctaagaaacttacttgattcttatgaaatcttgataaaatatttataatgcatttatagaaaaagtatatatatatatataaaatgaatgcagattgcgaaggtccctgcaaatggatggcttgtgaatttgctctcaaggtgcttatggaaagggatcctgattgattgaaattcatgttttctcaagctccagattggctagatttcagatcgccaacacattcgccactgggcaactaccctacaagtttgtactttcattttaattattttctaacagaaccgctcccgtctccaagccttcatgcacatatgtacctaatgagtttttatagcaaagaatataaatttgctgttgatttttgtatgaattttttcacaaaaagatcctgaataagcattgttttatgaattttacatttttcctcaccatttagcaattttctgaatggtaataatgtctaaatctttttcctttctgaattcttgcttgtacatttttttttacctttcaaaggtttttaattatttttgtttttatttttgtacgatgagttttctgcagcgtacagaattgttgctgtcagattctattttcagaaagtgagaggagggaccgtaggtcttttcggagtgacaccaacgattgtgtctttcctggtctgtcctaggagctgtataaagaagcccaggggctctttttaactttcaacactagtagtattacgaggggtggtgtgtttttcccctccgtggcaagggcagggagggttgcttaggatgcccggccaccctgggaggcttgccagatgccgggggcagtcagcattaatgaaactcatgtttaaacttctctgaccacatcgtcaggatagaattctaacttgagttttccaaagaccttttgagcatgtcagcaatgcatggggcacacgtggggctctttacccacttgggtttttccactgcagccacgtggccagccctggattttggagcctgtggctgcaaggaacccagggacccttgttgcctggtgaacctgcagggagggtatgattgcctgaccaggacagccagtctttactctttttctcttcaacagtaactgacagtcacgttttactggtaacttattttccagcacatgaagccaccagtttcattccaaagtgtatattgggttcagacttgggggcagaagttcagacacaccgtgctcaggagggacccagagccgagtttcggagtttggtaaagtttacagggtagcttctgaaattaactcaaacttttgaccaaatgagtgcagattcttggattcacttggtcactgggctgctgatggtcagctctgagacagtggtttgagagcaggcagaacggtcttgggacttgtttgactttcccctccctggtggccactctttgctctgaagcccagattggcaagaggagctggtccattccccattcatggcacagagcagtggcagggcccagctagcaggctcttctggcctccttggcctcattctctgcttagccctctggggatcctgccacctgccctcttaccccgccgtggcttatggggaggaatgcatcatctcactttttttttttaagcagatgatgggataacatggactgctcagtggccaggttatcagtggggggacttaattctaatctcattcaaatggagacgccctctgcaaaggcctggcagggggaggcacgtttcatctgtcagctcactccagcttcacaaatgtgctgagagcattactgtgtagccttttctttgaagacacactcggctcttctccacagcaagcgtccagggcagatggcagaggatctgcctcggcgtctgcaggcgggaccacgtcagggagggttccttcatgtgttctccctgtgggtccttggacctttagcctttttcttcctttgcaaaggccttgggggcactggctgggagtcagcaagcgagcactttatatccctttgagggaaaccctgatgacgccactgggcctcttggcgtctgccctgccctcgcggcttcccgccgtgccgcagcgtgcccacgtgcccacgccccaccagcaggcggctgtcccggaggccgtggcccgctgggactggccgcccctccccagcgtcccagggctctggttctggagggccactttgtcaaggtgtttcagtttttctttacttcttttgaaaatctgtttgcaaggggaaggaccatttcgtaatggtctgacacaaaagcaagtttgatttttgcagcactagcaatggactttgttgtttttctttttgatcagaacattccttctttactggtcacagccacgtgctcattccattcttctttttgtagactttgggcccacgtgttttatgggcattgatacatatataaatatatagatataaatatatatgaatatatttttttaagtttcctacacctggaggttgcatggactgtacgaccggcatgactttatattgtatacagattttgcacgccaaactcggcagctttggggaagaagaaaaatgcctttctgttcccctctcatgacatttgcagatacaaaagatggaaatttttctgtaaaacaaaaccttgaaggagaggagggcggggaagtttgcgtcttattgaacttattcttaagaaattgtactttttattgtaagaaaaataaaaaggactacttaaacatttgtcatattaagaaaaaaagtttatctagcacttgtgacataccaataatagagtttattgtatttatgtggaaacagtgttttagggaaactactcagaattcacagtgaactgcctgtctctctcgagttgatttggaggaattttgttttgttttgttttgtttgtttccttttatctccttccacgggccaggcgagcgccgcccgccctcactggccttgtgacggtttattctgattgagaactgggcggactcgaaagagtccccttttccgcacagctgtgttgactttttaattacttttaggtgatgtatggctaagatttcactttaagcagtcgtgaactgtgcgagcactgtggtttacaattatacttttctttgtctggtaccctttttttattgtaacttagtctaacgtgtttttatttagtcttac

SEQ ID NO: 101634 - DNA, 2430 bp, Homo sapiens
  misc_feature (1735)..(1735): n is a, c, g, or t
  misc_feature (1847)..(1847): n is a, c, g, or t
tagtgatggaggagagaagatggcggaagcggaatttaaggaccatagtacagctatggatactgaaccaaacccgggaacatcttctgtgtcaacaacaaccagcagtaccaccaccaccaccatcaccacttcctcctctcgaatgcagcagccacagatctctgtctacagtggttcagaccgacatgctgtacaggtaattcaacaggcattgcatcggccccccagctcagctgctcagtaccttcagcaaatgtatgcagcccaacaacagcacttgatgctgcatactgcagctcttcagcagcagcatttaagcagctcccagcttcagagccttgctgctgttcaggcaagtttgtccagtggaagaccatctacatctcccacaggaagtgtcacacagcagtcaagtatgtcccaaacgtctatcaacctctccacttctcctacacctgcacagttaataagccgttcccaggcttccagttctaccagcggcagtattacccaacagactatgttactagggagtacttcccctaccctaacggcaagccaagctcaaatgtatctccgagctcaaatggtaagatatgagctaccaaattttttcagtgtttaaggacttgagagatcaaaatgtttcttgatttgatacaataagaggtatttttaatatttaagaaatgtttaattgtgtgtgtgtgcatgcgggcgtgccttcagctcttgtacatttatgtcatgaaagattctacttttaattaataggtcttcttggtatcaaatagtaattattacattgagaagctaatagagattcagtaacgtaagagtgattattttttaatatcaaattcattgaaaacctttttttcatattttaatatctgtgaaatttggatgcattttataactgatggcatcttggtacttacagtggtccataaaatcattgcctgtttttgtcaacttagatttggtgaaatagagatgttaaaaaaactttgttgttaaagttataatttgtatcctaggattttctgaattctatattggagttccggatagtctcccagatgattcttaactttggtttttcccatctcaaattctgcaaggttatttgtgttcttgtgttcattttgatattttatgaatataggaatgttaatttggttattctgtatttgagtatctacagattttctaatttaattgttgagcttctttaaggaatatagaaattggttgacatgtattttatttgatgtctttacaagaagctagacaaaagcattgtccctaatatatatttatattcttttttgtccagtggactgaatatatatctggatctccagtttttgttgttgttgttgttgttgttgttattgttttttgaggtgaagtctcactctgtcacccaggctagagtgcagtggcacgatctctgctcactgcaacctctgcctcccgggttcaagtgattctcccacctcagcctcccaagtagctgggattacaggtgcccgccaccacacccagctaatttttgtatttttagtagagacggggtttcaccatcttggcctggctggtctcaaactcctgaccttgtgatccacctgcctcacctcccagaatgctgggattacagacatgaaccaccacacctggcttggatcttcagttttctatctaaaattgcaaagtttccaatcatttnactcatactatgctttaaaattaggttgaaccatttgagatggttgctatttggctatttttgaactctaaaattagcagtttcatacgggtcaaactaaattgaatatctnctttttaggtttagtcctttcagggtgttggtactggaaattaccttttcaggaaagttataccatttgtcccttggtgtctgtggtggattgttgccaggccctaccctctctgtcccctagaatacccaaatctgaggatgctcaaggcatagtatttgcatataacctatgtatatcctcccatatactttacatcgtctttacatatatttagtataatataaacatcatttaaataactgttatactatattgtttagggaataataacaagagaaaaatttgtacatgttcaatgcagatgcagctattttttttaaatgaatattgttttgatctatagttgaatgacgaagcacagagccttccataggtatggagggctcatcattgtactttgttgttgaatttacttagatttagtgtaccaaagaactgaagtttaaaaggtcacttaattggtcgtttaattttctaatttttttggatccgcatttggttgaacattttaatttagatagcaagaggaactgaataacccttgatacaattttgaaataaagtatttacacattctttg

SEQ ID NO: 101635 - DNA, 2028 bp, Homo sapiens
tagtgatggaggagagaagatggcggaagcggaatttaaggaccatagtacagctatggatactgaaccaaacccgggaacatcttctgtgtcaacaacaaccagcagtaccaccaccaccaccatcaccacttcctcctctcgaatgcagcagccacagatctctgtctacagtggttcagaccgacatgctgtacaggtaattcaacaggcattgcatcggccccccagctcagctgctcagtaccttcagcaaatgtatgcagcccaacaacagcacttgatgctgcatactgcagctcttcagcagcagcatttaagcagctcccagcttcagagccttgctgctgttcaggcaagtttgtccagtggaagaccatctacatctcccacaggaagtgtcacacagcagtcaagtatgtcccaaacgtctgtaagttccctaaattttttttttcctggatttaaaattttaaagaattgttttccaaaagtaaactgttgttatttatgaagctgttattataatttgttgcatgctgtttaaagtaacaattgcccagaaatagaaatgataaaattcaagaattcagaactaatgttaaacttatgaaaatctgagtcttaaatcttatgtggtttcagctttctgtgtgtattgaaagcctaaaatatacaatgcagggatattggccatgaatttactgtgatatacaatagtatgtcatgtccttggtagacatctaagcatttctaactttgtgcaattcacattttagaaattatactttcagcttacatgagttatttgggttcaatttgcaagtatccattcaagatagggtaatttattttgagaaaggagtaaaagaaagctgattcgctatattgcacatatatattgggaaattgtgccaagtttcccaggtaaaataaatttatgggcatggtaatacttgtttagcttttaattttggtataattttaaactgcaataataataaaaaaatttctgtatctactctactcagattaatcaattattgcatattgccccattactttatcattcattcttttccactacatgtatacatatttttttctgagtcatttgtaagttgagatatgttcctttattcctaaatactttgatgtgtatttcctaagaacaaggctattgttttttgaagccacagaaaaattactaaattcaggaaatataacattgatacagtgcagttcattttcacatttcatcatttgtctcaggtttcccaacctcatcactatggacattatgagccagataattctttgttgtcaggggctatcgtgtaatttataggatgtttagcagcatccctggctactagatgccggcagcttgtggtctttctccttcctctagtgtgacaactataggtgtttcctggtggggggcaaactgcctgtagttgagaacctaataatgtcctttctagatattttttcctggtccagaatggtaatactttgatacttcataaaattggctccaatacaatatagtttgtaggttgttaaggaattgaaggttaaggaattgtgctctatttcttcagctaagggtatggtctttgctaactacatgctgtggtcagcatatagctgtggttttttttgttgtttggtttttttttctggctgttgatctgactttttttttttggcgtgggaatgtcctggagtgtgaacaagattagtttaaaaagttccctatgacttgaagatgttagattaaatgaaaaacttaaataatgtaacctagctcttaagcattaatactggagtttttgtcattgacatcagatgtctttaatacaatggtaattaaggaaaggagtggtaaatattttgtgggctactgaaggaaattatatagacaaattctttattctgtgaaatactggaataacaataggatgtatttgtatagatatgttattttgaatttttttccttcatgttattaaaaggtatcttttt

SEQ ID NO: 101636 - DNA, 893 bp, Homo sapiens
tagtttctcagaagaaaagaccgataagaaaagggagataaaaccagtataatctcttgtgtgcttttcaccttcgaggtacatttctggcccgacaaaaactactgctcttctggtttctaacaatatggaggtccttagaattgacttaaagtgtttgaatttattcaaatacagattctgtatttagtggaattttgtaccacaacaagtaagattatagtattggagggaagaaagtctggtataaaagtgtactttactgtccatacatgaggaagtgacataatttatgttttcaaaatctggagtaattctttgtgaaaaagattttgtaagggtatgggaagttgctgtttgctgcttctctgtgttctcacagcaatctgctaataagtataactcagctattagaagtagtaaggacagcgttgtagactgattaggggaaaagccagtgtgagttaaaaaaattactttttaacattttttaaaaagaacttatttttaagcaaagtttatatggtaaactaaactaagctagttaacatgagtccctaggcattctgttctaatgtataggtaagaatgactttagtttgtaattagtgtggtcaaaagaatgtaaagaaatgttttaaaatactctgatactgcttaaatttttattttcctaggtagtttagtattctctcattacctgttttggtttaaaaaaaatctttcggtaatgcaaagataaacttttggctatgcgttatctgagttacgtattctgaatcatttgaattcaaatgtagtaggtattaactattaaatatgctccatatatgtgaagtatttttcccttctaagtgcttatagtgactgtgtgttggctgtcttttatgaga

SEQ ID NO: 101637 - DNA, 598 bp, Homo sapiens
ttgccacttaatatttaagatgtgattacttagaataataactctcctttccttaaggattaatcagttctttcaagtgcttggagctttacgtatgaaaagcataatataaatgtgttgtcagtattgtcataatggtaatgatgaccacatcaattaaaaccatctgttttcatcctaattttctgttatgtggttcttaggttcagaatttaacattacgcagccagaagttgggtgtattatctagctcacagaatggtccaccaaaaagcactagtcaaactcagtcattgacaatttgtcataacaaaacaacagtgaccagttctaaaatcagccaacgagatccttctccagaaagtaataagaaaggagagagcccaagcctggaatcacgaagcacagctgtcacccggacatcaagtattcaccagttaatagcaccaggtgggataaaacttttgttgaaaatagttgtattattcattttcttagcagacagagcaaaacaaaggatgttcatgacttgaacaggagtgacacctttaaaacattttaaaatgtgaattttataaacttaatcttaatgtgtagc

SEQ ID NO: 101638 - DNA, 2032 bp, Homo sapiens
tagtgatggaggagagaagatggcggaagcggaatttaaggaccatagtacagctatggatactgaaccaaacccgggaacatcttctgtgtcaacaacaaccagcagtaccaccaccaccaccatcaccacttcctcctctcgaatgcagcagccacagatctctgtctacagtggttcagaccgacatgctgtacaggtaattcaacaggcattgcatcggccccccagctcagctgctcagtaccttcagcaaatgtatgcagcccaacaacagcacttgatgctgcatactgcagctcttcagcagcagcatttaagcagctcccagcttcagagccttgctgctgttcaggcaagtttgtccagtggaagaccatctacatctcccacaggaagtgtcacacagcagtcaagtatgtcccaaacgtctatcaacctctccacttctcctacacctgcacagttaataagccgttcccaggcttccagttctaccagcggcagtattacccaacagactatgttactagggagtacttcccctaccctaacggcaagccaagctcaaatgtatctccgagctcaaatgctgattttcacacccgctaccactgtggctgctgtacagtctgacattcctgttgtctcgtcgtcatcgtcatcttcctgtcagtctgcagctactcaggttcagaatttaacattacgcagccagaagttgggtgtattatctagctcacagaatggtccaccaaaaagcactagtcaaactcagtcattgacaatttgtcataacaaaacaacagtgaccagttctaaaatcagccaacgagatccttctccagaaagtaataagaaaggagagagcccaagcctggaatcacgaagcacagctgtcacccggacatcaagtattcaccagttaatagcaccagcttcatattctccaattcagcctcattctctaataaaacatcagcagattcctcttcattcaccaccttccaaagtttcccatcatcagctgatattacaacagcagcaacagcaaattcagccaatcacacttcagaattcaactcaagacccacccccatcccagcactgtataccactccagaaccatggccttcctccagctcccagtaatgcccagtcacagcattgttcaccgattcagagtcatccctctcctttaacagtgtctcctaatcagtcacagtcagcacagcagtctgtagtggtgtctcctccaccacctcattcaccaagtcagtctcctactataattattcatccacaagcacttattcagccacaccctcttgtgtcatcagctctccagccagggccaaatttgcagcagtccactgctaatcaggtgcaagctacagcacagttgaatcttccatcccatcttccacttccagcttcccctgttgtacacattggcccagttcagcagtctgccttggtatccccaggccagcagattgtctctccatcacaccagcaatattcatccctgcagtcctctccaatcccaattgcaagtcctccaccgaatgtcgacatctcctccagctcagattccaccactggcccttgcagtctatgcagtctttacaagtgcagcctgaaattctgtcccagggccaggttttggtgcagaatgctttggtgtcagaagaggaacttccagctgcagaagctttggtccagttgccatttcagactcttcctcctccacagactgttgcggtaaacctacaagtgcaaccaccagcacctgttgatccaccagtggtttatcaggtagaagatgtgtgtgaagaagaaatgccagaagagtcagacgaatgtgtccggatggatagaaccccaccaccacccactttgtctccagcagctataacagtggggagaggagaagatttgacttctgacatcctttgttagagcaagtggaatgacccgctgtggcatcagtcagtgctcagtaattaaatatacatcagagagagctgcg

SEQ ID NO: 101639 - DNA, 1877 bp, Homo sapiens
gagatcacgccactgcactccagcctgggcaacagagcaagactcccatcttaaaaaaaaaaaaattgccctgattactaaccaatccatgccattgtttgcatatgtgcaaataactgcccaaagaaatgagggggtctgtcaaagataaaggcttctcctttgggttccttagccacagtttataccattgattgcctaactgcagctcggtgtgaaattcagtaacatggaagcaagaaatggaagcctatgacctaatatgttttcttccttagatcaacctctccacttctcctacacctgcacagttaataagccgttcccaggcttccagttctaccagcggcagtattacccaacagactatgttactagggagtacttcccctaccctaacggcaagccaagctcaaatgtatctccgagctcaaatgctgattttcacacccgctaccactgtggctgctgtacagtctgacattcctgttgtctcgtcgtcatcgtcatcttcctgtcagtctgcagctactcaggttcagaatttaacattacgcagccagaagttgggtgtattatctagctcacagaatggtccaccaaaaagcactagtcaaactcagtcattgacaatttgtcataacaaaacaacagtgaccagttctaaaatcagccaacgagatccttctccagaaagtaataagaaaggagagagcccaagcctggaatcacgaagcacagctgtcacccggacatcaagtattcaccagttaatagcaccagcttcatattctccaattcagcctcattctctaataaaacatcagcagattcctcttcattcaccaccttccaaagtttcccatcatcagctgatattacaacagcagcaacagcaaattcagccaatcacacttcagaattcaactcaagacccacccccatcccagcactgtataccactccagaaccatggccttcctccagctcccagtaatgcccagtcacagcattgttcaccgattcagagtcatccctctcctttaacagtgtctcctaatcagtcacagtcagcacagcagtctgtagtggtgtctcctccaccacctcattcaccaagtcagtctcctactataattattcatccacaagcacttattcagccacaccctcttgtgtcatcagctctccagccagggccaaatttgcagcagtccactgctaatcaggtgcaagctacagcacagttgaatcttccatcccatcttccacttccagcttcccctgttgtacacattggcccagttcagcagtctgccttggtatccccaggccagcagattgtctctccatcacaccagcaatattcatccctgcagtcctctccaatcccaattgcaagtcctccaccgaatgtcgacatctcctccagctcagattccaccactggcccttgcagtctatgcagtctttacaagtgcagcctgaaattctgtcccagggccaggttttggtgcagaatgctttggtgtcagaagaggaacttccagctgcagaagctttggtccagttgccatttcagactcttcctcctccacagactgttgcggtaaacctacaagtgcaaccaccagcacctgttgatccaccagtggtttatcaggtagaagatgtgtgtgaagaagaaatgccagaagagtcagacgaatgtgtccggatggatagaaccccaccaccacccactttgtctccagcagctataacagtggggagaggagaagatttgacttctgacatcctttgttagagcaagtggaatgacccgctgtggcatcagtcagtgctcagtaattaaatatacatcagagagagctgcg

SEQ ID NO: 101640 - DNA, 1502 bp, Homo sapiens
ttgggaggctgagttgggaggatcacttcaggtcaggtttcaagaccagcctggccaacgtggtgaaaccccgtctctactaaaaatacagaagttagccgggtgtggtagcgggcacctgtaatcccagctactccggaggcagagacaggagaatcgcttgaaccagggaggtggaggttgcagtgagctgagatcatgccactgcaccccagcctgggtgacaagagcaagactctgtctcaaaaaaaaaaattttttttttttcaaattactcttgtttggaaaacttgtaatagaattctgatgattatgaccttctgataatgaacactttttcctttagagtgatttaaaaatttctgtatttttgaaatcagtactaattgtcatttttttctctcacagcttcatattctccaattcagcctcattctctaataaaacatcagcagattcctcttcattcaccaccttccaaagtttcccatcatcagctgatattacaacagcagcaacagcaaattcagccaatcacacttcagaattcaactcaagacccacccccatcccagcactgtataccactccagaaccatggccttcctccagctcccagtaatgcccagtcacagcattgttcaccgattcagagtcatccctctcctttaacagtgtctcctaatcagtcacagtcagcacagcagtctgtagtggtgtctcctccaccacctcattcaccaagtcagtctcctactataattattcatccacaagcacttattcagccacaccctcttgtgtcatcagctctccagccagggccaaatttgcagcagtccactgctaatcaggtgcaagctacagcacagttgaatcttccatcccatcttccacttccagcttcccctgttgtacacattggcccagttcagcagtctgccttggtatccccaggccagcagattgtctctccatcacaccagcaatattcatccctgcagtcctctccaatcccaattgcaagtcctccaccgaatgtcgacatctcctccagctcagattccaccactggcccttgcagtctatgcagtctttacaagtgcagcctgaaattctgtcccagggccaggttttggtgcagaatgctttggtgtcagaagaggaacttccagctgcagaagctttggtccagttgccatttcagactcttcctcctccacagactgttgcggtaaacctacaagtgcaaccaccagcacctgttgatccaccagtggtttatcaggtagaagatgtgtgtgaagaagaaatgccagaagagtcagacgaatgtgtccggatggatagaaccccaccaccacccactttgtctccagcagctataacagtggggagaggagaagatttgacttctgacatcctttgttagagcaagtggaatgacccgctgtggcatcagtcagtgctcagtaattaaatatacatcagagagagctgcg

SEQ ID NO: 101641 - DNA, 1544 bp, Homo sapiens
ttgccacttaatatttaagatgtgattacttagaataataactctcctttccttaaggattaatcagttctttcaagtgcttggagctttacgtatgaaaagcataatataaatgtgttgtcagtattgtcataatggtaatgatgaccacatcaattaaaaccatctgttttcatcctaattttctgttatgtggttcttaggttcagaatttaacattacgcagccagaagttgggtgtattatctagctcacagaatggtccaccaaaaagcactagtcaaactcagtcattgacaatttgtcataacaaaacaacagtgaccagttctaaaatcagccaacgagatccttctccagaaagtaataagaaaggagagagcccaagcctggaatcacgaagcacagctgtcacccggacatcaagtattcaccagttaatagcaccagcttcatattctccaattcagcctcattctctaataaaacatcagcagattcctcttcattcaccaccttccaaagtttcccatcatcagctgatattacaacagcagcaacagcaaattcagccaatcacacttcagaattcaactcaagacccacccccatcccagcactgtataccactccagaaccatggccttcctccagctcccagtaatgcccagtcacagcattgttcaccgattcagagtcatccctctcctttaacagtgtctcctaatcagtcacagtcagcacagcagtctgtagtggtgtctcctccaccacctcattcaccaagtcagtctcctactataattattcatccacaagcacttattcagccacaccctcttgtgtcatcagctctccagccagggccaaatttgcagcagtccactgctaatcaggtgcaagctacagcacagttgaatcttccatcccatcttccacttccagcttcccctgttgtacacattggcccagttcagcagtctgccttggtatccccaggccagcagattgtctctccatcacaccagcaatattcatccctgcagtcctctccaatcccaattgcaagtcctccaccgaatgtcgacatctcctccagctcagattccaccactggcccttgcagtctatgcagtctttacaagtgcagcctgaaattctgtcccagggccaggttttggtgcagaatgctttggtgtcagaagaggaacttccagctgcagaagctttggtccagttgccatttcagactcttcctcctccacagactgttgcggtaaacctacaagtgcaaccaccagcacctgttgatccaccagtggtttatcaggtagaagatgtgtgtgaagaagaaatgccagaagagtcagacgaatgtgtccggatggatagaaccccaccaccacccactttgtctccagcagctataacagtggggagaggagaagatttgacttctgacatcctttgttagagcaagtggaatgacccgctgtggcatcagtcagtgctcagtaattaaatatacatcagagagagctgcg

SEQ ID NO: 101642 - DNA, 576 bp, Homo sapiens
gagatcacgccactgcactccagcctgggcaacagagcaagactcccatcttaaaaaaaaaaaaattgccctgattactaaccaatccatgccattgtttgcatatgtgcaaataactgcccaaagaaatgagggggtctgtcaaagataaaggcttctcctttgggttccttagccacagtttataccattgattgcctaactgcagctcggtgtgaaattcagtaacatggaagcaagaaatggaagcctatgacctaatatgttttcttccttagatcaacctctccacttctcctacacctgcacagttaataagccgttcccaggcttccagttctaccagcggcagtattacccaacagactatgttactagggagtacttcccctaccctaacggcaagccaagctcaaatgtatctccgagctcaaatgctgattttcacacccgctaccactgtggctgctgtacagtctgacattcctgttgtctcgtcgtcatcgtcatcttcctgtcagtctgcagctactcagatcaacctctccacttctcctacacctgcagtcgacgcgg

SEQ ID NO: 101643 - DNA, 708 bp, Homo sapiens
ctccatatatgtgaagtatttttcccttctaagtgcttatagtgactgtgtgttggctgtcttttatgagagccttcctagcagtttagattactgctgattatttctttggaatgaatattctttaaagctcataagataatgcttttaccaatacaaacactttgtgtgacctgccagatttaaggaccatagtacagctatggatactgaaccaaacccgggaacatcttctgtgtcaacaacaaccagcagtaccaccaccaccaccatcaccacttcctcctctcgaatgcagcagccacagatctctgtctacagtggttcagaccgacatgctgtacaggtatttcagctgtagtgatgggtagtctaagacttaagatgtcatattactttttgcttaagctggatttatgtattgtttcatattctcaaatgtacagttagaattactaatgtttcaatcaactgtctcaatccattttgtgtggctatagcagaataccaagactgtgtaattgtaaagaaaagaaacttatttcttacatttctggaagctgggaagtctaatatgaaggagctggcatctcacgagggccgtcttattgcctcattccgtggtggaagactagagagcaagataccaaatttgcagcctcaagcccttttaaaatttcctttagtcggccgggcgcggtggctcac

SEQ ID NO: 101644 - DNA, 675 bp, Homo sapiens
ctcctgaccttgtgatccgcccacctcggcctcccaaagtgctggaattaacaggcgtgagccaccgtgcccggcccactgggtagttttaatgtgtacaagttagtgatttctagtgatatgtaactaggaaagaaataatgttaataagcttgatgatattatgtattaaagcagtgaaattttaaactgccacttttttatactttgattttctgattaagataaaggttgagattatggtttgacattggttcaattgacttatcacaggtaattcaacaggcattgcatcggccccccagctcagctgctcagtaccttcagcaaatgtatgcagcccaacaacagcacttgatgctgcatactgcagctcttcagcagcagcatttaagcagctcccagcttcagagccttgctgctgttcaggtaagactaaaataagagtttatgagatcaaagtttctgttatctgtaggtagttactgaaaataaatagattgggtattatttcagagttctcagatgtcctgtggttatttttcccggaggaaatatattaataggttgccgaatagaagttaattgagaaaaaggggatatgtttttttatgttactctgtttctagcttttgtctcagtgctttttatccagattgaagaaatgctatgcta

SEQ ID NO: 101645 - DNA, 2081 bp, Homo sapiens
tagtgatggaggagagaagatggcggaagcggaatttaaggaccatagtacagctatggatactgaaccaaacccgggaacatcttctgtgtcaacaacaaccagcagtaccaccaccaccaccatcaccacttcctcctctcgaatgcagcagccacagatctctgtctacagtggttcagaccgacatgctgtacaggtaattcaacaggcattgcatcggccccccagctcagctgctcagtaccttcagcaaatgtatgcagcccaacaacagcacttgatgctgcatactgcagctcttcagcagcagcatttaagcagctcccagcttcagagccttgctgctgttcaggcaagtttgtccagtggaagaccatctacatctcccacaggaagtgtcacacagcagtcaagtatgtcccaaacgtctgtaagttccctaaattttttttttcctggatttaaaattttaaagaattgttttccaaaagtaaactgttgttatttatgaagctgttattataatttgttgcatgctgtttaaagtaacaattgcccagaaatagaaatgataaaattcaagaattcagaactaatgttaaacttatgaaaatctgagtcttaaaaaaatctttttgtattatttcttgtatatccatttgcactgatcatgttcagatcttatgtggtttcagctttctgtgtgtattgaaagcctaaaatatacaatgcagggatattggccatgaatttactgtgatatacaatagtatgtcatgtccttggtagacatctaagcatttctaactttgtgcaattcacattttagaaattatactttcagcttacatgagttatttgggttcaatttgcaagtatccattcaagatagggtaatttattttgagaaaggagtaaaagaaagctgattcgctatattgcacatatatattgggaaattgtgccaagtttcccaggtaaaataaatttatgggcatggtaatacttgtttagcttttaattttggtataattttaaactgcaataataataaaaaaatttctgtatctactctactcagattaatcaattattgcatattgccccattactttatcattcattcttttccactacatgtatacatatttttttctgagtcatttgtaagttgagatatgttcctttattcctaaatactttgatgtgtatttcctaagaacaaggctattgttttttgaagccacagaaaaattactaaattcaggaaatataacattgatacagtgcagttcattttcacatttcatcatttgtctcaggtttcccaacctcatcactatggacattatgagccagataattctttgttgtcaggggctatcgtgtaatttataggatgtttagcagcatccctggctactagatgccggcagcttgtggtctttctccttcctctagtgtgacaactataggtgtttcctggtggggggcaaactgcctgtagttgagaacctaataatgtcctttctagatattttttcctggtccagaatggtaatactttgatacttcataaaattggctccaatacaatatagtttgtaggttgttaaggaattgaaggttaaggaattgtgctctatttcttcagctaagggtatggtctttgctaactacatgctgtggtcagcatatagctgtggttttttttgttgtttggtttttttttctggctgttgatctgactttttttttttggcgtgggaatgtcctggagtgtgaacaagattagtttaaaaagttccctatgacttgaagatgttagattaaatgaaaaacttaaataatgtaacctagctcttaagcattaatactggagtttttgtcattgacatcagatgtctttaatacaatggtaattaaggaaaggagtggtaaatattttgtgggctactgaaggaaattatatagacaaattctttattctgtgaaatactggaataacaataggatgtatttgtatagatatgttattttgaatttttttccttcatgttattaaaaggtatcttttt

SEQ ID NO: 101646 - DNA, 431 bp, Homo sapiens
accaccacccactttgtctccagcagctataacagtggggagaggagaagatttgacttctgaacatcctttgttagagcaagtggaattacctgctgtggcatcagtcagggcttcagtaattaaatctccatcagatccctcacatgtttctgttccaccacctccattgttacttccagctgccaccacagggagtaacagtacatctatgcacagtagcattcccagtatagagaacaaacctccacaggctattgttaaaccacagatcctaacccatgttattgaaggctttgtgattcaggagggattggagccatttcctgtgagtcgttcctctttgctaatagaacagcctgtgaaaaaacggcctcttttggataatcaggtgataaattcagtgtgtgttcagccagagctacagaata

SEQ ID NO: 101647 - DNA, 1344 bp, Homo sapiens
tggcaaggtggaaatcaggaagatgaagaggatgaggaggaggaggaagatgaagaagatgaagatgaagaagaagatgatgatgatgaataagttggttctagcgcagttttttttttcttgtctataaagcatttaacccccctgtacacaactcactccttttaaagaaaaaaattgaaatgtaaggctgtgtaagatttgtttttaaactgtacagtgtctttttttgtatagttaatagcaccagcttcatattctccaattcagcctcattctctaataaaacatcagcagattcctcttcattcaccaccttccaaagtttcccatcatcagctgatattacaacagcagcaacagcaaattcagccaatcacacttcagaattcaactcaagacccacccccatcccagcactgtataccactccagaaccatggccttcctccagctcccagtaatgcccagtcacagcattgttcaccgattcagagtcatccctctcctttaacagtgtctcctaatcagtcacagtcagcacagcagtctgtagtggtgtctcctccaccacctcattcaccaagtcagtctcctactataattattcatccacaagcacttattcagccacaccctcttgtgtcatcagctctccagccagggccaaatttgcagcagtccactgctaatcaggtgcaagctacagcacagttgaatcttccatcccatcttccacttccagcttcccctgttgtacacattggcccagttcagcagtctgccttggtatccccaggccagcagattgtctctccatcacaccagcaatattcatccctgcagtcctctccaatcccaattgcaagtcctccaccgaatgtcgacatctcctccagctcagattccaccactggcccttgcagtctatgcagtctttacaagtgcagcctgaaattctgtcccagggccaggttttggtgcagaatgctttggtgtcagaagaggaacttccagctgcagaagctttggtccagttgccatttcagactcttcctcctccacagactgttgcggtaaacctacaagtgcaaccaccagcacctgttgatccaccagtggtttatcaggtagaagatgtgtgtgaagaagaaatgccagaagagtcagacgaatgtgtccggatggatagaaccccaccaccacccactttgtctccagcagctataacagtggggagaggagaagatttgacttctgacatcctttgttagagcaagtggaatgacccgctgtggcatcagtcagtgctcagtaattaaatatacatcagagagagctgcg

SEQ ID NO: 101648 - DNA, 1879 bp, Homo sapiens
gcagagcggcgggtggggagcggcaggcgggcagggtccccggaggcccccgggctctgcccctccagctagagaggcagccgaaccctagcggcctggaaggggccgggaaaccgcggccagctggcaaggagtggcccccgggggcggggcgccggcgggtgtgtgagtagcccgcccggcccgggtccgagttccagccccgcgatggcctccgcgggcagcaccgctcggcgggcgggctccggaagctggcactcagaaaggggagaagggagaggtgctcggccgcagccaactccaagtggctccatgcagcaggcgaacaaagtctccttgaaggccacctggactgacgcggagtccaagcagcccaggtgggtagcgggagaaggtgtcccggctgcggggagcgagaacccggcccagcgcctccctggtgggcagggcctggagcgggcgggggcggaggctgcggcccgagaagcccgcagagacaggctggggccagggatcgcctcccgagaggtgcctaggccgtggcccagagtcgcttccccactgccccgcccaccagccaggcgggggccagggatcgcctcccgagaggtgcccgggccgtggcccagagtcgcttccccactgccccgccctccagccagcccctgcccgacctcgcagaccacctcagtgcgcaggcgactgccctcgccaggccgcgccgccctgcctcgctcaccccgccccgcgctgaccccagccccagcaaggagtccgaccagacggcaatcgaccagacggcgatcgggagctactaccagctgttcgcagcggctgtgggcaacgtggaatggctgcgattctgtctgaaccagagcctcagggaaatccccaccgacgacaaggtaaggtcttgagtgttggggcaaagaccgaggtccctctcccgctacgctgctcggagtggtcacctggagaagagatatccttttctgggtagatcttcctaatttaactcatcttctggctgtggaaggaccattttgggggcagggaggttgggtgggctgatgaacacacactggttaattagcaaaagggtgtgagcattcctggggacacagggaagaaagtgaaggtaaccccaataaatttatataaattgtggaccctgggacctcagtcccactcagcctcctcctgcctgctctgaacctcacagggcttcactgccatccacttcgccgcccaatggggcaagcttgcatgcctgcaggtcctggtagaggagtacaagtttcccgtggacctgctgaccaacaatagccagacacccctgcacctcgtcatccacagggacaacaccaccgtggccctcccctgcatctactacctgctggagaaaggcgcagacctcaatgcgtgagtccagcctgcttcaggagggaggcttcgggcacaggcacgggcacagccctacttccaggcaggcaaatccatgcaggacaagcagaggggttgctggaggtgacaaggattgggtcccacataaagcagtcaggaatccacatggtgtaataaagagactgggctttagccgggcatggtggctcatgcctataatcccaacactttggaaggccgaggcaggcggatcacctgaggtcaggagttcaacaccagcatgaccaacatggagaaccccatctctactaaaaatacaaaattagcagggcatggtggcgcatgcctgtaatcccagctattcgggaggctgaggcaggagaattgcttgaacccaggagatggaggttgcggtgagctgagatggtgccattgcacttcagcccgggcaacaagagcgagactccgtctcaac

SEQ ID NO: 101649 - DNA, 2389 bp, Homo sapiens
gcagagcggcgggtggggagcggcaggcgggcagggtccccggaggcccccgggctctgcccctccagctagagaggcagccgaaccctagcggcctggaaggggccgggaaaccgcggccagctggcaaggagtggcccccgggggcggggcgccggcgggtgtgtgagtagcccgcccggcccgggtccgagttccagccccgcgatggcctccgcgggcagcaccgctcggcgggcgggctccggaagctggcactcagaaaggggagaagggagaggtgctcggccgcagccaactccaagtggctccatgcagcaggcgaacaaagtctccttgaaggccacctggactgacgcggagtccaagcagcccagccagcccctgcccgacctcgcagaccacctcagtgcgcaggcgactgccctcgccaggccgcgccgccctgcctcgctcaccccgccccgcgctgaccccagccccagcaaggagtccgaccagacggcaatcgaccagacggcgatcgggagctactaccagctgttcgcagcggctgtgggcaacgtggaatggctgcgattctgtctgaaccagagcctcagggaaatccccaccgacgacaagggcttcactgccatccacttcgccgcccaatggggcaagcttgcatgcctgcaggtcctggtagaggagtacaagtttcccgtggacctgctgaccaacaatagccagacacccctgcacctcgtcatccacagggacaacaccaccgtggccctcccctgcatctactacctgctggagaaaggcgcagacctcaatgctcagacatgcaacggctccacgcccctgcacctggcagcccgtgacggcttgctggactgtgtgaaggtcctggtgcagagtggcgccaacgtccatgcccaagatgccatgggctacaaacccattgacttctgcaaaatatggaaccaccgtgcctgtgcccggttcttgaaggatgccatgtggaaaaaggacaagaaggactttgcccgtgagatgacgaaaatgaagatgttcaagagccagctgaccctcatggagcacaactacctgattgagtatcaaggtcaaggatgcagtgtgcacttcccatttgccttttcccccatcacaccagagactctcctatggcaggacatttctctactatcagactgtggattcctttggagaagaagggaattgtctttctaaagagcacaaaattctcagagaagctgctatcagaaagtggctccacggcaagctgcacccaggccactctctggtctccaataccaagcaagcccgggccaccgccctctccaagaccccagagcaacgggaatcgcagcgttccaggagcttccacccctctgtggatgcacgcctgcaatgcattccacagcccacggagatgcccaagcccatctacaggaagcccacggtcaagcggcccacaatgtggaatgttagcaacaaccccgccagaccccccaccacccagatcagccactcgcagggcatccgcctgggcgtgcatccagaccccactccggagcacgacttcagcagcttcctggaggtgaggcctgatgggcacggcggtgcgcggctgcacacagtggacggccactgggtggcgcccgtgccgcggctgccttttgagggtgctctgcgcatgctgtacccacgtgtatggccatacagaatgaaggtgccccagggcttttaccccatcagcatgagggaagtgcccaggaagcggcacctgggtgacaacaccttctggaccgacactctggccatgaacctgcgtgacacattcgatgaagccttcctggcagctgtgcgatctcatcaaggactccccaccctgccctccccacaaaccaacccataaagttattatggctacctctccccctgaggcagcccagtgaaggctgaagtgtggcaattcacgttgtgggtggcgaggaaagggggaggggtgcctatgggcttcccactcccaagctcgaggagtcacccttcccaatcaaaagcccagaccccaggcctcccttttctctgcaaataaatctcttggcacccccccaccgccgccaggaaatccaagttaggttgagagtggggggtcagacactattcttcaccttggcattgtaaaagttgtcacattttggcacccccactgccctcccagccctaagggcccaggcttccaggatggaaggacccactgggaaattctgtttcttgttcagattaagcccttcctgctgcaggctctaagctgagacccagaatggggtggagggcaactaatatgtccccctggcatgggcttccctgctactct

SEQ ID NO: 101650 - DNA, 2439 bp, Homo sapiens
gcagagcggcgggtggggagcggcaggcgggcagggtccccggaggcccccgggctctgcccctccagctagagaggcagccgaaccctagcggcctggaaggggccgggaaaccgcggccagctggcaaggagtggcccccgggggcggggcgccggcgggtgtgtgagtagcccgcccggcccgggtccgagttccagccccgcgatggcctccgcgggcagcaccgctcggcgggcgggctccggaagctggcactcagaaaggggagaagggagaggtgctcggccgcagccaactccaagtggctccatgcagcaggcgaacaaagtctccttgaaggccacctggactgacgcggagtccaagcagcccagccccagcaaggagtccgaccagacggcaatcgaccagacggcgatcgggagctactaccagctgttcgcagcggctgtgggcaacgtggaatggctgcgattctgtctgaaccagagcctcagggaaatccccaccgacgacaaggtaaggtcttgagtgttggggcaaagaccgaggtccctctcccgctacgctgctcggagtggtcacctggagaagagatatccttttctgggtagatcttcctaatttaactcatcttctggctgtggaaggaccattttgggggcagggaggttgggtgggctgatgaacacacactggttaattagcaaaagggtgtgagcattcctggggacacagggaagaaagtgaaggtaaccccaataaatttatataaattgtggaccctgggacctcagtcccactcagcctcctcctgcctgctctgaacctcacagggcttcactgccatccacttcgccgcccaatggggcaagcttgcatgcctgcaggtcctggtagaggagtacaagtttcccgtggacctgctgaccaacaatagccagacacccctgcacctcgtcatccacagggacaacaccaccgtggccctcccctgcatctactacctgctggagaaaggcgcagacctcaatgcgttcttgaaggatgccatgtggaaaaaggacaagaaggactttgcccgtgagatgacgaaaatgaagatgttcaagagccagctgaccctcatggagcacaactacctgattgagtatcaaggtcaaggatgcagtgtgcacttcccatttgccttttcccccatcacaccagagactctcctatggcaggacatttctctactatcagactgtggattcctttggagaagaagggaattgtctttctaaagagcacaaaattctcagagaagctgctatcagaaagtggctccacggcaagctgcacccaggccactctctggtctccaataccaagcaagcccgggccaccgccctctccaagaccccagagcaacgggaatcgcagcgttccaggagcttccacccctctgtggatgcacgcctgcaatgcattccacagcccacggagatgcccaagcccatctacaggaagcccacggtcaagcggcccacaatgtggaatgttagcaacaaccccgccagaccccccaccacccagatcagccactcgcagggcatccgcctgggcgtgcatccagaccccactccggagcacgacttcagcagcttcctggaggtgaggcctgatgggcacggcggtgcgcggctgcacacagtggacggccactgggtggcgcccgtgccgcggctgccttttgagggtgctctgcgcatgctgtacccacgtgtatggccatacagaatgaaggtgccccagggcttttaccccatcagcatgagggaagtgcccaggaagcggcacctgggtgacaacaccttctggaccgacactctggccatgaacctgcgtgacacattcgatgaagccttcctggcagctgtgcgatctcatcaaggactccccaccctgccctccccacaaaccaacccataaagttattatggctacctctccccctgaggcagcccagtgaaggctgaagtgtggcaattcacgttgtgggtggcgaggaaagggggaggggtgcctatgggcttcccactcccaagctcgaggagtcacccttcccaatcaaaagcccagaccccaggcctcccttttctctgcaaataaatctcttggcacccccccaccgccgccaggaaatccaagttaggttgagagtggggggtcagacactattcttcaccttggcattgtaaaagttgtcacattttggcacccccactgccctcccagccctaagggcccaggcttccaggatggaaggacccactgggaaattctgtttcttgttcagattaagcccttcctgctgcaggctctaagctgagacccagaatggggtggagggcaactaatatgtccccctggcatgggcttccctgctactct

SEQ ID NO: 101651 - DNA, 641 bp, Homo sapiens
tcagactgtggattcctttggagaagaagggaattgtctttctgtaagacttgaggttttccctagggcagggactgtgtctcccatgtcaagttggagtctcacctagggcagaggctacatctctcccatcagattggagatcccccctttgggagaggtgctttgtctccccactcagcccaggggctcccttatggaaaaagttgtctcccccatcggaacaccggctcccataaggcaggtgttgcttccatcagactcagactttccctcccatcagactcagagtttccctcatccttcagactgtggtttccgaaagctacagccacaggacctccttgcccagaagcagagggcagcagtcctccatgactctcttgtgccctctgttgttgcagaaagagcacaaaattctcagagaagctgctatcagaaagtggctccacggcaagctgcacccaggccactctctggtctccaataccaagcaagcccgggccaccgccctctccaagaccccagagcaacgggaatcgcagcgttccaggagcttccacccctctgtggatgcacgcctgcaatgcattccacagcccacggagatgcccaagcccatctacaggaagcccacggtc

SEQ ID NO: 101652 - DNA, 2122 bp, Homo sapiens
gcagagcggcgggtggggagcggcaggcgggcagggtccccggaggcccccgggctctgcccctccagctagagaggcagccgaaccctagcggcctggaaggggccgggaaaccgcggccagctggcaaggagtggcccccgggggcggggcgccggcgggtgtgtgagtagcccgcccggcccgggtccgagttccagccccgcgatggcctccgcgggcagcaccgctcggcgggcgggctccggaagctggcactcagaaaggggagaagggagaggtgctcggccgcagccaactccaagtggctccatgcagcaggcgaacaaagtctccttgaaggccacctggactgacgcggagtccaagcagcccagccccagcaaggagtccgaccagacggcaatcgaccagacggcgatcgggagctactaccagctgttcgcagcggctgtgggcaacgtggaatggctgcgattctgtctgaaccagagcctcagggaaatccccaccgacgacaagggcttcactgccatccacttcgccgcccaatggggcaagcttgcatgcctgcaggtcctggtagaggagtacaagtttcccgtggacctgctgaccaacaatagccagacacccctgcacctcgtcatccacagggacaacaccaccgtggccctcccctgcatctactacctgctggagaaaggcgcagacctcaatgcgttcttgaaggatgccatgtggaaaaaggacaagaaggactttgcccgtgagatgacgaaaatgaagatgttcaagagccagctgaccctcatggagcacaactacctgattgagtatcaaggtcaaggatgcagtgtgcacttcccatttgccttttcccccatcacaccagagactctcctatggcaggacatttctctactatcagactgtggattcctttggagaagaagggaattgtctttctaaagagcacaaaattctcagagaagctgctatcagaaagtggctccacggcaagctgcacccaggccactctctggtctccaataccaagcaagcccgggccaccgccctctccaagaccccagagcaacgggaatcgcagcgttccaggagcttccacccctctgtggatgcacgcctgcaatgcattccacagcccacggagatgcccaagcccatctacaggaagcccacggtcaagcggcccacaatgtggaatgttagcaacaaccccgccagaccccccaccacccagatcagccactcgcagggcatccgcctgggcgtgcatccagaccccactccggagcacgacttcagcagcttcctggaggtgaggcctgatgggcacggcggtgcgcggctgcacacagtggacggccactgggtggcgcccgtgccgcggctgccttttgagggtgctctgcgcatgctgtacccacgtgtatggccatacagaatgaaggtgccccagggcttttaccccatcagcatgagggaagtgcccaggaagcggcacctgggtgacaacaccttctggaccgacactctggccatgaacctgcgtgacacattcgatgaagccttcctggcagctgtgcgatctcatcaaggactccccaccctgccctccccacaaaccaacccataaagttattatggctacctctccccctgaggcagcccagtgaaggctgaagtgtggcaattcacgttgtgggtggcgaggaaagggggaggggtgcctatgggcttcccactcccaagctcgaggagtcacccttcccaatcaaaagcccagaccccaggcctcccttttctctgcaaataaatctcttggcacccccccaccgccgccaggaaatccaagttaggttgagagtggggggtcagacactattcttcaccttggcattgtaaaagttgtcacattttggcacccccactgccctcccagccctaagggcccaggcttccaggatggaaggacccactgggaaattctgtttcttgttcagattaagcccttcctgctgcaggctctaagctgagacccagaatggggtggagggcaactaatatgtccccctggcatgggcttccctgctactct

SEQ ID NO: 101653 - DNA, 1910 bp, Homo sapiens
actcagaagatactgggaatcttaagtgaatcctgaaatggggagggctttggggctgctgactccggcacaccgggtctgtttcagttccatttctctccagttctcagccctatcctcctctgatgtcagggtcaccagtcctcagagtcacacactgtccagaggaggcaaggcccatctgtttcctgtagctctaaccttttccagaagctccttgcatcttccctcatctcttatggcctcaattcgatcaagtgtccattctcgttcctttagctagaactaaaggaaagccatatgctgactgacttaggtctggggcaaggtctgatggaattatgatgattggcttagcccaatcagagcctgtgcctggagctgggtcaatctccaaagcctctgattgcttagcaacagtctgggatagtgagacaatggcggtgggggaggttctatgacaatatatggaaggctccgtggaggcaaggacagagctagattgagttgctgccaccgggcctggagagccagccaactgtatcctccctacatgacttctcaaggcccaccacttccaagaagcgtgtccacatcaggccatccagtcctttctgctttctctttccagggtcaaggatgcagtgtgcacttcccatttgccttttcccccatcacaccagagactctcctatggcaggacatttctctactatcagactgtggattcctttggagaagaagggaattgtctttctaaagagcacaaaattctcagagaagctgctatcagaaagtggctccacggcaagctgcacccaggccactctctggtctccaataccaagcaagcccgggccaccgccctctccaagaccccagagcaacgggaatcgcagcgttccaggagcttccacccctctgtggatgcacgcctgcaatgcattccacagcccacggagatgcccaagcccatctacaggaagcccacggtcaagcggcccacaatgtggaatgttagcaacaaccccgccagaccccccaccacccagatcagccactcgcagggcatccgcctgggcgtgcatccagaccccactccggagcacgacttcagcagcttcctggaggtgaggcctgatgggcacggcggtgcgcggctgcacacagtggacggccactgggtggcgcccgtgccgcggctgccttttgagggtgctctgcgcatgctgtacccacgtgtatggccatacagaatgaaggtgccccagggcttttaccccatcagcatgagggaagtgcccaggaagcggcacctgggtgacaacaccttctggaccgacactctggccatgaacctgcgtgacacattcgatgaagccttcctggcagctgtgcgatctcatcaaggactccccaccctgccctccccacaaaccaacccataaagttattatggctacctctccccctgaggcagcccagtgaaggctgaagtgtggcaattcacgttgtgggtggcgaggaaagggggaggggtgcctatgggcttcccactcccaagctcgaggagtcacccttcccaatcaaaagcccagaccccaggcctcccttttctctgcaaataaatctcttggcacccccccaccgccgccaggaaatccaagttaggttgagagtggggggtcagacactattcttcaccttggcattgtaaaagttgtcacattttggcacccccactgccctcccagccctaagggcccaggcttccaggatggaaggacccactgggaaattctgtttcttgttcagattaagcccttcctgctgcaggctctaagctgagacccagaatggggtggagggcaactaatatgtccccctggcatgggcttccctgctactct

SEQ ID NO: 101654 - DNA, 305 bp, Homo sapiens
tgtgtgtgtttgtctgtgtgtctgcatgtgtgtgtactggaggcagcgcgtaatcatggaggtgcttccacaagatctcagaaaaactcaaaagaatgttctaggatcttagggatgggttttcccaaagactcaactcttcccttttaagctgggtcctctgatgccacatgcagaattgctggaatatttgcctccttccgggcgttagaaaacagttgtgttttcattccttgaacactttggtcacttagagcctgagccaagacctaagcaccaataccacattggactcaactcatgga

SEQ ID NO: 101655 - DNA, 713 bp, Homo sapiens
gtcaattctttcttcccaggaggcaagaattgaagttgctgcagatccatattaattcccagccagtaacagtagatcttagtgaggcatgtataggtgtttattgcacttttctttcaatggagggatggtaagagcatggcacagaattcctaatgtgtgtttcaagggcccaagcaccatgtgaatcaagaaccaacttctttggaaacttcaagatgctggtcctaacagtttgttctgcttgttcaactatcgttcctagggtcctctcactaaagcaaggtatgtgcttatccgattatgttctttgcatctctgtttcttggacaggtattacagaatggtgattttgcagctaaacagactcaagcttaaatttttgctctatcacttcattagctgtatgcccttggtcatgttacttaacctctctgagccacagatttctcactcgtaaattgaggctgaaaataggtgactgcctcttaggttatggaaggcacttagctctggaaagtgtttatgacaggcagctaaaattgttctagggtaggagagatggattaggtgagactgcttcttaccatgaggaatttcccttctaaatggaggtcagccatctgctgggggaccaggatagctacgctgctaattgagggtttaatttgtcagccacaaaaaaggtctctgggagttgtggttacttaatg

SEQ ID NO: 101656 - DNA, 103 bp, Homo sapiens
agagtctgcatttacgaccacgtgatgacaatggtgctggtctgtggctcacattttaagtgtcagctgtccttcggagcctttcttggtaccaggggctgag

SEQ ID NO: 101657 - DNA, 1329 bp, Homo sapiens
agctgaggcgcctggtgggttcccacgtgcgtcctccgccccccaccctcggttttaataaccgtgaaaaaaaaaaaaaaaagatgcgtttcccgaacgtgggtacttagcaatacctagtaactaatgattttttgggaaattaaataagatcaaattataagcaatgaacatttcagatgtcgatttaacacagttccaatggaaactgcttgcctgttatctttagttcgtgggggaagcactgtagaagtttagaaatggctagagacatccccagattcccaagcagaatgaaaacttcctttccgaggaaaacacaaaatgttctcccacatcacaccccgcctgcatttatcaaaaaagaaaacacctgatgctggctgtgtgctgttggaaccagaaactttttagcatattatagtcgagtgccagtgacttctttgttctttcagaggcattctaaaaagcggcgtgtttcacgaatctcagagacaacaactttcacaactatcaactgtcacctcccaaactgccacagaaccttttaagtccaacattctgtcatttgtgggaaatactcatcttctaaaacacactctacttattctttgaatagtagttgcaaagctagtcatctctcaggaagcactttctatttccaaaactttggtttcatcagtacctggagcaaagcttctggcagaaacacaaatcctcatcaggggagaggcacaggatcaactcacggttataaactggactcctgctctgacgggtagcagccatcaactttgcccgattctcataattctgaagggtcaccaaggagttgctaccagccactgtacttaaagtggtgtcacaggattacaaaatagaagaaagtctttcttctctgactaatatgttagtgctctagtaagcatcaaagatgaaagacacacaatgtgagcctgctttggccaacacaaagtacttacagaattttcaggcctacttccagccctggagacaaatttcccatcattcttcattacaggagtaatcatcctcatagggctgtaatagcttttttttttttttagatggagtctcgctctatcacccaagctggagtgcagtggctcaatcttggctcactgcaatctccacggcttgggttcaagcgattctcccgcctcagtctcctgagtagctgggattacaggcgtgtgccaccacgcccagctaggttttgtattttttttagtagagacagtgtttcatcatgttggtcaggctggtcttgaacccctgacctcatgatctgcccacctctgcctccca

SEQ ID NO: 101658 - DNA, 311 bp, Homo sapiens
cttatgctaggattacattatgctaaatcaaaagtgcattttttatataaaatatttccaacttaccatgggtttacctggatgtaatctcatggtaagtggaggagctactgaatgcgtattgcttttgcaccactgtaaagctgaaactcgtaagtcaaaccatagtaaatcagggactatctgtgttaaatctaatcttgttcacttcatttcctcactaaatttgccagatcaaactacaatttaatccctgttcttctgtctccctccatctctttcttccttcctccttccttcccttccttcct

SEQ ID NO: 101659 - DNA, 149 bp, Homo sapiens
gagcgagaccttgtccctaagaaaaataaaaatcagggttgtaaagaggaggttaacactcatgctggtcacctctaatgaagacctaaattagagaacaggacagacaagctgggttaggaacagaatccaaaaagtgtttcttaagt

SEQ ID NO: 101660 - DNA, 416 bp, Homo sapiens
aggtcagatgtagcatttagggctgaaccagccattccaggttctctagggcttttgttaatgggatacacaatcattctggttcagacattcattccctagaattgtgagaagacagagtcctcctcacttcttgaaggttgatgctcttgaattaaagaaaatctgaagtaagtcagtgactcacagtgaggtacgttattatcgacaccaaaccaccgtctcaaggatttgattgttgctataaatcattgactgaagcatacctctggttcatgtcacaataccaaatgcacttaacaaaagctaaggatgatctcatttttatgactctcagagtgcacaagcagcacttatgtattcatctacagtgtatggatttttcttgctcaacaggagactagaatttgtcgcat

SEQ ID NO: 101661 - DNA, 213 bp, Homo sapiens
atttagatgtgctagtaacatcatggtactttttgaggttgggataataagtaaacagaagtcttttaagattttgatgcagggaacattaacaggagacagaatttggagtagcaggagaatttgaaaatgttaaagaaactttgtccttccaaagaaagccaaaaatattatttgcacttcagtctgcatttgtctggaatgcttacaaaa

SEQ ID NO: 101662 - DNA, 156 bp, Homo sapiens
caaaaaagaaagaaaacacagctgaagcctaattttgtatatcatttactgacttctctcattcattgtggggttgagtagggcagtgatatttttgaattgtgaaatcatagcaaagagtgaccaactttttaatatttgtaacctttccttttt

SEQ ID NO: 101663 - DNA, 232 bp, Homo sapiens
tcgctctccttctttctctctttctctctctctctccctccccctcctctctctcttctctctcccttgacaagcgctttttcatttgcattcctgagttctcttaaccttttacttagagaggtgcagtatggtttagagtaaataaatttaaaaagccaagaggcttgggaatgatacaattatcactgaattctggtgtcccttcttaccccgtgtgagactctgggca

SEQ ID NO: 101664 - DNA, 397 bp, Homo sapiens
attgatccctctcttcaggaatgatcgacagatagtccagaaagcataggctgtagattttgttccagaacctcctgggatcatcagattgaacacatgagggtgggagactgccatacaagctgggaaggaggaatcagatgatattgtcatgaattcctcaagagttagtgtttgctggcctccaagaggcaaggatctctgggaacttaagacagagaagcacttcacactcacccatgagctcttttccgtgggtctcaactgggcattcacaacatagattggaagtaaggtggagacccaaaatttgtgatcagacatgattaccttccacagtgtgtggcctgaaatctcacccccctctggaggtcctagattgtcctccagagccttc

SEQ ID NO: 101665 - DNA, 590 bp, Homo sapiens
ctgccccctggaacctgagcaagaagaagatcctagtgggcggagtggggagggaaagtgttctggagagttttacttgggattctggtatttgggtttctgtcactgtctcttctccctccaaagtcaactaatactcagacattaaggcttaagaccctgttaaggggaaaggtctatgctttagagaggatgctgtagagtggtaggcaaccatcattcctcttgtgaatattgtggtcattgcattatgggccttcattgaattatgaaccatcatgaggatgagatccaaaccaagctggatggaaaccacatggatgaggccccagagagtgaggacgccatacaaatgtaatcactgagctgtctgaatcatcttgagaaaattctacaagtctgtatacatctgacttccccatcagttacacactttgaaaggaaagctctagggagaagagtaccatttgcttccccaatgctaggagaggaaggtgatgagaccgagattactaactaaattatttcctgtgacttcttagaaaagctgaactcccaaggtatgccgcttggatatggggacgcgcaca

SEQ ID NO: 101666 - DNA, 255 bp, Homo sapiens
gcttctgtggtccctaatcactagatgccagtagaactattcccgcctccgacttgtgacaattatttgtctctagagattaccaaacacctcctgaggaacaaaatcactctgatttgagaaccactgatcccatattaaaggtccatgcctgtcatatagtgctcaacgaacaatggttaaatccacggtcaccattgctttaaaaatgagaaaggagccaggcgtggtggctcatgcctctaatcccaacac

SEQ ID NO: 101667 - DNA, 316 bp, Homo sapiens
ggtgacatttagctgagattgaaggacaggaagtggacagatcagtgaagagcaggctggagaatattctagaaagaaagaacagctagcctaatggccctaaggtaggatgccctcagtgcatccagtgactggaaagaaaggcagagtggccaggacgtggatggggacgtggatgaggtgggtgtcaggaggtgcagggctttgtgtgcctggggagaagttgggattttatgcttaggtgataggaagccgctggagggttttgagccagaggtaaagtgatgtgatggttttctgttttttgttttttgtt

SEQ ID NO: 101668 - DNA, 372 bp, Homo sapiens
ggaagcctgaagagtgttttcacatattgactcagcttgccaactctttctccttcaatgtttcaggtgtcagtggctcctgtagttattagcaatggcactaaactaaaaatatgattggtcctattataccagacatggaaaactgaaataacgagccagagcaatactatccataattgcatagacatttccttactgaatacacactagttctctcaaattattggtctagtttgacaaagtcccaaaggtgtaagtagctaatgtacccagttaaagtgaagagaaattggggacgagagaatgattgtcaaaacacttctctgatagaaccttgaagaatataagacttagagtcacttgtataga

SEQ ID NO: 101669 - DNA, 355 bp, Homo sapiens
agattgttactagcagacctgccctacaagaactattaaagagagagtccttcaggctgaaatgaaaagacattagagagtaactggtaaatgtactacataggtaaataaaaatatagcataaatgtattttgtttgtaaatcatttattctcttatttaaacacctacttcataaagcaagaattataaaactgtgtttatgggcttacactgtgtaaagatacaagttaattgacaaaatttcacaaaggagagagaagaaatggagctatatggaaacaaaattttagtacactattgaaattaagtcggtagtaatttgaactaaattgttctaaattgggatgttgatc

SEQ ID NO: 101670 - DNA, 307 bp, Homo sapiens
gcagacacctggtaactgcaacctgaactcccaggtgagtgtcccactagctggaaggaaaaacaagcatggagaattcacaaaggaaacatttatagaatccagaaaaggcatttactttttatggggagcaatgcacataaaacccaagactccaggaagccctttgtgcttcatgattaagaggctggggagccccaagcctccctgctaggaggtcagagtggaggtgtgtgagtgcaggaaaagtacgtttcaggccccagactcgctgatatcactgatgtgtagacaagaaacttgacaa

SEQ ID NO: 101671 - DNA, 409 bp, Homo sapiens
ctagaagtactacctaacacaattgccagtacagagtagatgctcaataagttgctgattaaattaaatttcagaggaagtaatgtgataaacacctttaggtaaagcactgagacacaaaaagaagaaaatggctatgctgtcagggagtatataaatcaataatggtagcttccatttattgagtcctaactatggtattggcactgttcatatagtatgccatttaacactcatagcaacccagtgaagtaggtgttataacccctagtttaagaatgaaattaagtaacttaaacaagttcatagaataaataataggattcaaacttaggtccctccagtttccaagcctgtgctctttcactatacatgatgtcagctgggatctagccaggaaaaaaaaaga

SEQ ID NO: 101672 - DNA, 330 bp, Homo sapiens
tctggtaagattggcctggagtttccatttcttacgcttttctcagcagttcagtgtcagggttttttgttagcattataaaaggagatgagtatttttctgttttttttttctcctcagttttcagagtttacatagatttccaatatactttttgtgagtttaggacaactacaaaattagatgatacagtctccatataagactattctcacttctgacaccaactgtaagcttgggggattcccaaaaccactctcaggtttgataattcattagaaaggctcatagcatttagtgaaagctgttgtacccatagttatgatttgt

SEQ ID NO: 101673 - DNA, 847 bp, Homo sapiens
aacaagactgtgggtggtttaggtgacaaagaaaagttcaggactatggatagttcatttgtatgcaaatatgttagtcactgtgcatatttcagtgaaaaattagtaaatgacttcataaaatgcaagataattgggaaacaccaaaacgggtgaattctaagttgttttgcaaactttatatagatgtgttgagcaaatcatattttaggctgccagtttttagtcctgtaaaatgcattaaaaagtgctggccatatatcttggattttgttttctctttgtagaatttaattccagatttgctttgatctcattcttgtatttacatcttgctcctttgtttaaactgtcttcttttatttacaatatgcagagagggaagcaggtttaagtccaattaccataatttctgcttgacttatgtgcacttaagcagtttaaatcttgctttggtgacaggagacttttccttcaggattccacaataaatccttccaaactgatgaataattggattcacagtcagtcccttcagtgcacaaaatacttaggttcctgggtctcactaagtttgaggagcaggccttgcatctggaacacaagtcaacagtagaaacatcccttggctgtgccaagtccctaacacatcaaactgctatgcacaattccctttctctctgaaaatatcatgaattctcaactgctgaatcaagtgcaaattccttagcttgaaatttcttaaggttcttcatgaagtggctccccacttttactgactcctgttgtattaccctcagatcaaatgtttggcttcggtggggtctttctctgttccatctccaag

SEQ ID NO: 101674 - DNA, 338 bp, Homo sapiens
agactcagaagtcaggagccttggccaggagcctctgcagtggccactaactgcccttgtagctgtgtttcctcctggccaggcccagggctcagagaggagcaagccagggttcactctgccctggacccgggtggctgaggacggcaggccccagtcctaaccagcaaaggtgcttccagcccagcccctccccccaactagggccttttttattttttatataagttactctgggatggggagggtggttattgtgggggctgcccctccccctgcacagtagtttgtcctgtggtttattttgtattacctgtaaataaagtggctttatttta

SEQ ID NO: 101675 - DNA, 435 bp, Homo sapiens
tttaatagctttactgagatgtaatttacataccataaagttcacccatttaaagtacacaatttagaggaggtttctcgtatacttagagagttgtgcaaccatcaccataatctaattttagaatattttcatcatctccagaagaaaccttgtacccattagcaatctctccccatccctcccccagataactgctaacatggagggactttaacatttgaatccaaacaagaagaagaaacctttagtattcaatcacctgacacaagttcttcattttatagaggaaaaaagtgatgttagagaagggccatgattttatagaggaaaaaagtgatgttagagaagggccatgttagagaagggtgagatgtggcagaactggggtggatcacagtccctgatgtctacatcataatggcagtgctgtga

SEQ ID NO: 101676 - DNA, 394 bp, Homo sapiens
gcataattattattattattattgtagcgacagggtctcgctttgttgcccaggctcgtctcgaactcctgggctcaagcaatcttcctgcttcggcctcccaaagtgctgggattacgggtgtgagccacagcactcggacgaaaacattttttaaacatgcttccaggatatcttttatgtgaatatggctcagtttagtcatgcccccattcctctttgtcccttactttgctattatcaataaccctgaggcgggtttcttatctctggaatagcagtactatctccctggtggagtcgtcctgaaaatgagaggcaatgtgttcaaagtgcccaatacgtgactgacgtattcaataaaagggagctagtattcatttaacagctgaga

SEQ ID NO: 101677 - DNA, 734 bp, Homo sapiens
aagaaaagtagaatgaaggaaagtataaagaggggtcaaagaatccagtcagtgctaagatatttgacccaggagaaaagaagaggggtgctaaatgacaagaacgcaaagactgatgcaaagggctcctgaagatgcttcagaattttggcaagtctcctctgtccctactttttgtaggctttcctccttccggacactttagtactccttcctgcataccccctcactgtgagcacagagagagagatcttggaaggcaggtggaaagcagcagaataaatttcaggaggaagtaaaagtcaggtgaagggaataaaaatgagacttagcctaatatccagaaaagggattggactagatggagcaggaagagaaatagctatgcaggtgaatatactgaaggaatttttaaaaggtagccatgggtctacatattgaaaagatccctatattagaaaataaaaggccaatctctaatcctacctgtacagcagagacactctggcatgagtccttccatctctttgggccgtaattggggcttcactcatcaataagatttatattcctaagacttaaggttacttccattatataaataattatcttcagacaatactataaacggggaattaccttaattaagtttttggaaatgatggcttatgtatgtttctataactccctagcactctaaatttcctcctggggtgattcaactacaaagaaga

SEQ ID NO: 101678 - DNA, 4203 bp, Homo sapiens
ctccctcgctccctccctgcgcgccgcctctcactcacagcctcccttccttctttctccctccgcctcccgagcaccagcgcgctctgagctgcccccagggtccctcccccgccgccagcagcccatttggagggaggaagtaagggaagaggagaggaaggggagccggaccgactacccagacagagccggtgaatgggtttgtggtgacccccgccccccaccccaccctcccttcccacccgacccccaacccccatccccagttcgagccgccgcccgaaaggccgggccgtcgtcttaggaggagtcgccgccgccgccacctccgccatggagctgatcaccattctcgagaagaccgtgtctcccgatcggctggagctggaagcggcgcagaagttcctggagcgtgcggccgtggagaacctgcccactttccttgtggaactgtccagagtgctggcaaatccaggaaacagtcaggttgccagagttgcagctggtctacaaatcaagaactctttgacatctaaagatccagatatcaaggcacaatatcagcagaggtggcttgctattgatgctaatgctcgacgagaagtcaagaactatgttttgcagacattgggtacagaaacttaccggcctagttctgcctcacagtgtgtggctggtattgcttgtgcagagatcccagtaaaccagtggccagaactcattcctcagctggtggccaatgtcacaaaccccaacagcacagagcacatgaaggagtcgacattggaagccatcggttatatttgccaagatatagacccagagcagctacaagataaatccaatgagattctgactgccataatccaggggatgaggaaagaagagcctagtaataatgtgaagctagctgctacgaatgcactcctgaactcattggagttcaccaaagcaaactttgataaagagtctgaaaggcactttattatgcaggtggtctgtgaagccacacagtgtccagatacgagggtacgagtggctgctttacagaatctggtgaagataatgtccttatattatcagtacatggagacatatatgggtcctgctctttttgcaatcacaatcgaagcaatgaaaagtgacattgatgaggtggctttacaagggatagaattctggtccaatgtctgtgatgaggaaatggatttggccattgaagcttcagaggcagcagaacaaggacggccccctgagcacaccagcaagttttatgcgaagggagcactacagtatctggttccaatcctcacacagacactaactaaacaggacgaaaatgatgatgacgatgactggaacccctgcaaagcagcaggggtgtgcctcatgcttctggccacctgctgtgaagatgacattgtcccacatgtcctccccttcattaaagaacacatcaagaacccagattggcggtaccgggatgcagcagtgatggcttttggttgtatcttggaaggaccagagcccagtcagctcaaaccactagttatacaggctatgcccaccctaatagaattaatgaaagaccccagtgtagttgttcgagatacagctgcatggactgtaggcagaatttgtgagctgcttcctgaagctgccatcaatgatgtctacttggctcccctgctacagtgtctgattgagggtctcagtgctgaacccagagtggcttcaaatgtgtgctgggctttctccagtctggctgaagctgcttatgaagctgcagacgttgctgatgatcaggaagaaccagctacttactgcttatcttcttcatttgaactcatagttcagaagctcctagagactacagacagacctgatggacaccagaacaacctgaggagttctgcatatgaatctctgatggaaattgtgaaaaacagtgccaaggattgttatcctgctgtccagaaaacgactttggtcatcatggaacgactgcaacaggttcttcagatggagtcacatatccagagcacatccgatagaatccagttcaatgaccttcagtctttactctgtgcaactcttcagaatgttcttcggaaagtgcaacatcaagatgctttgcagatctctgatgtggttatggcctccctgttaaggatgttccaaagcacagctgggtctgggggagtacaagaggatgccctgatggcagttagcacactggtggaagtgttgggtggtgaattcctcaagtacatggaggcctttaaacccttcctgggcattggattaaaaaattatgctgaataccaggtttgtttggcagctgtgggcttagtgggagacttgtgccgtgccctgcaatccaacatcatacctttctgtgacgaggtgatgcagctgcttctggaaaatttggggaatgagaacgtccacaggtctgtgaagccgcagattctgtcagtgtttggtgatattgcccttgctattggaggagagtttaaaaaatacttagaggttgtattgaatactcttcagcaggcctcccaagcccaggtggacaagtcagactatgacatggtggattatctgaatgagctaagggaaagctgcttggaagcctatactggaatcgtccagggattaaagggggatcaggagaacgtacacccggatgtgatgctggtacaacccagagtagaatttattctgtctttcattgaccacattgctggagatgaggatcacacagatggagtagtagcttgtgctgctggactaataggggacttatgtacagcatttgggaaggatgtactgaaattagtagaagctaggccaatgatccatgaattgttaactgaagggcggagatcgaagactaacaaagcaaaaacccttgctacatgggcaacaaaagaactgaggaaactgaagaaccaagcttgatctgttaccattgggatgataacctgaggacccccactggaaatctcccatcttttgaaaaacctggaagtgaggagtgtgcacggatgctgaatgtttgggaatgagaggatgagtgagtgaggcttgaaaacacaccacattgaaaatcctgccacagcagcagccgcagccgccaacagcagcgctgttagtgagctaagtaagcactgacttcgtagaaaaccataacatcggccatcttggaaaagagaaaaacaatggagttacttatttaaaaaaaaagaaagaaagttatctcttcccaggagaggctagaagtagcttttctgtcttttggccagtgccgagtggaatgcctggtttgggggaggaggagggactgggttcagctgtggtgctttgttgtaaaaggcagcctggcctttgctactgaggagaaagatggagcctgggtctcaagcccaccttcgctgtacctttgccacatggtactgtatgcttgccagctagaaggagggtcagggattttttacagtctgagaatgagtgtgtgtgagtgaggcggtatccacattctcaacttcaagtcattgcagtttctttttcccagaaaacaaggggttagatgttgcatttcataaaactaaccgaagttctgtctactgatgcagcacaagagatgtaaaaaaaaaaaaaaaaaaaaaaaaaaaaaaaacacacacacagaggaaagacgctctttaggttttgttttgttttttttttttggttttgttttttgttttttttactctagggaaaacactgacgaatggtcagagctcctatcctgatcttttcatcaaggcgcctttcctaataatatggttcaactgtgaatgtagaagtgggggggaggggggagaaaaagaaaactctggcgttagaggatatagaaaaatataagtacaattgttacaaataacgcagacttcaaaaacaaaaaaatcacaacccaaacaaaccaaaatttaaatgatcagaattggcagcacaaagaaaacgccctctcctgacttgtattgtggcagtctgaacgcccccagaaaattgtgccaaagagtttagaaaaataaatatacaataaaagtaaacacatacacacaaaacagcaaacttcaggtaactattttggattgcaaacaggataattaaatgttcaaacaatctgataaaataaccatttggaaactg

SEQ ID NO: 101679 - DNA, 926 bp, Homo sapiens
  misc_feature (874)..(874): n is a, c, g, or t
  misc_feature (880)..(880): n is a, c, g, or t
tcgcaggtggaggccgggcgtaaatcggacgaggcgggatgcagcagtgatggcttttggttgtatcttggaaggaccagagcccagtcagctcaaaccactagttatacaggctatgcccaccctaatagaattaatgaaagaccccagtgtagttgttcgagatacagctgcatggactgtaggcagaatttgtgagctgcttcctgaagctgccatcaatgatgtctacttggctcccctgctacagtgtctgattgagggtctcagtgctgaacccagagtggcttcaaatgtgtgctgggctttctccagtctggctgaagctgcttatgaagctgcagacgttgctgatgatcaggaagaaccagctacttactgcttatcttcttcatttgaactcatagttcagaagctcctagagactacagacagacctgatggacaccagaacaacctgaggagttctgcatatgaatctctgatggaaattgtgaaaaacagtgccaaggattgttatcctgctgtccagaaaacgactttggtcatcatggaacgactgcaacaggttcttcagatggagtcacatatccagagcacatccgatagaatccagttcaatgaccttcagtctttactctgtgcaactcttcagaatgttcttcggaaagtgcaacatcaagatgctttgcagatctctgatgtggttatggcctccctgttaaggatgttccaaagcacagctgggtctgggggagtacaagaggatgccctgatggcagttagcacactggtggaagtggggggggaacccaagtaatgggggtttaaaccttcgggtggttaaattgtgaaccggtggtgggcggggttngggaantgggggggaaaaatagttggagggggggttgaaaggagacggtgaa

SEQ ID NO: 101680 - DNA, 997 bp, Homo sapiens
ctccctcgctccctccctgcgcgccgcctctcactcacagcctcccttccttctttctccctccgcctcccgagcaccagcgcgctctgagctgcccccagggtccctcccccgccgccagcagcccatttggagggaggaagtaagggaagaggagaggaaggggagccggaccgactacccagacagagccggtgaatgggtttgtggtgacccctgcgtgtatgtggacagcgatatatcaatggtggtgtgtcgtcagcggactcactcagtcatcctctcattcccaaacattcacgcatccgtgcacacatccatcacttcacaggttctttcaaacacgatgggagatcttccagtgggggtcctcaggttatcatcccaatggttacagcatcaagcttggttcttcagttatcctcagtactttggtgcccatgtagcaagggttcacggcttgatagatctacgatctccgcccatatcagtacaacaacactcatggacctcaattgggcatagcttactactaatctccagacacgatccttccccacatgctgttacactaagtccccctattagatcacagacagacacaagctactacttcaatactgtgtgaaccctacatctcccagcaacgtggtccatgaacagacacgacataaactctaactctgggttgtacccaagcaatcaaattcacgcggtgtaacgtctcctgaataccccctttaaatcccggaaagaatcagtcttaggatttccaagacagatattacccttaccgttattctgactacacccccatgtcaaaggtctgatttgtcacacgggcgtgtgcgaagctggtgaatccgttttccatacaacttctaagtatttcaaacttccatccacagaaagggcataatccacaagacacaattgagttcagacgtgtcagtccatccatgtaaaaccgtccccttcaaacatattcataagacaa

SEQ ID NO: 101681 - DNA, 344 bp, Homo sapiens
gcagccactactactactaaattcgcggccgctcgacaggatatagaaaaatataagtacaattgttacaaataacgcagacttcaaaaacaaaaaaatcacaacccaaacaaaccaaaatttaaatgatcagaattggcagcacaaagaaaacgccctctcctgacttgtattgtggcagtctgaacgcccccagaaaattgtgccaaagagtttagaaaaataaatatacaataaaagtaaacacatacacacaaaacagcaaacttcaggtaactattttggattgcaaacaggataattaaatgttcaaacaatctgataaaataaccatttggaaactg

SEQ ID NO: 101682 - DNA, 890 bp, Homo sapiens
cccacgcgtcgcactagttatacaggctatgcccaccctaatagaattaatggtttgagctgactgggctctggtccttccaagatacaaccaaaagccatcactgctcaaaccactagttatacaggctatgcccaccctaatagaattaatgaaagaccccagtgtagttgttcgagatacagctgcatggactgtaggcagaatttgtgagctgcttcctgaagctgccatcaatgatgtctacttggctcccctgctacagtgtctgattgagggtctcagtgctgaacccagagtggcttcaaatgtgtgctgggctttctccagtctggctgaagctgcttatgaagctgcagacgttgctgatgatcaggaagaaccagctacttactgcttatcttcttcatttgaactcatagttcagaagctcctagagactacagacagacctgatggacaccagaacaacctgaggagttctgcatatgaatctctgatggaaattgtgaaaaacagtgccaaggattgttatcctgctgtccagaaaacgactttggtcatcatggaacgactgcaacaggttcttcagatggagctgcgagtcacatactccacgaggcacattcgaatcagaaatcccagtcaatggaccttcagtccttaacatctgagcaaatctttcagaaatgtcttcgaagaagtgcaaacctcaagatggcttagaaaatctcagaatggaggaataggctacccaggatacgaggatgttcccaaaacacaaatacggccatagacgaggacacaaagatgcagattggaggaacaacaggggagtgtgaggagagatacccaaaaaatgaaggataaaagtaccgggatatgtaaac

SEQ ID NO: 101683 - DNA, 1081 bp, Homo sapiens
ccagagatactgtacatgaggtcgatacttgggatttaatagttagtacgagggtctcctttgacttccgattcactgggcgcttgttattactctgagctgcccccagggtccctcccccgccgccagcagcccatttggagggaggaagtaagggaagaggagaggaaggggagccggaccgactacccagacagagccggtgaatgggtttgtggtgaccccgcgcgctaatccctaacacatgaaggagacaacacgtaacgcatgaaataagcgaatgaacagcattcgagcggggggcgatcgataagtatatgagacaagaaggatctacaaccgtggaagtggggttgaacaaagacacactccaaccgacgcacagcgtactaatacctcaaaacacatagaaaaacagaagaccacaccacaaacgcatgcaccgagatgaatgaaaaaagcaagaaaacaactaaaccagcaggagaggaatcacgacagagtaaacacagacaacgaagggaaacaacaaagacacacggaaggaggaaagaagacaagaatagacactacagaagaccaattaagagacagagacaagaggataccagagggatataagagcgaaatggcgaaagagaaccctataaggacaactaagcagacagtcatacaaggagaaaacacaaacagacaagggaggacaaccagtagggggaccaaaagaagaagaaagaaataaagataccagcgaaaaatatccctaaccgcaaacgagtggattgactacaattaataatcccgccattatatagagcacaccaaccagagcaaacagctagtaacatacatccacaatgctggttagtgtaaccactaaatatctacagcgaactagtttgagtggcatcaatgtgaactgacgccaacaagatattacaaacacatcaagggttagttacacacaaaatacaacaacacgggagtgataagaactactagtagagccaccaattataaagcaggtagacgatcccaggaataggagtaccaacgagacatatgacataatacatatagg

SEQ ID NO: 101684 - DNA, 6062 bp, Homo sapiens
ctccctcgctccctccctgcgcgccgcctctcactcacagcctcccttccttctttctccctccgcctcccgagcaccagcgcgctctgagctgcccccagggtccctcccccgccgccagcagcccatttggagggaggaagtaagggaagaggagaggaaggggagccggaccgactacccagacagagccggtgaatgggtttgtggtgacccccgccccccaccccaccctcccttcccacccgacccccaacccccatccccagttcgagccgccgcccgaaaggccgggccgtcgtcttaggaggagtcgccgccgccgccacctccgccatggagctgatcaccattctcgagaagaccgtgtctcccgatcggctggagctggaagcggcgcagaagttcctggagcgtgcggccgtggagaacctgcccactttccttgtggaactgtccagagtgctggcaaatccaggaaacagtcaggttgccagagttgcagctggtctacaaatcaagaactctttgacatctaaagatccagatatcaaggcacaatatcagcagaggtggcttgctattgatgctaatgctcgacgagaagtcaagaactatgttttgcagacattgggtacagaaacttaccggcctagttctgcctcacagtgtgtggctggtattgcttgtgcagagatcccagtaaaccagtggccagaactcattcctcagctggtggccaatgtcacaaaccccaacagcacagagcacatgaaggagtcgacattggaagccatcggttatatttgccaagatatagacccagagcagctacaagataaatccaatgagattctgactgccataatccaggggatgaggaaagaagagcctagtaataatgtgaagctagctgctacgaatgcactcctgaactcattggagttcaccaaagcaaactttgataaagagtctgaaaggcactttattatgcaggtggtctgtgaagccacacagtgtccagatacgagggtacgagtggctgctttacagaatctggtgaagataatgtccttatattatcagtacatggagacatatatgggtcctgctctttttgcaatcacaatcgaagcaatgaaaagtgacattgatgaggtggctttacaagggatagaattctggtccaatgtctgtgatgaggaaatggatttggccattgaagcttcagaggcagcagaacaaggacggccccctgagcacaccagcaagttttatgcgaagggagcactacagtatctggttccaatcctcacacagacactaactaaacaggacgaaaatgatgatgacgatgactggaacccctgcaaagcagcaggggtgtgcctcatgcttctggccacctgctgtgaagatgacattgtcccacatgtcctccccttcattaaagaacacatcaagaacccagattggcggtaccgggatgcagcagtgatggcttttggttgtatcttggaaggaccagagcccagtcagctcaaaccactagttatacaggctatgcccaccctaatagaattaatgaaagaccccagtgtagttgttcgagatacagctgcatggactgtaggcagaatttgtgagctgcttcctgaagctgccatcaatgatgtctacttggctcccctgctacagtgtctgattgagggtctcagtgctgaacccagagtggcttcaaatgtgtgctgggctttctccagtctggctgaagctgcttatgaagctgcagacgttgctgatgatcaggaagaaccagctacttactgcttatcttcttcatttgaactcatagttcagaagctcctagagactacagacagacctgatggacaccagaacaacctgaggagttctgcatatgaatctctgatggaaattgtgaaaaacagtgccaaggattgttatcctgctgtccagaaaacgactttggtcatcatggaacgactgcaacaggttcttcagatggagtcacatatccagagcacatccgatagaatccagttcaatgaccttcagtctttactctgtgcaactcttcagaatgttcttcggaaagtgcaacatcaagatgctttgcagatctctgatgtggttatggcctccctgttaaggatgttccaaagcacagctgggtctgggggagtacaagaggatgccctgatggcagttagcacactggtggaagtgttgggtggtgaattcctcaagtacatggaggcctttaaacccttcctgggcattggattaaaaaattatgctgaataccaggtttgtttggcagctgtgggcttagtgggagacttgtgccgtgccctgcaatccaacatcatacctttctgtgacgaggtgatgcagctgcttctggaaaatttggggaatgagaacgtccacaggtctgtgaagccgcagattctgtcagtgtttggtgatattgcccttgctattggaggagagtttaaaaaatacttagaggttgtattgaatactcttcagcaggcctcccaagcccaggtggacaagtcagactatgacatggtggattatctgaatgagctaagggaaagctgcttggaagcctatactggaatcgtccagggattaaagggggatcaggagaacgtacacccggatgtgatgctggtacaacccagagtagaatttattctgtctttcattgaccacattgctggagatgaggatcacacagatggagtagtagcttgtgctgctggactaataggggacttatgtacagcatttgggaaggatgtactgaaattagtagaagctaggccaatgatccatgaattgttaactgaagggcggagatcgaagactaacaaagcaaaaacccttgctacatgggcaacaaaagaactgaggaaactgaagaaccaagcttgatctgttaccattgggatgataacctgaggacccccactggaaatctcccatcttttgaaaaacctggaagtgaggagtgtgcacggatgctgaatgtttgggaatgagaggatgagtgagtgaggcttgaaaacacaccacattgaaaatcctgccacagcagcagccgcagccgccaacagcagcgctgttagtgagctaagtaagcactgacttcgtagaaaaccataacatcggccatcttggaaaagagaaaaacaatggagttacttatttaaaaaaaaagaaagaaagttatctcttcccaggagaggctagaagtagcttttctgtcttttggccagtgccgagtggaatgcctggtttgggggaggaggagggactgggttcagctgtggtgctttgttgtaaaaggcagcctggcctttgctactgaggagaaagatggagcctgggtctcaagcccaccttcgctgtacctttgccacatggtactgtatgcttgccagctagaaggagggtcagggattttttacagtctgagaatgagtgtgtgtgagtgaggcggtatccacattctcaacttcaagtcattgcagtttctttttcccagaaaacaaggggttagatgttgcatttcataaaactaaccgaagttctgtctactgatgcagcacaagagatgtaaaaaaaaaaaaaaaaaaaaaaaaaaaaaaaacacacacacagaggaaagacgctctttaggttttgttttgttttttttttttggttttgttttttgttttttttactctagggaaaacactgacgaatggtcagagctcctatcctgatcttttcatcaaggcgcctttcctaataatatggttcaactgtgaatgtagaagtgggggggaggggggagaaaaagaaaactctggcgttagaggatatagaaaaatataagtacaattgttacaaataacgcagacttcaaaaacaaaaaaatcacaacccaaacaaaccaaaatttaaatgatcagaattggcagcacaaagaaaacgccctctcctgacttgtattgtggcagtctgaacgcccccagaaaattgtgccaaagagtttagaaaaataaatatacaataaaagtaaacacatacacacaaaacagcaaacttcaggtaactattttggattgcaaacaggataattaaatgttcaaacaatctgataaaataaccatttggaaactgcttggccttctgttcttttatttgattgactacaatgcggtattggtctcttgctgcacttcaaaagcaaccaacaaaacaaaaacaaaaaaaagtgtgtgtgtgtgaatacacacacacactaactagaagtcttgtgatgaaaatggcacttggaaaaggttttatttttccactgaagttgaaggttaataaaatggtgtcaaacgtcccctggtcacacacttgaatatttttttagaagtgtgatgtggtatgattaccataaatcagacttaattattttcccttttacaagggaacagggcatcctgaattttagagcctttcagcaataagaagggatgttggtgagctttgatcctcttttggttttgcagttgttaggagtttttgctggcattttgaatatgctgctttcagaaaaaccaaggaagttttaaaattgcttcctggtccttagaggactaaaaacaagaccctcattcccactttcatttccactctagcaaaaactgggcttgcgtttttctccaactcctcgtttatatcctcccttccatgtccaagccttccattcctaagtgggattggctcagttttgcccatccatatggcagcatctctaatagctcttgtacagggtatcagatattgtgccttttggtgccaggttcaaagtcaagtgccgatctatgaaccagtgtacaaaaaaaaaaaaatccaggtatttgaaggagagacgctccattgtgaataaagagctcataccagctcctaagccctattaagaagaggcctggtcctctaatgccttgtttccatttcagttgttctttgagagacagaatgatgtactaaccattcgtgattattaagatagggttgggtcagggcttagggagggggcagaaatattggggatagaaaaaaaatctgatcattcctcagtgctacccatttctgtcctgtgtgggctgcttagctagacagcaggagaataaagtacaccgagaaccataatgaaaaaaccttccgtgtgttttgtcatgttttgttccagggaagcagttgatgagtgctgttactaatgctttctcccagatccattcagtggtggagaggaggaaaatgggctggttggatgtggtcttggtgccttgcagttactctgcactggttatgcatttaattctcctcttttctagttaaccttttgccagtgggttttccatagtctgggtatttgtccttatatcagttataccacctaaggcaactgggtgcaaaatgcattctgttcactcactgtctgggccttccccaccctagtcttggcacattccttcaagaatgtagttaccgtctgcttgggaagatgtcagtgcaaatgtgaagataatgggcatcggactaggctttggtttgccacaagtggcagctgcctgtatcaattacatttattaattttgcttttcatttttcccagttctcctcaccccccctttgttgaaatgttggacttgctgtcagaggcaactgtaatattgccttagggacttgtggagaaggggaattgctcagtgtagtgttttaactttcagaaccaagcaatctatttactcttacaaatatttaagaagtgtgttagtccaactttaagaaaaatccaaactcatcagcttttgatagcatcttggtttttgaaacaacttcaatctgtaattggcattcagaatgcccttggcatgccagtctgtgatggcatttaagacctgtaaaacacttgagcccaactcgattaaccaaaaccgataaccaccacctttatcttctaaataaagtccgctttattttta

SEQ ID NO: 101685 - DNA, 6041 bp, Homo sapiens
ctccctcgctccctccctgcgcgccgcctctcactcacagcctcccttccttctttctccctccgcctcccgagcaccagcgcgctctgagctgcccccagggtccctcccccgccgccagcagcccatttggagggaggaagtaagggaagaggagaggaaggggagccggaccgactacccagacagagccggtgaatgggtttgtggtgacccccgccccccaccccaccctcccttcccacccgacccccaacccccatccccagttcgagccgccgcccgaaaggccgggccgtcgtcttaggaggagtcgccgccgccgccacctccgccatggagctgatcaccattctcgagaagaccgtgtctcccgatcggctggagctggaagcggcgcagaagttcctggagcgtgcggccgtggagaacctgcccactttccttgtggaactgtccagagtgctggcaaatccaggaaacagtcaggttgccagagttgcagctggtctacaaatcaagaactctttgacatctaaagatccagatatcaaggcacaatatcagcagaggtggcttgctattgatgctaatgctcgacgagaagtcaagaactatgttttgcagacattgggtacagaaacttaccggcctagttctgcctcacagtgtgtggctggtattgcttgtgcagagatcccagtaaaccagtggccagaactcattcctcagctggtggccaatgtcacaaaccccaacagcacagagcacatgaaggagtcgacattggaagccatcggttatatttgccaagatatagacccagagcagctacaagataaatccaatgagattctgactgccataatccaggggatgaggaaagaagagcctagtaataatgtgaagctagctgctacgaatgcactcctgaactcattggagttcaccaaagcaaactttgataaagagtctgaaaggcactttattatgcaggtggtctgtgaagccacacagtgtccagatacgagggtacgagtggctgctttacagaatctggtgaagataatgtccttatattatcagtacatggagacatatatgggtcctgctctttttgcaatcacaatcgaagcaatgaaaagtgacattgatgaggtggctttacaagggatagaattctggtccaatgtctgtgatgaggaaatggatttggccattgaagcttcagaggcagcagaacaaggacggccccctgagcacaccagcaagttttatgcgaagggagcactacagtatctggttccaatcctcacacagacactaactaaacaggacgaaaatgatgatgacgatgactggaacccctgcaaagcagcaggggtgtgcctcatgcttctggccacctgctgtgaagatgacattgtcccacatgtcctccccttcattaaagaacacatcaagaacccagattggcggtaccgggatgcagcagtgatggcttttggttgtatcttggaaggaccagagcccagtcagctcaaaccactagttatacaggctatgcccaccctaatagaattaatgaaagaccccagtgtagttgttcgagatacagctgcatggactgtaggcagaatttgtgagctgcttcctgaagctgccatcaatgatgtctacttggctcccctgctacagtgtctgattgagggtctcagtgctgaacccagagtggcttcaaatgtgtgctgggctttctccagtctggctgaagctgcttatgaagctgcagacgttgctgatgatcaggaagaaccagctacttactgcttatcttcttcatttgaactcatagttcagaagctcctagagactacagacagacctgatggacaccagaacaacctgaggagttctgcatatgaatctctgatggaaattgtgaaaaacagtgccaaggattgttatcctgctgtccagaaaacgactttggtcatcatggaacgactgcaacaggttcttcagatggagtcacatatccagagcacatccgatagaatccagttcaatgaccttcagtctttactctgtgcaactcttcagaatgttcttcggaaagtgcaacatcaagatgctttgcagatctctgatgtggttatggcctccctgttaaggatgttccaaagcacagctgggtctgggggagtacaagaggatgccctgatggcagttagcacactggtggaagtgttgggtggtgaattcctcaagtacatggaggcctttaaacccttcctgggcattggattaaaaaattatgctgaataccaggtttgtttggcagctgtgggcttagtgggagacttgtgccgtgccctgcaatccaacatcatacctttctgtgacgaggtgatgcagctgcttctggaaaatttggggaatgagaacgtccacaggtctgtgaagccgcagattctgtcagtgtttggtgatattgcccttgctattggaggagagtttaaaaaatacttagaggttgtattgaatactcttcagcaggcctcccaagcccaggtggacaagtcagactatgacatggtggattatctgaatgagctaagggaaagctgcttggaagcctatactggaatcgtccagggattaaagggggatcaggagaacgtacacccggatgtgatgctggtacaacccagagtagaatttattctgtctttcattgaccacattgctggagatgaggatcacacagatggagtagtagcttgtgctgctggactaataggggacttatgtacagcatttgggaaggatgtactgaaattagtagaagctaggccaatgatccatgaattgttaactgaagggcggagatcgaagactaacaaagcaaaaacccttgctacatgggcaacaaaagaactgaggaaactgaagaaccaagcttgatctgttaccattgggatgataacctgaggacccccactggaaatctcccatcttttgaaaaacctggaagtgaggagtgtgcacggatgctgaatgtttgggaatgagaggatgagtgagtgaggcttgaaaacacaccacattgaaaatcctgccacagcagcagccgcagccgccaacagcagcgctgttagtgagctaagtaagcactgacttcgtagaaaaccataacatcggccatcttggaaaagagaaaaacaatggagttacttatttaaaaaaaaagaaagaaagttatctcttcccaggagaggctagaagtagcttttctgtcttttggccagtgccgagtggaatgcctggtttgggggaggaggagggactgggttcagctgtggtgctttgttgtaaaaggcagcctggcctttgctactgaggagaaagatggagcctgggtctcaagcccaccttcgctgtacctttgccacatggtactgtatgcttgccagctagaaggagggtcagggattttttacagtctgagaatgagtgtgtgtgagtgaggcggtatccacattctcaacttcaagtcattgcagtttctttttcccagaaaacaaggggttagatgttgcatttcataaaactaaccgaagttctgtctactgatgcagcacaagagatgtaaaaaaaaaaaaacacacacagaggaaagacgctctttaggttttgttttgttttttttttttggttttgttttttgttttttttactctagggaaaacactgacgaatggtcagagctcctatcctgatcttttcatcaaggcgcctttcctaataatatggttcaactgtgaatgtagaagtgggggggaggggggagaaaaagaaaactctggcgttagaggatatagaaaaatataagtacaattgttacaaataacgcagacttcaaaaacaaaaaaatcacaacccaaacaaaccaaaatttaaatgatcagaattggcagcacaaagaaaacgccctctcctgacttgtattgtggcagtctgaacgcccccagaaaattgtgccaaagagtttagaaaaataaatatacaataaaagtaaacacatacacacaaaacagcaaacttcaggtaactattttggattgcaaacaggataattaaatgttcaaacaatctgataaaataaccatttggaaactgcttggccttctgttcttttatttgattgactacaatgcggtattggtctcttgctgcacttcaaaagcaaccaacaaaacaaaaacaaaaaaaagtgtgtgtgtgtgaatacacacacacactaactagaagtcttgtgatgaaaatggcacttggaaaaggttttatttttccactgaagttgaaggttaataaaatggtgtcaaacgtcccctggtcacacacttgaatatttttttagaagtgtgatgtggtatgattaccataaatcagacttaattattttcccttttacaagggaacagggcatcctgaattttagagcctttcagcaataagaagggatgttggtgagctttgatcctcttttggttttgcagttgttaggagtttttgctggcattttgaatatgctgctttcagaaaaaccaaggaagttttaaaattgcttcctggtccttagaggactaaaaacaagaccctcattcccactttcatttccactctagcaaaaactgggcttgcgtttttctccaactcctcgtttatatcctcccttccatgtccaagccttccattcctaagtgggattggctcagttttgcccatccatatggcagcatctctaatagctcttgtacagggtatcagatattgtgccttttggtgccaggttcaaagtcaagtgccgatctatgaaccagtgtacaaaaaaaaaaaaatccaggtatttgaaggagagacgctccattgtgaataaagagctcataccagctcctaagccctattaagaagaggcctggtcctctaatgccttgtttccatttcagttgttctttgagagacagaatgatgtactaaccattcgtgattattaagatagggttgggtcagggcttagggagggggcagaaatattggggatagaaaaaaaatctgatcattcctcagtgctacccatttctgtcctgtgtgggctgcttagctagacagcaggagaataaagtacaccgagaaccataatgaaaaaaccttccgtgtgttttgtcatgttttgttccagggaagcagttgatgagtgctgttactaatgctttctcccagatccattcagtggtggagaggaggaaaatgggctggttggatgtggtcttggtgccttgcagttactctgcactggttatgcatttaattctcctcttttctagttaaccttttgccagtgggttttccatagtctgggtatttgtccttatatcagttataccacctaaggcaactgggtgcaaaatgcattctgttcactcactgtctgggccttccccaccctagtcttggcacattccttcaagaatgtagttaccgtctgcttgggaagatgtcagtgcaaatgtgaagataatgggcatcggactaggctttggtttgccacaagtggcagctgcctgtatcaattacatttattaattttgcttttcatttttcccagttctcctcaccccccctttgttgaaatgttggacttgctgtcagaggcaactgtaatattgccttagggacttgtggagaaggggaattgctcagtgtagtgttttaactttcagaaccaagcaatctatttactcttacaaatatttaagaagtgtgttagtccaactttaagaaaaatccaaactcatcagcttttgatagcatcttggtttttgaaacaacttcaatctgtaattggcattcagaatgcccttggcatgccagtctgtgatggcatttaagacctgtaaaacacttgagcccaactcgattaaccaaaaccgataaccaccacctttatcttctaaataaagtccgctttattttta

SEQ ID NO: 101686 - DNA, 5229 bp, Homo sapiens
ctccctcgctccctccctgcgcgccgcctctcactcacagcctcccttccttctttctccctccgcctcccgagcaccagcgcgctctgagctgcccccagggtccctcccccgccgccagcagcccatttggagggaggaagtaagggaagaggagaggaaggggagccggaccgactacccagacagagccggtgaatgggtttgtggtgacccccgccccccaccccaccctcccttcccacccgacccccaacccccatccccagttcgagccgccgcccgaaaggccgggccgtcgtcttaggaggagtcgccgccgccgccacctccgccatggagctgatcaccattctcgagaagaccgtgtctcccgatcggctggagctggaagcggcgcagaagttcctggagcgtgcggccgtggagaacctgcccactttccttgtggaactgtccagagtgctggcaaatccaggaaacagtcaggttgccagagttgcagctggtctacaaatcaagaactctttgacatctaaagatccagatatcaaggcacaatatcagcagaggtggcttgctattgatgctaatgctcgacgagaagtcaagaactatgttttgcagacattgggtacagaaacttaccggcctagttctgcctcacagtgtgtggctggtattgcttgtgcagagatcccagtaaaccagtggccagaactcattcctcagctggtggccaatgtcacaaaccccaacagcacagagcacatgaaggagtcgacattggaagccatcggttatatttgccaagatatagacccagagcagctacaagataaatccaatgagattctgactgccataatccaggggatgaggaaagaagagcctagtaataatgtgaagctagctgctacgaatgcactcctgaactcattggagttcaccaaagcaaactttgataaagagtctgaaaggcactttattatgcaggtggtctgtgaagccacacagtgtccagatacgagggtacgagtggctgctttacagaatctggtgaagataatgtccttatattatcagtacatggagacatatatgggtcctgctctttttgcaatcacaatcgaagcaatgaaaagtgacattgatgaggtggctttacaagggatagaattctggtccaatgtctgtgatgaggaaatggatttggccattgaagcttcagaggcagcagaacaaggacggccccctgagcacaccagcaagttttatgcgaagggagcactacagtatctggttccaatcctcacacagacactaactaaacaggacgaaaatgatgatgacgatgactggaacccctgcaaagcagcaggggtgtgcctcatgcttctggccacctgctgtgaagatgacattgtcccacatgtcctccccttcattaaagaacacatcaagaacccagattggcggtaccgggatgcagcagtgatggcttttggttgtatcttggaaggaccagagcccagtcagctcaaaccactagttatacaggctatgcccaccctaatagaattaatgaaagaccccagtgtagttgttcgagatacagctgcatggactgtaggcagaatttgtgagctgcttcctgaagctgccatcaatgatgtctacttggctcccctgctacagtgtctgattgagggtctcagtgctgaacccagagtggcttcaaatgtgtgctgggctttctccagtctggctgaagctgcttatgaagctgcagacgttgctgatgatcaggaagaaccagctacttactgcttatcttcttcatttgaactcatagttcagaagctcctagagactacagacagacctgatggacaccagaacaacctgaggagttctgcatatgaatctctgatggaaattgtgaaaaacagtgccaaggattgttatcctgctgtccagaaaacgactttggtcatcatggaacgactgcaacaggttcttcagatggagtcacatatccagagcacatccgatagaatccagttcaatgaccttcagtctttactctgtgcaactcttcagaatgttcttcggaaagtgcaacatcaagatgctttgcagatctctgatgtggttatggcctccctgttaaggatgttccaaagcacagctgggtctgggggagtacaagaggatgccctgatggcagttagcacactggtggaagtgttgggtggtgaattcctcaagtacatggaggcctttaaacccttcctgggcattggattaaaaaattatgctgaataccaggtttgtttggcagctgtgggcttagtgggagacttgtgccgtgccctgcaatccaacatcatacctttctgtgacgaggtgatgcagctgcttctggaaaatttggggaatgagaacgtccacaggtctgtgaagccgcagattctgtcagtgtttggtgatattgcccttgctattggaggagagtttaaaaaatacttagaggttgtattgaatactcttcagcaggcctcccaagcccaggtggacaagtcagactatgacatggtggattatctgaatgagctaagggaaagctgcttggaagcctatactggaatcgtccagggattaaagggggatcaggagaacgtacacccggatgtgatgctggtacaacccagagtagaatttattctgtctttcattgaccacattgctggagatgaggatcacacagatggagtagtagcttgtgctgctggactaataggggacttatgtacagcatttgggaaggatgtactgaaattagtagaagctaggccaatgatccatgaattgttaactgaagggcggagatcgaagactaacaaagcaaaaacccttgctacatgggcaacaaaagaactgaggaaactgaagaaccaagcttgatctgttaccattgggatgataacctgaggacccccactggaaatctcccatcttttgaaaaacctggaagtgaggagtgtgcacggatgctgaatgtttgggaatgagaggatgagtgagtgaggcttgaaaacacaccacattgaaaatcctgccacagcagcagccgcagccgccaacagcagcgctgttagtgagctaagtaagcactgacttcgtagaaaaccataacatcggccatcttggaaaagagaaaaacaatggagttacttatttaaaaaaaaagaaagaaagttatctcttcccaggagaggctagaagtagcttttctgtcttttggccagtgccgagtggaatgcctggtttgggggaggaggagggactgggttcagctgtggtgctttgttgtaaaaggcagcctggcctttgctactgaggagaaagatggagcctgggtctcaagcccaccttcgctgtacctttgccacatggtactgtatgcttgccagctagaaggagggtcagggattttttacagtctgagaatgagtgtgtgtgagtgaggcggtatccacattctcaacttcaagtcattgcagtttctttttcccagaaaacaaggggttagatgttgcatttcataaaactaaccgaagttctgtctactgatgcagcacaagagatgtaaaaaaaaaaaaaaaaaaaaaaaaaaaaaaaacacacacacagaggaaagacgctctttaggttttgttttgttttttttttttggttttgttttttgttttttttactctagggaaaacactgacgaatggtcagagctcctatcctgatcttttcatcaaggcgcctttcctaataatatggttcaactgtgaatgtagaagtgggggggaggggggagaaaaagaaaactctggcgttagaggatatagaaaaatataagtacaattgttacaaataacgcagacttcaaaaacaaaaaaatcacaacccaaacaaaccaaaatttaaatgatcagaattggcagcacaaagaaaacgccctctcctgacttgtattgtggcagtctgaacgcccccagaaaattgtgccaaagagtttagaaaaataaatatacaataaaagtaaacacatacacacaaaacagcaaacttcaggtaactattttggattgcaaacaggataattaaatgttcaaacaatctgataaaataaccatttggaaactgcttggccttctgttcttttatttgattgactacaatgcggtattggtctcttgctgcacttcaaaagcaaccaacaaaacaaaaacaaaaaaaagtgtgtgtgtgtgaatacacacacacactaactagaagtcttgtgatgaaaatggcacttggaaaaggttttatttttccactgaagttgaaggttaataaaatggtgtcaaacgtcccctggtcacacacttgaatatttttttagaagtgtgatgtggtatgattaccataaatcagacttaattattttcccttttacaagggaacagggcatcctgaattttagagcctttcagcaataagaagggatgttggtgagctttgatcctcttttggttttgcagttgttaggagtttttgctggcattttgaatatgctgctttcagaaaaaccaaggaagttttaaaattgcttcctggtccttagaggactaaaaacaagaccctcattcccactttcatttccactctagcaaaaactgggcttgcgtttttctccaactcctcgtttatatcctcccttccatgtccaagccttccattcctaagtgggattggctcagttttgcccatccatatggcagcatctctaatagctcttgtacagggtatcagatattgtgccttttggtgccaggttcaaagtcaagtgccgatctatgaaccagtgtacaaaaaaaaaaaaatccaggtatttgaaggagagacgctccattgtgaataaagagctcataccagctcctaagccctattaagaagaggcctggtcctctaatgccttgtttccatttcagttgttctttgagagacagaatgatgtactaaccattcgtgattattaagatagggttgggtcagggcttagggagggggcagaaatattggggatagaaaaaaaatctgatcattcctcagtgctacccatttctgtcctgtgtgggctgcttagctagacagcaggagaataaagtacaccgagaaccataatga

SEQ ID NO: 101687 - DNA, 6090 bp, Homo sapiens
ctccctcgctccctccctgcgcgccgcctctcactcacagcctcccttccttctttctccctccgcctcccgagcaccagcgcgctctgagctgcccccagggtccctcccccgccgccagcagcccatttggagggaggaagtaagggaagaggagaggaaggggagccggaccgactacccagacagagccggtgaatgggtttgtggtgacccccgccccccaccccaccctcccttcccacccgacccccaacccccatccccagttcgagccgccgcccgaaaggccgggccgtcgtcttaggaggagtcgccgccgccgccacctccgccatggagctgatcaccattctcgagaagaccgtgtctcccgatcggctggagctggaagcggcgcagaagttcctggagcgtgcggccgtggagaacctgcccactttccttgtggaactgtccagagtgctggcaaatccaggaaacagtcaggttgccagagttgcagctggtctacaaatcaagaactctttgacatctaaagatccagatatcaaggcacaatatcagcagaggtggcttgctattgatgctaatgctcgacgagaagtcaagaactatgttttgcagacattgggtacagaaacttaccggcctagttctgcctcacagtgtgtggctggtattgcttgtgcagagatcccagtaaaccagtggccagaactcattcctcagctggtggccaatgtcacaaaccccaacagcacagagcacatgaaggagtcgacattggaagccatcggttatatttgccaagatatagacccagagcagctacaagataaatccaatgagattctgactgccataatccaggggatgaggaaagaagagcctagtaataatgtgaagctagctgctacgaatgcactcctgaactcattggagttcaccaaagcaaactttgataaagagtctgaaaggcactttattatgcaggtggtctgtgaagccacacagtgtccagatacgagggtacgagtggctgctttacagaatctggtgaagataatgtccttatattatcagtacatggagacatatatgggtcctgctctttttgcaatcacaatcgaagcaatgaaaagtgacattgatgaggtggctttacaagggatagaattctggtccaatgtctgtgatgaggaaatggatttggccattgaagcttcagaggcagcagaacaaggacggccccctgagcacaccagcaagttttatgcgaagggagcactacagtatctggttccaatcctcacacagacactaactaaacaggacgaaaatgatgatgacgatgactggaacccctgcaaagcagcaggggtgtgcctcatgcttctggccacctgctgtgaagatgacattgtcccacatgtcctccccttcattaaagaacacatcaagaacccagattggcggtaccgggatgcagcagtgatggcttttggttgtatcttggaaggaccagagcccagtcagctcaaaccactagttatacaggctatgcccaccctaatagaattaatgaaagaccccagtgtagttgttcgagatacagctgcatggactgtaggcagaatttgtgagctgcttcctgaagctgccatcaatgatgtctacttggctcccctgctacagtgtctgattgagggtctcagtgctgaacccagagtggcttcaaatgtgtgctgggctttctccagtctggctgaagctgcttatgaagctgcagacgttgctgatgatcaggaagaaccagctacttactgcttatcttcttcatttgaactcatagttcagaagctcctagagactacagacagacctgatggacaccagaacaacctgaggagttctgcatatgaatctctgatggaaattgtgaaaaacagtgccaaggattgttatcctgctgtccagaaaacgactttggtcatcatggaacgactgcaacaggttcttcagatggagtcacatatccagagcacatccgatagaatccagttcaatgaccttcagtctttactctgtgcaactcttcagaatgttcttcggaaagtgcaacatcaagatgctttgcagatctctgatgtggttatggcctccctgttaaggatgttccaaagcacagctgggtctgggggagtacaagaggatgccctgatggcagttagcacactggtggaagtgttgggtggtgaattcctcaagtacatggaggcctttaaacccttcctgggcattggattaaaaaattatgctgaataccaggtttgtttggcagctgtgggcttagtgggagacttgtgccgtgccctgcaatccaacatcatacctttctgtgacgaggtgatgcagctgcttctggaaaatttggggaatgagaacgtccacaggtctgtgaagccgcagattctgtcagtgtttggtgatattgcccttgctattggaggagagtttaaaaaatacttagaggttgtattgaatactcttcagcaggcctcccaagcccaggtggacaagtcagactatgacatggtggattatctgaatgagctaagggaaagctgcttggaagcctatactggaatcgtccagggattaaagggggatcaggagaacgtacacccggatgtgatgctggtacaacccagagtagaatttattctgtctttcattgaccacattgctggagatgaggatcacacagatggagtagtagcttgtgctgctggactaataggggacttatgtacagcatttgggaaggatgtactgaaattagtagaagctaggccaatgatccatgaattgttaactgaagggcggagatcgaagactaacaaagcaaaaacccttgctacatgggcaacaaaagaactgaggaaactgaagaaccaagcttgatctgttaccattgggatgataacctgaggacccccactggaaatctcccatcttttgaaaaacctggaagtgaggagtgtgcacggatgctgaatgtttgggaatgagaggatgagtgagtgaggcttgaaaacacaccacattgaaaatcctgccacagcagcagccgcagccgccaacagcagcgctgttagtgagctaagtaagcactgacttcgtagaaaaccataacatcggccatcttggaaaagagaaaaacaatggagttacttatttaaaaaaaaagaaagaaagttatctcttcccaggagaggctagaagtagcttttctgtcttttggccagtgccgagtggaatgcctggtttgggggaggaggagggactgggttcagctgtggtgctttgttgtaaaaggcagcctggcctttgctactgaggagaaagatggagcctgggtctcaagcccaccttcgctgtacctttgccacatggtactgtatgcttgccagctagaaggagggtcagggattttttacagtctgagaatgagtgtgtgtgagtgaggcggtatccacattctcaacttcaagtcattgcagtttctttttcccagaaaacaaggggttagatgttgcatttcataaaactaaccgaagttctgtctactgatgcagcacaagagatgtaaaaaaaaaaaaaaaaaaaaaaaaaaaaaaaacacacacacagaggaaagacgctctttaggttttgttttgttttttttttttggttttgttttttgttttttttactctagggaaaacactgacgaatggtcagagctcctatcctgatcttttcatcaaggcgcctttcctaataatatggttcaactgtgaatgtagaagtgggggggaggggggagaaaaagaaaactctggcgttagaggatatagaaaaatataagtacaattgttacaaataacgcagacttcaaaaacaaaaaaatcacaacccaaacaaaccaaaatttaaatgatcagaattggcagcacaaagaaaacgccctctcctgacttgtattgtggcagtctgaacgcccccagaaaattgtgccaaagagtttagaaaaataaatatacaataaaagtaaacacatacacacaaaacagcaaacttcaggtaactattttggattgcaaacaggataattaaatgttcaaacaatctgataaaataaccatttggaaactgcttggccttctgttcttttatttgattgactacaatgcggtattggtctcttgctgcacttcaaaagcaaccaacaaaacaaaaacaaaaaaaagtgtgtgtgtgtgaatacacacacacactaactagaagtcttgtgatgaaaatggcacttggaaaaggttttatttttccactgaagttgaaggttaataaaatggtgtcaaacgtcccctggtcacacacttgaatatttttttagaagtgtgatgtggtatgattaccataaatcagacttaattattttcccttttacaagggaacagggcatcctgaattttagagcctttcagcaataagaagggatgttggtgagctttgatcctcttttggttttgcagttgttaggagtttttgctggcattttgaatatgctgctttcagaaaaaccaaggaagttttaaaattgcttcctggtccttagaggactaaaaacaagaccctcattcccactttcatttccactctagcaaaaactgggcttgcgtttttctccaactcctcgtttatatcctcccttccatgtccaagccttccattcctaagtgggattggctcagttttgcccatccatatggcagcatctctaatagctcttgtacagggtatcagatattgtgccttttggtgccaggttcaaagtcaagtgccgatctatgaaccagtgtacaaaaaaaaaaaaatccaggtatttgaaggagagacgctccattgtgaataaagagctcataccagctcctaagccctattaagaagaggcctggtcctctaatgccttgtttccatttcagttgttctttgagagacagaatgatgtactaaccattcgtgattattaagatagggttgggtcagggcttagggagggggcagaaatattggggatagaaaaaaaatctgatcattcctcagtgctacccatttctgtcctgtgtgggctgcttagctagacagcaggagaataaagtacaccgagaaccataatgaaaaaaccttccgtgtgttttgtcatgttttgttccagggaagcagttgatgagtgctgttactaatgctttctcccagatccattcagtggtggagaggaggaaaatgggctggttggatgtggtcttggtgccttgcagttactctgcactggttatgcatttaattctcctcttttctagttaaccttttgccagtgggttttccatagtctgggtatttgtccttatatcagttataccacctaaggcaactgggtgcaaaatgcattctgttcactcactgtctgggccttccccaccctagtcttggcacattccttcaagaatgtagttaccgtctgcttgggaagatgtcagtgcaaatgtgaagataatgggcatcggactaggctttggtttgccacaagtggcagctgcctgtatcaattacatttattaattttgcttttcatttttcccagttctcctcaccccccctttgttgaaatgttggacttgctgtcagaggcaactgtaatattgccttagggacttgtggagaaggggaattgctcagtgtagtgttttaactttcagaaccaagcaatctatttactcttacaaatatttaagaagtgtgttagtccaactttaagaaaaatccaaactcatcagcttttgatagcatcttggtttttgaaacaacttcaatctgtaattggcattcagaatgcccttggcatgccagtctgtgatggcatttaagacctgtaaaacacttgagcccaactcgattaaccaaaaccgataaccaccacctttatcttctaaataaagtccgctttatttttaaaaaaaaaaacaacaaaccaaagttgga

SEQ ID NO: 101688 - DNA, 5060 bp, Homo sapiens
ctccctcgctccctccctgcgcgccgcctctcactcacagcctcccttccttctttctccctccgcctcccgagcaccagcgcgctctgagctgcccccagggtccctcccccgccgccagcagcccatttggagggaggaagtaagggaagaggagaggaaggggagccggaccgactacccagacagagccggtgaatgggtttgtggtgacccccgccccccaccccaccctcccttcccacccgacccccaacccccatccccagttcgagccgccgcccgaaaggccgggccgtcgtcttaggaggagtcgccgccgccgccacctccgccatggagctgatcaccattctcgagaagaccgtgtctcccgatcggctggagctggaagcggcgcagaagttcctggagcgtgcggccgtggagaacctgcccactttccttgtggaactgtccagagtgctggcaaatccaggaaacagtcaggttgccagagttgcagctggtctacaaatcaagaactctttgacatctaaagatccagatatcaaggcacaatatcagcagaggtggcttgctattgatgctaatgctcgacgagaagtcaagaactatgttttgcagacattgggtacagaaacttaccggcctagttctgcctcacagtgtgtggctggtattgcttgtgcagagatcccagtaaaccagtggccagaactcattcctcagctggtggccaatgtcacaaaccccaacagcacagagcacatgaaggagtcgacattggaagccatcggttatatttgccaagatatagacccagagcagctacaagataaatccaatgagattctgactgccataatccaggggatgaggaaagaagagcctagtaataatgtgaagctagctgctacgaatgcactcctgaactcattggagttcaccaaagcaaactttgataaagagtctgaaaggcactttattatgcaggtggtctgtgaagccacacagtgtccagatacgagggtacgagtggctgctttacagaatctggtgaagataatgtccttatattatcagtacatggagacatatatgggtcctgctctttttgcaatcacaatcgaagcaatgaaaagtgacattgatgaggtggctttacaagggatagaattctggtccaatgtctgtgatgaggaaatggatttggccattgaagcttcagaggcagcagaacaaggacggccccctgagcacaccagcaagttttatgcgaagggagcactacagtatctggttccaatcctcacacagacactaactaaacaggacgaaaatgatgatgacgatgactggaacccctgcaaagcagcaggggtgtgcctcatgcttctggccacctgctgtgaagatgacattgtcccacatgtcctccccttcattaaagaacacatcaagaacccagattggcggtaccgggatgcagcagtgatggcttttggttgtatcttggaaggaccagagcccagtcagctcaaaccactagttatacaggctatgcccaccctaatagaattaatgaaagaccccagtgtagttgttcgagatacagctgcatggactgtaggcagaatttgtgagctgcttcctgaagctgccatcaatgatgtctacttggctcccctgctacagtgtctgattgagggtctcagtgctgaacccagagtggcttcaaatgtgtgctgggctttctccagtctggctgaagctgcttatgaagctgcagacgttgctgatgatcaggaagaaccagctacttactgcttatcttcttcatttgaactcatagttcagaagctcctagagactacagacagacctgatggacaccagaacaacctgaggagttctgcatatgaatctctgatggaaattgtgaaaaacagtgccaaggattgttatcctgctgtccagaaaacgactttggtcatcatggaacgactgcaacaggttcttcagatggagtcacatatccagagcacatccgatagaatccagttcaatgaccttcagtctttactctgtgcaactcttcagaatgttcttcggaaagtgcaacatcaagatgctttgcagatctctgatgtggttatggcctccctgttaaggatgttccaaagcacagctgggtctgggggagtacaagaggatgccctgatggcagttagcacactggtggaagtgttgggtggtgaattcctcaagtacatggaggcctttaaacccttcctgggcattggattaaaaaattatgctgaataccaggtttgtttggcagctgtgggcttagtgggagacttgtgccgtgccctgcaatccaacatcatacctttctgtgacgaggtgatgcagctgcttctggaaaatttggggaatgagaacgtccacaggtctgtgaagccgcagattctgtcagtgtttggtgatattgcccttgctattggaggagagtttaaaaaatacttagaggttgtattgaatactcttcagcaggcctcccaagcccaggtggacaagtcagactatgacatggtggattatctgaatgagctaagggaaagctgcttggaagcctatactggaatcgtccagggattaaagggggatcaggagaacgtacacccggatgtgatgctggtacaacccagagtagaatttattctgtctttcattgaccacattgctggagatgaggatcacacagatggagtagtagcttgtgctgctggactaataggggacttatgtacagcatttgggaaggatgtactgaaattagtagaagctaggccaatgatccatgaattgttaactgaagggcggagatcgaagactaacaaagcaaaaacccttgctacatgggcaacaaaagaactgaggaaactgaagaaccaagcttgatctgttaccattgggatgataacctgaggacccccactggaaatctcccatcttttgaaaaacctggaagtgaggagtgtgcacggatgctgaatgtttgggaatgagaggatgagtgagtgaggcttgaaaacacaccacattgaaaatcctgccacagcagcagccgcagccgccaacagcagcgctgttagtgagctaagtaagcactgacttcgtagaaaaccataacatcggccatcttggaaaagagaaaaacaatggagttacttatttaaaaaaaaagaaagaaagttatctcttcccaggagaggctagaagtagcttttctgtcttttggccagtgccgagtggaatgcctggtttgggggaggaggagggactgggttcagctgtggtgctttgttgtaaaaggcagcctggcctttgctactgaggagaaagatggagcctgggtctcaagcccaccttcgctgtacctttgccacatggtactgtatgcttgccagctagaaggagggtcagggattttttacagtctgagaatgagtgtgtgtgagtgaggcggtatccacattctcaacttcaagtcattgcagtttctttttcccagaaaacaaggggttagatgttgcatttcataaaactaaccgaagttctgtctactgatgcagcacaagagatgtaaaaaaaaaaaaaaaaaaaaaaaaaaaaaaaacacacacacagaggaaagacgctctttaggttttgttttgttttttttttttggttttgttttttgttttttttactctagggaaaacactgacgaatggtcagagctcctatcctgatcttttcatcaaggcgcctttcctaataatatggttcaactgtgaatgtagaagtgggggggaggggggagaaaaagaaaactctggcgttagaggatatagaaaaatataagtacaattgttacaaataacgcagacttcaaaaacaaaaaaatcacaacccaaacaaaccaaaatttaaatgatcagaattggcagcacaaagaaaacgccctctcctgacttgtattgtggcagtctgaacgcccccagaaaattgtgccaaagagtttagaaaaataaatatacaataaaagtaaacacatacacacaaaacagcaaacttcaggtaactattttggattgcaaacaggataattaaatgttcaaacaatctgataaaataaccatttggaaactgcttggccttctgttcttttatttgattgactacaatgcggtattggtctcttgctgcacttcaaaagcaaccaacaaaacaaaaacaaaaaaaagtgtgtgtgtgtgaatacacacacacactaactagaagtcttgtgatgaaaatggcacttggaaaaggttttatttttccactgaagttgaaggttaataaaatggtgtcaaacgtcccctggtcacacacttgaatatttttttagaagtgtgatgtggtatgattaccataaatcagacttaattattttcccttttacaagggaacagggcatcctgaattttagagcctttcagcaataagaagggatgttggtgagctttgatcctcttttggttttgcagttgttaggagtttttgctggcattttgaatatgctgctttcagaaaaaccaaggaagttttaaaattgcttcctggtccttagaggactaaaaacaagaccctcattcccactttcatttccactctagcaaaaactgggcttgcgtttttctccaactcctcgtttatatcctcccttccatgtccaagccttccattcctaagtgggattggctcagttttgcccatccatatggcagcatctctaatagctcttgtacagggtatcagatattgtgccttttggtgccaggttcaaagtcaagtgccgatctatgaaccagtgtacaaaaaaaaaaaaatccaggtatttgaaggagagacgctccattgtgaataaagagctcataccagctcctaagccctattaagaagaggcctggtcctctaatgccttgtttccatttcagttgttctagagtgtggttctcgtcggg

SEQ ID NO: 101689 - DNA, 4247 bp, Homo sapiens
ctccctcgctccctccctgcgcgccgcctctcactcacagcctcccttccttctttctccctccgcctcccgagcaccagcgcgctctgagctgcccccagggtccctcccccgccgccagcagcccatttggagggaggaagtaagggaagaggagaggaaggggagccggaccgactacccagacagagccggtgaatgggtttgtggtgacccccgccccccaccccaccctcccttcccacccgacccccaacccccatccccagttcgagccgccgcccgaaaggccgggccgtcgtcttaggaggagtcgccgccgccgccacctccgccatggagctgatcaccattctcgagaagaccgtgtctcccgatcggctggagctggaagcggcgcagaagttcctggagcgtgcggccgtggagaacctgcccactttccttgtggaactgtccagagtgctggcaaatccaggaaacagtcaggttgccagagttgcagctggtctacaaatcaagaactctttgacatctaaagatccagatatcaaggcacaatatcagcagaggtggcttgctattgatgctaatgctcgacgagaagtcaagaactatgttttgcagacattgggtacagaaacttaccggcctagttctgcctcacagtgtgtggctggtattgcttgtgcagagatcccagtaaaccagtggccagaactcattcctcagctggtggccaatgtcacaaaccccaacagcacagagcacatgaaggagtcgacattggaagccatcggttatatttgccaagatatagacccagagcagctacaagataaatccaatgagattctgactgccataatccaggggatgaggaaagaagagcctagtaataatgtgaagctagctgctacgaatgcactcctgaactcattggagttcaccaaagcaaactttgataaagagtctgaaaggcactttattatgcaggtggtctgtgaagccacacagtgtccagatacgagggtacgagtggctgctttacagaatctggtgaagataatgtccttatattatcagtacatggagacatatatgggtcctgctctttttgcaatcacaatcgaagcaatgaaaagtgacattgatgaggtggctttacaagggatagaattctggtccaatgtctgtgatgaggaaatggatttggccattgaagcttcagaggcagcagaacaaggacggccccctgagcacaccagcaagttttatgcgaagggagcactacagtatctggttccaatcctcacacagacactaactaaacaggacgaaaatgatgatgacgatgactggaacccctgcaaagcagcaggggtgtgcctcatgcttctggccacctgctgtgaagatgacattgtcccacatgtcctccccttcattaaagaacacatcaagaacccagattggcggtaccgggatgcagcagtgatggcttttggttgtatcttggaaggaccagagcccagtcagctcaaaccactagttatacaggctatgcccaccctaatagaattaatgaaagaccccagtgtagttgttcgagatacagctgcatggactgtaggcagaatttgtgagctgcttcctgaagctgccatcaatgatgtctacttggctcccctgctacagtgtctgattgagggtctcagtgctgaacccagagtggcttcaaatgtgtgctgggctttctccagtctggctgaagctgcttatgaagctgcagacgttgctgatgatcaggaagaaccagctacttactgcttatcttcttcatttgaactcatagttcagaagctcctagagactacagacagacctgatggacaccagaacaacctgaggagttctgcatatgaatctctgatggaaattgtgaaaaacagtgccaaggattgttatcctgctgtccagaaaacgactttggtcatcatggaacgactgcaacaggttcttcagatggagtcacatatccagagcacatccgatagaatccagttcaatgaccttcagtctttactctgtgcaactcttcagaatgttcttcggaaagtgcaacatcaagatgctttgcagatctctgatgtggttatggcctccctgttaaggatgttccaaagcacagctgggtctgggggagtacaagaggatgccctgatggcagttagcacactggtggaagtgttgggtggtgaattcctcaagtacatggaggcctttaaacccttcctgggcattggattaaaaaattatgctgaataccaggtttgtttggcagctgtgggcttagtgggagacttgtgccgtgccctgcaatccaacatcatacctttctgtgacgaggtgatgcagctgcttctggaaaatttggggaatgagaacgtccacaggtctgtgaagccgcagattctgtcagtgtttggtgatattgcccttgctattggaggagagtttaaaaaatacttagaggttgtattgaatactcttcagcaggcctcccaagcccaggtggacaagtcagactatgacatggtggattatctgaatgagctaagggaaagctgcttggaagcctatactggaatcgtccagggattaaagggggatcaggagaacgtacacccggatgtgatgctggtacaacccagagtagaatttattctgtctttcattgaccacattgctggagatgaggatcacacagatggagtagtagcttgtgctgctggactaataggggacttatgtacagcatttgggaaggatgtactgaaattagtagaagctaggccaatgatccatgaattgttaactgaagggcggagatcgaagactaacaaagcaaaaacccttgctacatgggcaacaaaagaactgaggaaactgaagaaccaagcttgatctgttaccattgggatgataacctgaggacccccactggaaatctcccatcttttgaaaaacctggaagtgaggagtgtgcacggatgctgaatgtttgggaatgagaggatgagtgagtgaggcttgaaaacacaccacattgaaaatcctgccacagcagcagccgcagccgccaacagcagcgctgttagtgagctaagtaagcactgacttcgtagaaaaccataacatcggccatcttggaaaagagaaaaacaatggagttacttatttaaaaaaaaagaaagaaagttatctcttcccaggagaggctagaagtagcttttctgtcttttggccagtgccgagtggaatgcctggtttgggggaggaggagggactgggttcagctgtggtgctttgttgtaaaaggcagcctggcctttgctactgaggagaaagatggagcctgggtctcaagcccaccttcgctgtacctttgccacatggtactgtatgcttgccagctagaaggagggtcagggattttttacagtctgagaatgagtgtgtgtgagtgaggcggtatccacattctcaacttcaagtcattgcagtttctttttcccagaaaacaaggggttagatgttgcatttcataaaactaaccgaagttctgtctactgatgcagcacaagagatgtaaaaaaaaaaaaccccccccaaggggaaaaggccccttagggtgggggggggaatgggggggggctcgggtttcccccggggaaaacacctgcggcagaagggcggaaagagcccctaatcacgagaatattagacaaggggcggcgtcccaaaataatgtggtcacccggtggtagtgtgacaagcgtgggggaggagacggcggaaaacaaagaaataccttcgtggttttaaggttattaataatacttgtactatgtgggttcaaaaatacgggtagctttgtgaaaaaaaaagtctcagaccaaaagaaaccaaatttatggtgggtccagagtggggcacagaaaaaaaccccctccgtatggttggtgggttgtgacgccccaaaaatgtggcccagcgttgtggaacatatgttccgaagggtacactaaccaagacagaacttcggcacttggcggacagggaataggtcaccacgggaaaacctgggaagaaaaaaaaaaagggggccgcgaagataacatgggcgccagagagagaggacaaaccggagggcaaacgggggtcaaggtggtagcaaccatcaa

SEQ ID NO: 101690 - DNA, 3729 bp, Homo sapiens
ctccctcgctccctccctgcgcgccgcctctcactcacagcctcccttccttctttctccctccgcctcccgagcaccagcgcgctctgagctgcccccagggtccctcccccgccgccagcagcccatttggagggaggaagtaagggaagaggagaggaaggggagccggaccgactacccagacagagccggtgaatgggtttgtggtgacccccgccccccaccccaccctcccttcccacccgacccccaacccccatccccagttcgagccgccgcccgaaaggccgggccgtcgtcttaggaggagtcgccgccgccgccacctccgccatggagctgatcaccattctcgagaagaccgtgtctcccgatcggctggagctggaagcggcgcagaagttcctggagcgtgcggccgtggagaacctgcccactttccttgtggaactgtccagagtgctggcaaatccaggaaacagtcaggttgccagagttgcagctggtctacaaatcaagaactctttgacatctaaagatccagatatcaaggcacaatatcagcagaggtggcttgctattgatgctaatgctcgacgagaagtcaagaactatgttttgcagacattgggtacagaaacttaccggcctagttctgcctcacagtgtgtggctggtattgcttgtgcagagatcccagtaaaccagtggccagaactcattcctcagctggtggccaatgtcacaaaccccaacagcacagagcacatgaaggagtcgacattggaagccatcggttatatttgccaagatatagacccagagcagctacaagataaatccaatgagattctgactgccataatccaggggatgaggaaagaagagcctagtaataatgtgaagctagctgctacgaatgcactcctgaactcattggagttcaccaaagcaaactttgataaagagtctgaaaggcactttattatgcaggtggtctgtgaagccacacagtgtccagatacgagggtacgagtggctgctttacagaatctggtgaagataatgtccttatattatcagtacatggagacatatatgggtcctgctctttttgcaatcacaatcgaagcaatgaaaagtgacattgatgaggtggctttacaagggatagaattctggtccaatgtctgtgatgaggaaatggatttggccattgaagcttcagaggcagcagaacaaggacggccccctgagcacaccagcaagttttatgcgaagggagcactacagtatctggttccaatcctcacacagacactaactaaacaggacgaaaatgatgatgacgatgactggaacccctgcaaagcagcaggggtgtgcctcatgcttctggccacctgctgtgaagatgacattgtcccacatgtcctccccttcattaaagaacacatcaagaacccagattggcggtaccgggatgcagcagtgatggcttttggttgtatcttggaaggaccagagcccagtcagctcaaaccactagttatacaggctatgcccaccctaatagaattaatgaaagaccccagtgtagttgttcgagatacagctgcatggactgtaggcagaatttgtgagctgcttcctgaagctgccatcaatgatgtctacttggctcccctgctacagtgtctgattgagggtctcagtgctgaacccagagtggcttcaaatgtgtgctgggctttctccagtctggctgaagctgcttatgaagctgcagacgttgctgatgatcaggaagaaccagctacttactgcttatcttcttcatttgaactcatagttcagaagctcctagagactacagacagacctgatggacaccagaacaacctgaggagttctgcatatgaatctctgatggaaattgtgaaaaacagtgccaaggattgttatcctgctgtccagaaaacgactttggtcatcatggaacgactgcaacaggttcttcagatggagtcacatatccagagcacatccgatagaatccagttcaatgaccttcagtctttactctgtgcaactcttcagaatgttcttcggaaagtgcaacatcaagatgctttgcagatctctgatgtggttatggcctccctgttaaggatgttccaaagcacagctgggtctgggggagtacaagaggatgccctgatggcagttagcacactggtggaagtgttgggtggtgaattcctcaagtacatggaggcctttaaacccttcctgggcattggattaaaaaattatgctgaataccaggtttgtttggcagctgtgggcttagtgggagacttgtgccgtgccctgcaatccaacatcatacctttctgtgacgaggtgatgcagctgcttctggaaaatttggggaatgagaacgtccacaggtctgtgaagccgcagattctgtcagtgtttggtgatattgcccttgctattggaggagagtttaaaaaatacttagaggttgtattgaatactcttcagcaggcctcccaagcccaggtggacaagtcagactatgacatggtggattatctgaatgagctaagggaaagctgcttggaagcctatactggaatcgtccagggattaaagggggatcaggagaacgtacacccggatgtgatgctggtacaacccagagtagaatttattctgtctttcattgaccacattgctggagatgaggatcacacagatggagtagtagcttgtgctgctggactaataggggacttatgtacagcatttgggaaggatgtactgaaattagtagaagctaggccaatgatccatgaattgttaactgaagggcggagatcgaagactaacaaagcaaaaacccttgctacatgggcaacaaaagaactgaggaaactgaagaaccaagcttgatctgttaccattgggatgataacctgaggacccccactggaaatctcccatcttttgaaaaacctggaagtgaggagtgtgcacggatgctgaatgtttgggaatgagaggatgagtgagtgaggcttgaaaacacaccacattgaaaatcctgccacagcagcagccgcagccgccaacagcagcgctgttagtgagctaagtaagcactgacttcgtagaaaaccataacatcggccatcttggaaaagagaaaaacaatggagttacttatttaaaaaaaaagaaagaaagttatctcttcccaggagaggctagaagtagcttttctgtcttttggccagtgccgagtggaatgcctggtttgggggaggaggagggactgggttcagctgtggtgctttgttgtaaaaggcagcctggcctttgctactgaggagaaagatggagcctgggtctcaagcccaccttcgctgtacctttgccacatggtactgtatgcttgccagctagaaggagggtcagggattttttacagtctgagaatgagtgtgtgtgagtgaggcggtatccacattctcaacttcaagtcattgcagtttctttttcccagaaaacaaggggttagatgttgcatttcataaaactaaccgaagttctgtctactgatgcagcacaagagatgtaaaaaaaaaaaatccctgaccctccttctagctggcaagcatacagtaccatgtggcaaaggtcgacgcggccgca

SEQ ID NO: 101691 - DNA, 5589 bp, Homo sapiens
ctagaggtatccccgccattgtgcgtttgcagctggtctacaaatcaagaactctttgacatctaaagatccagatatcaaggcacaatatcagcagaggtggcttgctattgatgctaatgctcgacgagaagtcaagaactatgttttgcagacattgggtacagaaacttaccggcctagttctgcctcacagtgtgtggctggtattgcttgtgcagagatcccagtaaaccagtggccagaactcattcctcagctggtggccaatgtcacaaaccccaacagcacagagcacatgaaggagtcgacattggaagccatcggttatatttgccaagatatagacccagagcagctacaagataaatccaatgagattctgactgccataatccaggggatgaggaaagaagagcctagtaataatgtgaagctagctgctacgaatgcactcctgaactcattggagttcaccaaagcaaactttgataaagagtctgaaaggcactttattatgcaggtggtctgtgaagccacacagtgtccagatacgagggtacgagtggctgctttacagaatctggtgaagataatgtccttatattatcagtacatggagacatatatgggtcctgctctttttgcaatcacaatcgaagcaatgaaaagtgacattgatgaggtggctttacaagggatagaattctggtccaatgtctgtgatgaggaaatggatttggccattgaagcttcagaggcagcagaacaaggacggccccctgagcacaccagcaagttttatgcgaagggagcactacagtatctggttccaatcctcacacagacactaactaaacaggacgaaaatgatgatgacgatgactggaacccctgcaaagcagcaggggtgtgcctcatgcttctggccacctgctgtgaagatgacattgtcccacatgtcctccccttcattaaagaacacatcaagaacccagattggcggtaccgggatgcagcagtgatggcttttggttgtatcttggaaggaccagagcccagtcagctcaaaccactagttatacaggctatgcccaccctaatagaattaatgaaagaccccagtgtagttgttcgagatacagctgcatggactgtaggcagaatttgtgagctgcttcctgaagctgccatcaatgatgtctacttggctcccctgctacagtgtctgattgagggtctcagtgctgaacccagagtggcttcaaatgtgtgctgggctttctccagtctggctgaagctgcttatgaagctgcagacgttgctgatgatcaggaagaaccagctacttactgcttatcttcttcatttgaactcatagttcagaagctcctagagactacagacagacctgatggacaccagaacaacctgaggagttctgcatatgaatctctgatggaaattgtgaaaaacagtgccaaggattgttatcctgctgtccagaaaacgactttggtcatcatggaacgactgcaacaggttcttcagatggagtcacatatccagagcacatccgatagaatccagttcaatgaccttcagtctttactctgtgcaactcttcagaatgttcttcggaaagtgcaacatcaagatgctttgcagatctctgatgtggttatggcctccctgttaaggatgttccaaagcacagctgggtctgggggagtacaagaggatgccctgatggcagttagcacactggtggaagtgttgggtggtgaattcctcaagtacatggaggcctttaaacccttcctgggcattggattaaaaaattatgctgaataccaggtttgtttggcagctgtgggcttagtgggagacttgtgccgtgccctgcaatccaacatcatacctttctgtgacgaggtgatgcagctgcttctggaaaatttggggaatgagaacgtccacaggtctgtgaagccgcagattctgtcagtgtttggtgatattgcccttgctattggaggagagtttaaaaaatacttagaggttgtattgaatactcttcagcaggcctcccaagcccaggtggacaagtcagactatgacatggtggattatctgaatgagctaagggaaagctgcttggaagcctatactggaatcgtccagggattaaagggggatcaggagaacgtacacccggatgtgatgctggtacaacccagagtagaatttattctgtctttcattgaccacattgctggagatgaggatcacacagatggagtagtagcttgtgctgctggactaataggggacttatgtacagcatttgggaaggatgtactgaaattagtagaagctaggccaatgatccatgaattgttaactgaagggcggagatcgaagactaacaaagcaaaaacccttgctacatgggcaacaaaagaactgaggaaactgaagaaccaagcttgatctgttaccattgggatgataacctgaggacccccactggaaatctcccatcttttgaaaaacctggaagtgaggagtgtgcacggatgctgaatgtttgggaatgagaggatgagtgagtgaggcttgaaaacacaccacattgaaaatcctgccacagcagcagccgcagccgccaacagcagcgctgttagtgagctaagtaagcactgacttcgtagaaaaccataacatcggccatcttggaaaagagaaaaacaatggagttacttatttaaaaaaaaagaaagaaagttatctcttcccaggagaggctagaagtagcttttctgtcttttggccagtgccgagtggaatgcctggtttgggggaggaggagggactgggttcagctgtggtgctttgttgtaaaaggcagcctggcctttgctactgaggagaaagatggagcctgggtctcaagcccaccttcgctgtacctttgccacatggtactgtatgcttgccagctagaaggagggtcagggattttttacagtctgagaatgagtgtgtgtgagtgaggcggtatccacattctcaacttcaagtcattgcagtttctttttcccagaaaacaaggggttagatgttgcatttcataaaactaaccgaagttctgtctactgatgcagcacaagagatgtaaaaaaaaaaaaaaaaaaaaaaaaaaaaaaaacacacacacagaggaaagacgctctttaggttttgttttgttttttttttttggttttgttttttgttttttttactctagggaaaacactgacgaatggtcagagctcctatcctgatcttttcatcaaggcgcctttcctaataatatggttcaactgtgaatgtagaagtgggggggaggggggagaaaaagaaaactctggcgttagaggatatagaaaaatataagtacaattgttacaaataacgcagacttcaaaaacaaaaaaatcacaacccaaacaaaccaaaatttaaatgatcagaattggcagcacaaagaaaacgccctctcctgacttgtattgtggcagtctgaacgcccccagaaaattgtgccaaagagtttagaaaaataaatatacaataaaagtaaacacatacacacaaaacagcaaacttcaggtaactattttggattgcaaacaggataattaaatgttcaaacaatctgataaaataaccatttggaaactgcttggccttctgttcttttatttgattgactacaatgcggtattggtctcttgctgcacttcaaaagcaaccaacaaaacaaaaacaaaaaaaagtgtgtgtgtgtgaatacacacacacactaactagaagtcttgtgatgaaaatggcacttggaaaaggttttatttttccactgaagttgaaggttaataaaatggtgtcaaacgtcccctggtcacacacttgaatatttttttagaagtgtgatgtggtatgattaccataaatcagacttaattattttcccttttacaagggaacagggcatcctgaattttagagcctttcagcaataagaagggatgttggtgagctttgatcctcttttggttttgcagttgttaggagtttttgctggcattttgaatatgctgctttcagaaaaaccaaggaagttttaaaattgcttcctggtccttagaggactaaaaacaagaccctcattcccactttcatttccactctagcaaaaactgggcttgcgtttttctccaactcctcgtttatatcctcccttccatgtccaagccttccattcctaagtgggattggctcagttttgcccatccatatggcagcatctctaatagctcttgtacagggtatcagatattgtgccttttggtgccaggttcaaagtcaagtgccgatctatgaaccagtgtacaaaaaaaaaaaaatccaggtatttgaaggagagacgctccattgtgaataaagagctcataccagctcctaagccctattaagaagaggcctggtcctctaatgccttgtttccatttcagttgttctttgagagacagaatgatgtactaaccattcgtgattattaagatagggttgggtcagggcttagggagggggcagaaatattggggatagaaaaaaaatctgatcattcctcagtgctacccatttctgtcctgtgtgggctgcttagctagacagcaggagaataaagtacaccgagaaccataatgaaaaaaccttccgtgtgttttgtcatgttttgttccagggaagcagttgatgagtgctgttactaatgctttctcccagatccattcagtggtggagaggaggaaaatgggctggttggatgtggtcttggtgccttgcagttactctgcactggttatgcatttaattctcctcttttctagttaaccttttgccagtgggttttccatagtctgggtatttgtccttatatcagttataccacctaaggcaactgggtgcaaaatgcattctgttcactcactgtctgggccttccccaccctagtcttggcacattccttcaagaatgtagttaccgtctgcttgggaagatgtcagtgcaaatgtgaagataatgggcatcggactaggctttggtttgccacaagtggcagctgcctgtatcaattacatttattaattttgcttttcatttttcccagttctcctcaccccccctttgttgaaatgttggacttgctgtcagaggcaactgtaatattgccttagggacttgtggagaaggggaattgctcagtgtagtgttttaactttcagaaccaagcaatctatttactcttacaaatatttaagaagtgtgttagtccaactttaagaaaaatccaaactcatcagcttttgatagcatcttggtttttgaaacaacttcaatctgtaattggcattcagaatgcccttggcatgccagtctgtgatggcatttaagacctgtaaaacacttgagcccaactcgattaaccaaaaccgataaccaccacctttatcttctaaataaagtccgctttattttta

SEQ ID NO: 101692 - DNA, 5298 bp, Homo sapiens
gacaagaatgtgactaggtacgaggctgggtggtggttatatttgccaagatatagacccagagcagctacaagataaatccaatgagattctgactgccataatccaggggatgaggaaagaagagcctagtaataatgtgaagctagctgctacgaatgcactcctgaactcattggagttcaccaaagcaaactttgataaagagtctgaaaggcactttattatgcaggtggtctgtgaagccacacagtgtccagatacgagggtacgagtggctgctttacagaatctggtgaagataatgtccttatattatcagtacatggagacatatatgggtcctgctctttttgcaatcacaatcgaagcaatgaaaagtgacattgatgaggtggctttacaagggatagaattctggtccaatgtctgtgatgaggaaatggatttggccattgaagcttcagaggcagcagaacaaggacggccccctgagcacaccagcaagttttatgcgaagggagcactacagtatctggttccaatcctcacacagacactaactaaacaggacgaaaatgatgatgacgatgactggaacccctgcaaagcagcaggggtgtgcctcatgcttctggccacctgctgtgaagatgacattgtcccacatgtcctccccttcattaaagaacacatcaagaacccagattggcggtaccgggatgcagcagtgatggcttttggttgtatcttggaaggaccagagcccagtcagctcaaaccactagttatacaggctatgcccaccctaatagaattaatgaaagaccccagtgtagttgttcgagatacagctgcatggactgtaggcagaatttgtgagctgcttcctgaagctgccatcaatgatgtctacttggctcccctgctacagtgtctgattgagggtctcagtgctgaacccagagtggcttcaaatgtgtgctgggctttctccagtctggctgaagctgcttatgaagctgcagacgttgctgatgatcaggaagaaccagctacttactgcttatcttcttcatttgaactcatagttcagaagctcctagagactacagacagacctgatggacaccagaacaacctgaggagttctgcatatgaatctctgatggaaattgtgaaaaacagtgccaaggattgttatcctgctgtccagaaaacgactttggtcatcatggaacgactgcaacaggttcttcagatggagtcacatatccagagcacatccgatagaatccagttcaatgaccttcagtctttactctgtgcaactcttcagaatgttcttcggaaagtgcaacatcaagatgctttgcagatctctgatgtggttatggcctccctgttaaggatgttccaaagcacagctgggtctgggggagtacaagaggatgccctgatggcagttagcacactggtggaagtgttgggtggtgaattcctcaagtacatggaggcctttaaacccttcctgggcattggattaaaaaattatgctgaataccaggtttgtttggcagctgtgggcttagtgggagacttgtgccgtgccctgcaatccaacatcatacctttctgtgacgaggtgatgcagctgcttctggaaaatttggggaatgagaacgtccacaggtctgtgaagccgcagattctgtcagtgtttggtgatattgcccttgctattggaggagagtttaaaaaatacttagaggttgtattgaatactcttcagcaggcctcccaagcccaggtggacaagtcagactatgacatggtggattatctgaatgagctaagggaaagctgcttggaagcctatactggaatcgtccagggattaaagggggatcaggagaacgtacacccggatgtgatgctggtacaacccagagtagaatttattctgtctttcattgaccacattgctggagatgaggatcacacagatggagtagtagcttgtgctgctggactaataggggacttatgtacagcatttgggaaggatgtactgaaattagtagaagctaggccaatgatccatgaattgttaactgaagggcggagatcgaagactaacaaagcaaaaacccttgctacatgggcaacaaaagaactgaggaaactgaagaaccaagcttgatctgttaccattgggatgataacctgaggacccccactggaaatctcccatcttttgaaaaacctggaagtgaggagtgtgcacggatgctgaatgtttgggaatgagaggatgagtgagtgaggcttgaaaacacaccacattgaaaatcctgccacagcagcagccgcagccgccaacagcagcgctgttagtgagctaagtaagcactgacttcgtagaaaaccataacatcggccatcttggaaaagagaaaaacaatggagttacttatttaaaaaaaaagaaagaaagttatctcttcccaggagaggctagaagtagcttttctgtcttttggccagtgccgagtggaatgcctggtttgggggaggaggagggactgggttcagctgtggtgctttgttgtaaaaggcagcctggcctttgctactgaggagaaagatggagcctgggtctcaagcccaccttcgctgtacctttgccacatggtactgtatgcttgccagctagaaggagggtcagggattttttacagtctgagaatgagtgtgtgtgagtgaggcggtatccacattctcaacttcaagtcattgcagtttctttttcccagaaaacaaggggttagatgttgcatttcataaaactaaccgaagttctgtctactgatgcagcacaagagatgtaaaaaaaaaaaaaaaaaaaaaaaaaaaaaaaacacacacacagaggaaagacgctctttaggttttgttttgttttttttttttggttttgttttttgttttttttactctagggaaaacactgacgaatggtcagagctcctatcctgatcttttcatcaaggcgcctttcctaataatatggttcaactgtgaatgtagaagtgggggggaggggggagaaaaagaaaactctggcgttagaggatatagaaaaatataagtacaattgttacaaataacgcagacttcaaaaacaaaaaaatcacaacccaaacaaaccaaaatttaaatgatcagaattggcagcacaaagaaaacgccctctcctgacttgtattgtggcagtctgaacgcccccagaaaattgtgccaaagagtttagaaaaataaatatacaataaaagtaaacacatacacacaaaacagcaaacttcaggtaactattttggattgcaaacaggataattaaatgttcaaacaatctgataaaataaccatttggaaactgcttggccttctgttcttttatttgattgactacaatgcggtattggtctcttgctgcacttcaaaagcaaccaacaaaacaaaaacaaaaaaaagtgtgtgtgtgtgaatacacacacacactaactagaagtcttgtgatgaaaatggcacttggaaaaggttttatttttccactgaagttgaaggttaataaaatggtgtcaaacgtcccctggtcacacacttgaatatttttttagaagtgtgatgtggtatgattaccataaatcagacttaattattttcccttttacaagggaacagggcatcctgaattttagagcctttcagcaataagaagggatgttggtgagctttgatcctcttttggttttgcagttgttaggagtttttgctggcattttgaatatgctgctttcagaaaaaccaaggaagttttaaaattgcttcctggtccttagaggactaaaaacaagaccctcattcccactttcatttccactctagcaaaaactgggcttgcgtttttctccaactcctcgtttatatcctcccttccatgtccaagccttccattcctaagtgggattggctcagttttgcccatccatatggcagcatctctaatagctcttgtacagggtatcagatattgtgccttttggtgccaggttcaaagtcaagtgccgatctatgaaccagtgtacaaaaaaaaaaaaatccaggtatttgaaggagagacgctccattgtgaataaagagctcataccagctcctaagccctattaagaagaggcctggtcctctaatgccttgtttccatttcagttgttctttgagagacagaatgatgtactaaccattcgtgattattaagatagggttgggtcagggcttagggagggggcagaaatattggggatagaaaaaaaatctgatcattcctcagtgctacccatttctgtcctgtgtgggctgcttagctagacagcaggagaataaagtacaccgagaaccataatgaaaaaaccttccgtgtgttttgtcatgttttgttccagggaagcagttgatgagtgctgttactaatgctttctcccagatccattcagtggtggagaggaggaaaatgggctggttggatgtggtcttggtgccttgcagttactctgcactggttatgcatttaattctcctcttttctagttaaccttttgccagtgggttttccatagtctgggtatttgtccttatatcagttataccacctaaggcaactgggtgcaaaatgcattctgttcactcactgtctgggccttccccaccctagtcttggcacattccttcaagaatgtagttaccgtctgcttgggaagatgtcagtgcaaatgtgaagataatgggcatcggactaggctttggtttgccacaagtggcagctgcctgtatcaattacatttattaattttgcttttcatttttcccagttctcctcaccccccctttgttgaaatgttggacttgctgtcagaggcaactgtaatattgccttagggacttgtggagaaggggaattgctcagtgtagtgttttaactttcagaaccaagcaatctatttactcttacaaatatttaagaagtgtgttagtccaactttaagaaaaatccaaactcatcagcttttgatagcatcttggtttttgaaacaacttcaatctgtaattggcattcagaatgcccttggcatgccagtctgtgatggcatttaagacctgtaaaacacttgagcccaactcgattaaccaaaaccgataaccaccacctttatcttctaaataaagtccgctttattttta

SEQ ID NO: 101693 - DNA, 5293 bp, Homo sapiens
aattaaggctagtacgagctggtgttgaatttggccgaggccaagatatagacccagagcagctacaagataaatccaatgagattctgactgccataatccaggggatgaggaaagaagagcctagtaataatgtgaagctagctgctacgaatgcactcctgaactcattggagttcaccaaagcaaactttgataaagagtctgaaaggcactttattatgcaggtggtctgtgaagccacacagtgtccagatacgagggtacgagtggctgctttacagaatctggtgaagataatgtccttatattatcagtacatggagacatatatgggtcctgctctttttgcaatcacaatcgaagcaatgaaaagtgacattgatgaggtggctttacaagggatagaattctggtccaatgtctgtgatgaggaaatggatttggccattgaagcttcagaggcagcagaacaaggacggccccctgagcacaccagcaagttttatgcgaagggagcactacagtatctggttccaatcctcacacagacactaactaaacaggacgaaaatgatgatgacgatgactggaacccctgcaaagcagcaggggtgtgcctcatgcttctggccacctgctgtgaagatgacattgtcccacatgtcctccccttcattaaagaacacatcaagaacccagattggcggtaccgggatgcagcagtgatggcttttggttgtatcttggaaggaccagagcccagtcagctcaaaccactagttatacaggctatgcccaccctaatagaattaatgaaagaccccagtgtagttgttcgagatacagctgcatggactgtaggcagaatttgtgagctgcttcctgaagctgccatcaatgatgtctacttggctcccctgctacagtgtctgattgagggtctcagtgctgaacccagagtggcttcaaatgtgtgctgggctttctccagtctggctgaagctgcttatgaagctgcagacgttgctgatgatcaggaagaaccagctacttactgcttatcttcttcatttgaactcatagttcagaagctcctagagactacagacagacctgatggacaccagaacaacctgaggagttctgcatatgaatctctgatggaaattgtgaaaaacagtgccaaggattgttatcctgctgtccagaaaacgactttggtcatcatggaacgactgcaacaggttcttcagatggagtcacatatccagagcacatccgatagaatccagttcaatgaccttcagtctttactctgtgcaactcttcagaatgttcttcggaaagtgcaacatcaagatgctttgcagatctctgatgtggttatggcctccctgttaaggatgttccaaagcacagctgggtctgggggagtacaagaggatgccctgatggcagttagcacactggtggaagtgttgggtggtgaattcctcaagtacatggaggcctttaaacccttcctgggcattggattaaaaaattatgctgaataccaggtttgtttggcagctgtgggcttagtgggagacttgtgccgtgccctgcaatccaacatcatacctttctgtgacgaggtgatgcagctgcttctggaaaatttggggaatgagaacgtccacaggtctgtgaagccgcagattctgtcagtgtttggtgatattgcccttgctattggaggagagtttaaaaaatacttagaggttgtattgaatactcttcagcaggcctcccaagcccaggtggacaagtcagactatgacatggtggattatctgaatgagctaagggaaagctgcttggaagcctatactggaatcgtccagggattaaagggggatcaggagaacgtacacccggatgtgatgctggtacaacccagagtagaatttattctgtctttcattgaccacattgctggagatgaggatcacacagatggagtagtagcttgtgctgctggactaataggggacttatgtacagcatttgggaaggatgtactgaaattagtagaagctaggccaatgatccatgaattgttaactgaagggcggagatcgaagactaacaaagcaaaaacccttgctacatgggcaacaaaagaactgaggaaactgaagaaccaagcttgatctgttaccattgggatgataacctgaggacccccactggaaatctcccatcttttgaaaaacctggaagtgaggagtgtgcacggatgctgaatgtttgggaatgagaggatgagtgagtgaggcttgaaaacacaccacattgaaaatcctgccacagcagcagccgcagccgccaacagcagcgctgttagtgagctaagtaagcactgacttcgtagaaaaccataacatcggccatcttggaaaagagaaaaacaatggagttacttatttaaaaaaaaagaaagaaagttatctcttcccaggagaggctagaagtagcttttctgtcttttggccagtgccgagtggaatgcctggtttgggggaggaggagggactgggttcagctgtggtgctttgttgtaaaaggcagcctggcctttgctactgaggagaaagatggagcctgggtctcaagcccaccttcgctgtacctttgccacatggtactgtatgcttgccagctagaaggagggtcagggattttttacagtctgagaatgagtgtgtgtgagtgaggcggtatccacattctcaacttcaagtcattgcagtttctttttcccagaaaacaaggggttagatgttgcatttcataaaactaaccgaagttctgtctactgatgcagcacaagagatgtaaaaaaaaaaaaaaaaaaaaaaaaaaaaaaaacacacacacagaggaaagacgctctttaggttttgttttgttttttttttttggttttgttttttgttttttttactctagggaaaacactgacgaatggtcagagctcctatcctgatcttttcatcaaggcgcctttcctaataatatggttcaactgtgaatgtagaagtgggggggaggggggagaaaaagaaaactctggcgttagaggatatagaaaaatataagtacaattgttacaaataacgcagacttcaaaaacaaaaaaatcacaacccaaacaaaccaaaatttaaatgatcagaattggcagcacaaagaaaacgccctctcctgacttgtattgtggcagtctgaacgcccccagaaaattgtgccaaagagtttagaaaaataaatatacaataaaagtaaacacatacacacaaaacagcaaacttcaggtaactattttggattgcaaacaggataattaaatgttcaaacaatctgataaaataaccatttggaaactgcttggccttctgttcttttatttgattgactacaatgcggtattggtctcttgctgcacttcaaaagcaaccaacaaaacaaaaacaaaaaaaagtgtgtgtgtgtgaatacacacacacactaactagaagtcttgtgatgaaaatggcacttggaaaaggttttatttttccactgaagttgaaggttaataaaatggtgtcaaacgtcccctggtcacacacttgaatatttttttagaagtgtgatgtggtatgattaccataaatcagacttaattattttcccttttacaagggaacagggcatcctgaattttagagcctttcagcaataagaagggatgttggtgagctttgatcctcttttggttttgcagttgttaggagtttttgctggcattttgaatatgctgctttcagaaaaaccaaggaagttttaaaattgcttcctggtccttagaggactaaaaacaagaccctcattcccactttcatttccactctagcaaaaactgggcttgcgtttttctccaactcctcgtttatatcctcccttccatgtccaagccttccattcctaagtgggattggctcagttttgcccatccatatggcagcatctctaatagctcttgtacagggtatcagatattgtgccttttggtgccaggttcaaagtcaagtgccgatctatgaaccagtgtacaaaaaaaaaaaaatccaggtatttgaaggagagacgctccattgtgaataaagagctcataccagctcctaagccctattaagaagaggcctggtcctctaatgccttgtttccatttcagttgttctttgagagacagaatgatgtactaaccattcgtgattattaagatagggttgggtcagggcttagggagggggcagaaatattggggatagaaaaaaaatctgatcattcctcagtgctacccatttctgtcctgtgtgggctgcttagctagacagcaggagaataaagtacaccgagaaccataatgaaaaaaccttccgtgtgttttgtcatgttttgttccagggaagcagttgatgagtgctgttactaatgctttctcccagatccattcagtggtggagaggaggaaaatgggctggttggatgtggtcttggtgccttgcagttactctgcactggttatgcatttaattctcctcttttctagttaaccttttgccagtgggttttccatagtctgggtatttgtccttatatcagttataccacctaaggcaactgggtgcaaaatgcattctgttcactcactgtctgggccttccccaccctagtcttggcacattccttcaagaatgtagttaccgtctgcttgggaagatgtcagtgcaaatgtgaagataatgggcatcggactaggctttggtttgccacaagtggcagctgcctgtatcaattacatttattaattttgcttttcatttttcccagttctcctcaccccccctttgttgaaatgttggacttgctgtcagaggcaactgtaatattgccttagggacttgtggagaaggggaattgctcagtgtagtgttttaactttcagaaccaagcaatctatttactcttacaaatatttaagaagtgtgttagtccaactttaagaaaaatccaaactcatcagcttttgatagcatcttggtttttgaaacaacttcaatctgtaattggcattcagaatgcccttggcatgccagtctgtgatggcatttaagacctgtaaaacacttgagcccaactcgattaaccaaaaccgataaccaccacctttatcttctaaataaagtccgctttattttta

SEQ ID NO: 101694 - DNA, 5300 bp, Homo sapiens
aggaagtcattagcaggtcggtcccggtttggtattcaatcagcgggacggtcgtcacatagtcagttactggactcttggccagtcaagattctgactgccataatccaggggatgaggaaagaagagcctagtaataatgtgaagctagctgctacgaatgcactcctgaactcattggagttcaccaaagcaaactttgataaagagtctgaaaggcactttattatgcaggtggtctgtgaagccacacagtgtccagatacgagggtacgagtggctgctttacagaatctggtgaagataatgtccttatattatcagtacatggagacatatatgggtcctgctctttttgcaatcacaatcgaagcaatgaaaagtgacattgatgaggtggctttacaagggatagaattctggtccaatgtctgtgatgaggaaatggatttggccattgaagcttcagaggcagcagaacaaggacggccccctgagcacaccagcaagttttatgcgaagggagcactacagtatctggttccaatcctcacacagacactaactaaacaggacgaaaatgatgatgacgatgactggaacccctgcaaagcagcaggggtgtgcctcatgcttctggccacctgctgtgaagatgacattgtcccacatgtcctccccttcattaaagaacacatcaagaacccagattggcggtaccgggatgcagcagtgatggcttttggttgtatcttggaaggaccagagcccagtcagctcaaaccactagttatacaggctatgcccaccctaatagaattaatgaaagaccccagtgtagttgttcgagatacagctgcatggactgtaggcagaatttgtgagctgcttcctgaagctgccatcaatgatgtctacttggctcccctgctacagtgtctgattgagggtctcagtgctgaacccagagtggcttcaaatgtgtgctgggctttctccagtctggctgaagctgcttatgaagctgcagacgttgctgatgatcaggaagaaccagctacttactgcttatcttcttcatttgaactcatagttcagaagctcctagagactacagacagacctgatggacaccagaacaacctgaggagttctgcatatgaatctctgatggaaattgtgaaaaacagtgccaaggattgttatcctgctgtccagaaaacgactttggtcatcatggaacgactgcaacaggttcttcagatggagtcacatatccagagcacatccgatagaatccagttcaatgaccttcagtctttactctgtgcaactcttcagaatgttcttcggaaagtgcaacatcaagatgctttgcagatctctgatgtggttatggcctccctgttaaggatgttccaaagcacagctgggtctgggggagtacaagaggatgccctgatggcagttagcacactggtggaagtgttgggtggtgaattcctcaagtacatggaggcctttaaacccttcctgggcattggattaaaaaattatgctgaataccaggtttgtttggcagctgtgggcttagtgggagacttgtgccgtgccctgcaatccaacatcatacctttctgtgacgaggtgatgcagctgcttctggaaaatttggggaatgagaacgtccacaggtctgtgaagccgcagattctgtcagtgtttggtgatattgcccttgctattggaggagagtttaaaaaatacttagaggttgtattgaatactcttcagcaggcctcccaagcccaggtggacaagtcagactatgacatggtggattatctgaatgagctaagggaaagctgcttggaagcctatactggaatcgtccagggattaaagggggatcaggagaacgtacacccggatgtgatgctggtacaacccagagtagaatttattctgtctttcattgaccacattgctggagatgaggatcacacagatggagtagtagcttgtgctgctggactaataggggacttatgtacagcatttgggaaggatgtactgaaattagtagaagctaggccaatgatccatgaattgttaactgaagggcggagatcgaagactaacaaagcaaaaacccttgctacatgggcaacaaaagaactgaggaaactgaagaaccaagcttgatctgttaccattgggatgataacctgaggacccccactggaaatctcccatcttttgaaaaacctggaagtgaggagtgtgcacggatgctgaatgtttgggaatgagaggatgagtgagtgaggcttgaaaacacaccacattgaaaatcctgccacagcagcagccgcagccgccaacagcagcgctgttagtgagctaagtaagcactgacttcgtagaaaaccataacatcggccatcttggaaaagagaaaaacaatggagttacttatttaaaaaaaaagaaagaaagttatctcttcccaggagaggctagaagtagcttttctgtcttttggccagtgccgagtggaatgcctggtttgggggaggaggagggactgggttcagctgtggtgctttgttgtaaaaggcagcctggcctttgctactgaggagaaagatggagcctgggtctcaagcccaccttcgctgtacctttgccacatggtactgtatgcttgccagctagaaggagggtcagggattttttacagtctgagaatgagtgtgtgtgagtgaggcggtatccacattctcaacttcaagtcattgcagtttctttttcccagaaaacaaggggttagatgttgcatttcataaaactaaccgaagttctgtctactgatgcagcacaagagatgtaaaaaaaaaaaaaaaaaaaaaaaaaaaaaaaacacacacacagaggaaagacgctctttaggttttgttttgttttttttttttggttttgttttttgttttttttactctagggaaaacactgacgaatggtcagagctcctatcctgatcttttcatcaaggcgcctttcctaataatatggttcaactgtgaatgtagaagtgggggggaggggggagaaaaagaaaactctggcgttagaggatatagaaaaatataagtacaattgttacaaataacgcagacttcaaaaacaaaaaaatcacaacccaaacaaaccaaaatttaaatgatcagaattggcagcacaaagaaaacgccctctcctgacttgtattgtggcagtctgaacgcccccagaaaattgtgccaaagagtttagaaaaataaatatacaataaaagtaaacacatacacacaaaacagcaaacttcaggtaactattttggattgcaaacaggataattaaatgttcaaacaatctgataaaataaccatttggaaactgcttggccttctgttcttttatttgattgactacaatgcggtattggtctcttgctgcacttcaaaagcaaccaacaaaacaaaaacaaaaaaaagtgtgtgtgtgtgaatacacacacacactaactagaagtcttgtgatgaaaatggcacttggaaaaggttttatttttccactgaagttgaaggttaataaaatggtgtcaaacgtcccctggtcacacacttgaatatttttttagaagtgtgatgtggtatgattaccataaatcagacttaattattttcccttttacaagggaacagggcatcctgaattttagagcctttcagcaataagaagggatgttggtgagctttgatcctcttttggttttgcagttgttaggagtttttgctggcattttgaatatgctgctttcagaaaaaccaaggaagttttaaaattgcttcctggtccttagaggactaaaaacaagaccctcattcccactttcatttccactctagcaaaaactgggcttgcgtttttctccaactcctcgtttatatcctcccttccatgtccaagccttccattcctaagtgggattggctcagttttgcccatccatatggcagcatctctaatagctcttgtacagggtatcagatattgtgccttttggtgccaggttcaaagtcaagtgccgatctatgaaccagtgtacaaaaaaaaaaaaatccaggtatttgaaggagagacgctccattgtgaataaagagctcataccagctcctaagccctattaagaagaggcctggtcctctaatgccttgtttccatttcagttgttctttgagagacagaatgatgtactaaccattcgtgattattaagatagggttgggtcagggcttagggagggggcagaaatattggggatagaaaaaaaatctgatcattcctcagtgctacccatttctgtcctgtgtgggctgcttagctagacagcaggagaataaagtacaccgagaaccataatgaaaaaaccttccgtgtgttttgtcatgttttgttccagggaagcagttgatgagtgctgttactaatgctttctcccagatccattcagtggtggagaggaggaaaatgggctggttggatgtggtcttggtgccttgcagttactctgcactggttatgcatttaattctcctcttttctagttaaccttttgccagtgggttttccatagtctgggtatttgtccttatatcagttataccacctaaggcaactgggtgcaaaatgcattctgttcactcactgtctgggccttccccaccctagtcttggcacattccttcaagaatgtagttaccgtctgcttgggaagatgtcagtgcaaatgtgaagataatgggcatcggactaggctttggtttgccacaagtggcagctgcctgtatcaattacatttattaattttgcttttcatttttcccagttctcctcaccccccctttgttgaaatgttggacttgctgtcagaggcaactgtaatattgccttagggacttgtggagaaggggaattgctcagtgtagtgttttaactttcagaaccaagcaatctatttactcttacaaatatttaagaagtgtgttagtccaactttaagaaaaatccaaactcatcagcttttgatagcatcttggtttttgaaacaacttcaatctgtaattggcattcagaatgcccttggcatgccagtctgtgatggcatttaagacctgtaaaacacttgagcccaactcgattaaccaaaaccgataaccaccacctttatcttctaaataaagtccgctttattttta

SEQ ID NO: 101695 - DNA, 3288 bp, Homo sapiens
  misc_feature (3271)..(3271): n is a, c, g, or t
ctccctcgctccctccctgcgcgccgcctctcactcacagcctcccttccttctttctccctccgcctcccgagcaccagcgcgctctgagctgcccccagggtccctcccccgccgccagcagcccatttggagggaggaagtaagggaagaggagaggaaggggagccggaccgactacccagacagagccggtgaatgggtttgtggtgacccccgccccccaccccaccctcccttcccacccgacccccaacccccatccccagttcgagccgccgcccgaaaggccgggccgtcgtcttaggaggagtcgccgccgccgccacctccgccatggagctgatcaccattctcgagaagaccgtgtctcccgatcggctggagctggaagcggcgcagaagttcctggagcgtgcggccgtggagaacctgcccactttccttgtggaactgtccagagtgctggcaaatccaggaaacagtcaggttgccagagttgcagctggtctacaaatcaagaactctttgacatctaaagatccagatatcaaggcacaatatcagcagaggtggcttgctattgatgctaatgctcgacgagaagtcaagaactatgttttgcagacattgggtacagaaacttaccggcctagttctgcctcacagtgtgtggctggtattgcttgtgcagagatcccagtaaaccagtggccagaactcattcctcagctggtggccaatgtcacaaaccccaacagcacagagcacatgaaggagtcgacattggaagccatcggttatatttgccaagatatagacccagagcagctacaagataaatccaatgagattctgactgccataatccaggggatgaggaaagaagagcctagtaataatgtgaagctagctgctacgaatgcactcctgaactcattggagttcaccaaagcaaactttgataaagagtctgaaaggcactttattatgcaggtggtctgtgaagccacacagtgtccagatacgagggtacgagtggctgctttacagaatctggtgaagataatgtccttatattatcagtacatggagacatatatgggtcctgctctttttgcaatcacaatcgaagcaatgaaaagtgacattgatgaggtggctttacaagggatagaattctggtccaatgtctgtgatgaggaaatggatttggccattgaagcttcagaggcagcagaacaaggacggccccctgagcacaccagcaagttttatgcgaagggagcactacagtatctggttccaatcctcacacagacactaactaaacaggacgaaaatgatgatgacgatgactggaacccctgcaaagcagcaggggtgtgcctcatgcttctggccacctgctgtgaagatgacattgtcccacatgtcctccccttcattaaagaacacatcaagaacccagattggcggtaccgggatgcagcagtgatggcttttggttgtatcttggaaggaccagagcccagtcagctcaaaccactagttatacaggctatgcccaccctaatagaattaatgaaagaccccagtgtagttgttcgagatacagctgcatggactgtaggcagaatttgtgagctgcttcctgaagctgccatcaatgatgtctacttggctcccctgctacagtgtctgattgagggtctcagtgctgaacccagagtggcttcaaatgtgtgctgggctttctccagtctggctgaagctgcttatgaagctgcagacgttgctgatgatcaggaagaaccagctacttactgcttatcttcttcatttgaactcatagttcagaagctcctagagactacagacagacctgatggacaccagaacaacctgaggagttctgcatatgaatctctgatggaaattgtgaaaaacagtgccaaggattgttatcctgctgtccagaaaacgactttggtcatcatggaacgactgcaacaggttcttcagatggagtcacatatccagagcacatccgatagaatccagttcaatgaccttcagtctttactctgtgcaactcttcagaatgttcttcggaaagtgcaacatcaagatgctttgcagatctctgatgtggttatggcctccctgttaaggatgttccaaagcacagctgggtctgggggagtacaagaggatgccctgatggcagttagcacactggtggaagtgttgggtggtgaattcctcaagtacatggaggcctttaaacccttcctgggcattggattaaaaaattatgctgaataccaggtttgtttggcagctgtgggcttagtgggagacttgtgccgtgccctgcaatccaacatcatacctttctgtgacgaggtgatgcagctgcttctggaaaatttggggaatgagaacgtccacaggtctgtgaagccgcagattctgtcagtgtttggtgatattgcccttgctattggaggagagtttaaaaaatacttagaggttgtattgaatactcttcagcaggcctcccaagcccaggtggacaagtcagactatgacatggtggattatctgaatgagctaagggaaagctgcttggaagcctatactggaatcgtccagggattaaagggggatcaggagaacgtacacccggatgtgatgctggtacaacccagagtagaatttattctgtctttcattgaccacattgctggagatgaggatcacacagatggagtagtagcttgtgctgctggactaataggggacttatgtacagcatttgggaaggatgtactgaaattagtagaagctaggccaatgatccatgaattgttaactgaagggcggagatcgaagactaacaaagcaaaaacccttgctacatgggcaacaaaagaactgaggaaactgaagaaccaagcttgatctgttaccattgggatgataacctgaggacccccactggaaatctcccatcttttgaaaaacctggaagtgaggagtgtgcacggatgctgaatgtttgggaatgagaggatgagtgagtgaggcttgaaaacacaccacattgaaaatcctgccacagcagcagccgcagccgccaacagcagcgctgttagtgagctaagtaagcactgacttcgtagaaaaccataacatcggccatcttggaaaagagaaaaacaatggagttacttatttaaaaaaaaagaagtcgacgcggccgcgnatttagtagtagtaagc

SEQ ID NO: 101696 - DNA, 6215 bp, Homo sapiens
ctccctcgctccctccctgcgcgccgcctctcactcacagcctcccttccttctttctccctccgcctcccgagcaccagcgcgctctgagctgcccccagggtccctcccccgccgccagcagcccatttggagggaggaagtaagggaagaggagaggaaggggagccggaccgactacccagacagagccggtgaatgggtttgtggtgacccccgccccccaccccaccctcccttcccacccgacccccaacccccatccccagttcgagccgccgcccgaaaggccgggccgtcgtcttaggaggagtcgccgccgccgccacctccgccatggagctgatcaccattctcgagaagaccgtgtctcccgatcggctggagctggaagcggcgcagaagttcctggagcgtgcggccgtggagaacctgcccactttccttgtggaactgtccagagtgctggcaaatccaggaaacagtcaggttgccagagttgcagctggtctacaaatcaagaactctttgacatctaaagatccagatatcaaggcacaatatcagcagaggtggcttgctattgatgctaatgctcgacgagaagtcaagaactatgttttgcagacattgggtacagaaacttaccggcctagttctgcctcacagtgtgtggctggtattgcttgtgcagagatcccagtaaaccagtggccagaactcattcctcagctggtggccaatgtcacaaaccccaacagcacagagcacatgaaggagtcgacattggaagccatcggttatatttgccaagatatagacccagagcagctacaagataaatccaatgagattctgactgccataatccaggggatgaggaaagaagagcctagtaataatgtgaagctagctgctacgaatgcactcctgaactcattggagttcaccaaagcaaactttgataaagagtctgaaaggcactttattatgcaggtggtctgtgaagccacacagtgtccagatacgagggtacgagtggctgctttacagaatctggtgaagataatgtccttatattatcagtacatggagacatatatgggtcctgctctttttgcaatcacaatcgaagcaatgaaaagtgacattgatgaggtggctttacaagggatagaattctggtccaatgtctgtgatgaggaaatggatttggccattgaagcttcagaggcagcagaacaaggacggccccctgagcacaccagcaagttttatgcgaagggagcactacagtatctggttccaatcctcacacagacactaactaaacaggacgaaaatgatgatgacgatgactggaacccctgcaaagcagcaggggtgtgcctcatgcttctggccacctgctgtgaagatgacattgtcccacatgtcctccccttcattaaagaacacatcaagaacccagattggcggtaccgggatgcagcagtgatggcttttggttgtatcttggaaggaccagagcccagtcagctcaaaccactagttatacaggctatgcccaccctaatagaattaatgaaagaccccagtgtagttgttcgagatacagctgcatggactgtaggcagaatttgtgagctgcttcctgaagctgccatcaatgatgtctacttggctcccctgctacagtgtctgattgagggtctcagtgctgaacccagagtggcttcaaatgtgtgctgggctttctccagtctggctgaagctgcttatgaagctgcagacgttgctgatgatcaggaagaaccagctacttactgcttatcttcttcatttgaactcatagttcagaagctcctagagactacagacagtagagacagggtttcaccatgttggacaggatggtctcgatctcctgaccctcgtgatccacctgccttcgccccccaaagtgccaggattacaggcatgagccaccatgcccggccaactaccatatttttatataggatgaagaacttgggacctgatggacaccagaacaacctgaggagttctgcatatgaatctctgatggaaattgtgaaaaacagtgccaaggattgttatcctgctgtccagaaaacgactttggtcatcatggaacgactgcaacaggttcttcagatggagtcacatatccagagcacatccgatagaatccagttcaatgaccttcagtctttactctgtgcaactcttcagaatgttcttcggaaagtgcaacatcaagatgctttgcagatctctgatgtggttatggcctccctgttaaggatgttccaaagcacagctgggtctgggggagtacaagaggatgccctgatggcagttagcacactggtggaagtgttgggtggtgaattcctcaagtacatggaggcctttaaacccttcctgggcattggattaaaaaattatgctgaataccaggtttgtttggcagctgtgggcttagtgggagacttgtgccgtgccctgcaatccaacatcatacctttctgtgacgaggtgatgcagctgcttctggaaaatttggggaatgagaacgtccacaggtctgtgaagccgcagattctgtcagtgtttggtgatattgcccttgctattggaggagagtttaaaaaatacttagaggttgtattgaatactcttcagcaggcctcccaagcccaggtggacaagtcagactatgacatggtggattatctgaatgagctaagggaaagctgcttggaagcctatactggaatcgtccagggattaaagggggatcaggagaacgtacacccggatgtgatgctggtacaacccagagtagaatttattctgtctttcattgaccacattgctggagatgaggatcacacagatggagtagtagcttgtgctgctggactaataggggacttatgtacagcatttgggaaggatgtactgaaattagtagaagctaggccaatgatccatgaattgttaactgaagggcggagatcgaagactaacaaagcaaaaacccttgctacatgggcaacaaaagaactgaggaaactgaagaaccaagcttgatctgttaccattgggatgataacctgaggacccccactggaaatctcccatcttttgaaaaacctggaagtgaggagtgtgcacggatgctgaatgtttgggaatgagaggatgagtgagtgaggcttgaaaacacaccacattgaaaatcctgccacagcagcagccgcagccgccaacagcagcgctgttagtgagctaagtaagcactgacttcgtagaaaaccataacatcggccatcttggaaaagagaaaaacaatggagttacttatttaaaaaaaaagaaagaaagttatctcttcccaggagaggctagaagtagcttttctgtcttttggccagtgccgagtggaatgcctggtttgggggaggaggagggactgggttcagctgtggtgctttgttgtaaaaggcagcctggcctttgctactgaggagaaagatggagcctgggtctcaagcccaccttcgctgtacctttgccacatggtactgtatgcttgccagctagaaggagggtcagggattttttacagtctgagaatgagtgtgtgtgagtgaggcggtatccacattctcaacttcaagtcattgcagtttctttttcccagaaaacaaggggttagatgttgcatttcataaaactaaccgaagttctgtctactgatgcagcacaagagatgtaaaaaaaaaaaaaaaaaaaaaaaaaaaaaaaacacacacacagaggaaagacgctctttaggttttgttttgttttttttttttggttttgttttttgttttttttactctagggaaaacactgacgaatggtcagagctcctatcctgatcttttcatcaaggcgcctttcctaataatatggttcaactgtgaatgtagaagtgggggggaggggggagaaaaagaaaactctggcgttagaggatatagaaaaatataagtacaattgttacaaataacgcagacttcaaaaacaaaaaaatcacaacccaaacaaaccaaaatttaaatgatcagaattggcagcacaaagaaaacgccctctcctgacttgtattgtggcagtctgaacgcccccagaaaattgtgccaaagagtttagaaaaataaatatacaataaaagtaaacacatacacacaaaacagcaaacttcaggtaactattttggattgcaaacaggataattaaatgttcaaacaatctgataaaataaccatttggaaactgcttggccttctgttcttttatttgattgactacaatgcggtattggtctcttgctgcacttcaaaagcaaccaacaaaacaaaaacaaaaaaaagtgtgtgtgtgtgaatacacacacacactaactagaagtcttgtgatgaaaatggcacttggaaaaggttttatttttccactgaagttgaaggttaataaaatggtgtcaaacgtcccctggtcacacacttgaatatttttttagaagtgtgatgtggtatgattaccataaatcagacttaattattttcccttttacaagggaacagggcatcctgaattttagagcctttcagcaataagaagggatgttggtgagctttgatcctcttttggttttgcagttgttaggagtttttgctggcattttgaatatgctgctttcagaaaaaccaaggaagttttaaaattgcttcctggtccttagaggactaaaaacaagaccctcattcccactttcatttccactctagcaaaaactgggcttgcgtttttctccaactcctcgtttatatcctcccttccatgtccaagccttccattcctaagtgggattggctcagttttgcccatccatatggcagcatctctaatagctcttgtacagggtatcagatattgtgccttttggtgccaggttcaaagtcaagtgccgatctatgaaccagtgtacaaaaaaaaaaaaatccaggtatttgaaggagagacgctccattgtgaataaagagctcataccagctcctaagccctattaagaagaggcctggtcctctaatgccttgtttccatttcagttgttctttgagagacagaatgatgtactaaccattcgtgattattaagatagggttgggtcagggcttagggagggggcagaaatattggggatagaaaaaaaatctgatcattcctcagtgctacccatttctgtcctgtgtgggctgcttagctagacagcaggagaataaagtacaccgagaaccataatgaaaaaaccttccgtgtgttttgtcatgttttgttccagggaagcagttgatgagtgctgttactaatgctttctcccagatccattcagtggtggagaggaggaaaatgggctggttggatgtggtcttggtgccttgcagttactctgcactggttatgcatttaattctcctcttttctagttaaccttttgccagtgggttttccatagtctgggtatttgtccttatatcagttataccacctaaggcaactgggtgcaaaatgcattctgttcactcactgtctgggccttccccaccctagtcttggcacattccttcaagaatgtagttaccgtctgcttgggaagatgtcagtgcaaatgtgaagataatgggcatcggactaggctttggtttgccacaagtggcagctgcctgtatcaattacatttattaattttgcttttcatttttcccagttctcctcaccccccctttgttgaaatgttggacttgctgtcagaggcaactgtaatattgccttagggacttgtggagaaggggaattgctcagtgtagtgttttaactttcagaaccaagcaatctatttactcttacaaatatttaagaagtgtgttagtccaactttaagaaaaatccaaactcatcagcttttgatagcatcttggtttttgaaacaacttcaatctgtaattggcattcagaatgcccttggcatgccagtctgtgatggcatttaagacctgtaaaacacttgagcccaactcgattaaccaaaaccgataaccaccacctttatcttctaaataaagtccgctttattttta

SEQ ID NO: 101697 - DNA, 5849 bp, Homo sapiens
ctccctcgctccctccctgcgcgccgcctctcactcacagcctcccttccttctttctccctccgcctcccgagcaccagcgcgctctgagctgcccccagggtccctcccccgccgccagcagcccatttggagggaggaagtaagggaagaggagaggaaggggagccggaccgactacccagacagagccggtgaatgggtttgtggtgacccccgccccccaccccaccctcccttcccacccgacccccaacccccatccccagttcgagccgccgcccgaaaggccgggccgtcgtcttaggaggagtcgccgccgccgccacctccgccatggagctgatcaccattctcgagaagaccgtgtctcccgatcggctggagctggaagcggcgcagaagttcctggagcgtgcggccgtggagaacctgcccactttccttgtggaactgtccagagtgctggcaaatccaggaaacagtcaggttgccagagttgcagctggtctacaaatcaagaactctttgacatctaaagatccagatatcaaggcacaatatcagcagaggtggcttgctattgatgctaatgctcgacgagaagtcaagaactatgttttgcagacattgggtacagaaacttaccggcctagttctgcctcacagtgtgtggctggtattgcttgtgcagagatcccagtaaaccagtggccagaactcattcctcagctggtggccaatgtcacaaaccccaacagcacagagcacatgaaggagtcgacattggaagccatcggttatatttgccaagatatagacccagagcagctacaagataaatccaatgagattctgactgccataatccaggggatgaggaaagaagagcctagtaataatgtgaagctagctgctacgaatgcactcctgaactcattggagttcaccaaagcaaactttgataaagagtctgaaaggcactttattatgcaggtggtctgtgaagccacacagtgtccagatacgagggtacgagtggctgctttacagaatctggtgaagataatgtccttatattatcagtacatggagacatatatgggtcctgctctttttgcagacgaaaatgatgatgacgatgactggaacccctgcaaagcagcaggggtgtgcctcatgcttctggccacctgctgtgaagatgacattgtcccacatgtcctccccttcattaaagaacacatcaagaacccagattggcggtaccgggatgcagcagtgatggcttttggttgtatcttggaaggaccagagcccagtcagctcaaaccactagttatacaggctatgcccaccctaatagaattaatgaaagaccccagtgtagttgttcgagatacagctgcatggactgtaggcagaatttgtgagctgcttcctgaagctgccatcaatgatgtctacttggctcccctgctacagtgtctgattgagggtctcagtgctgaacccagagtggcttcaaatgtgtgctgggctttctccagtctggctgaagctgcttatgaagctgcagacgttgctgatgatcaggaagaaccagctacttactgcttatcttcttcatttgaactcatagttcagaagctcctagagactacagacagacctgatggacaccagaacaacctgaggagttctgcatatgaatctctgatggaaattgtgaaaaacagtgccaaggattgttatcctgctgtccagaaaacgactttggtcatcatggaacgactgcaacaggttcttcagatggagtcacatatccagagcacatccgatagaatccagttcaatgaccttcagtctttactctgtgcaactcttcagaatgttcttcggaaagtgcaacatcaagatgctttgcagatctctgatgtggttatggcctccctgttaaggatgttccaaagcacagctgggtctgggggagtacaagaggatgccctgatggcagttagcacactggtggaagtgttgggtggtgaattcctcaagtacatggaggcctttaaacccttcctgggcattggattaaaaaattatgctgaataccaggtttgtttggcagctgtgggcttagtgggagacttgtgccgtgccctgcaatccaacatcatacctttctgtgacgaggtgatgcagctgcttctggaaaatttggggaatgagaacgtccacaggtctgtgaagccgcagattctgtcagtgtttggtgatattgcccttgctattggaggagagtttaaaaaatacttagaggttgtattgaatactcttcagcaggcctcccaagcccaggtggacaagtcagactatgacatggtggattatctgaatgagctaagggaaagctgcttggaagcctatactggaatcgtccagggattaaagggggatcaggagaacgtacacccggatgtgatgctggtacaacccagagtagaatttattctgtctttcattgaccacattgctggagatgaggatcacacagatggagtagtagcttgtgctgctggactaataggggacttatgtacagcatttgggaaggatgtactgaaattagtagaagctaggccaatgatccatgaattgttaactgaagggcggagatcgaagactaacaaagcaaaaacccttgctacatgggcaacaaaagaactgaggaaactgaagaaccaagcttgatctgttaccattgggatgataacctgaggacccccactggaaatctcccatcttttgaaaaacctggaagtgaggagtgtgcacggatgctgaatgtttgggaatgagaggatgagtgagtgaggcttgaaaacacaccacattgaaaatcctgccacagcagcagccgcagccgccaacagcagcgctgttagtgagctaagtaagcactgacttcgtagaaaaccataacatcggccatcttggaaaagagaaaaacaatggagttacttatttaaaaaaaaagaaagaaagttatctcttcccaggagaggctagaagtagcttttctgtcttttggccagtgccgagtggaatgcctggtttgggggaggaggagggactgggttcagctgtggtgctttgttgtaaaaggcagcctggcctttgctactgaggagaaagatggagcctgggtctcaagcccaccttcgctgtacctttgccacatggtactgtatgcttgccagctagaaggagggtcagggattttttacagtctgagaatgagtgtgtgtgagtgaggcggtatccacattctcaacttcaagtcattgcagtttctttttcccagaaaacaaggggttagatgttgcatttcataaaactaaccgaagttctgtctactgatgcagcacaagagatgtaaaaaaaaaaaaaaaaaaaaaaaaaaaaaaaacacacacacagaggaaagacgctctttaggttttgttttgttttttttttttggttttgttttttgttttttttactctagggaaaacactgacgaatggtcagagctcctatcctgatcttttcatcaaggcgcctttcctaataatatggttcaactgtgaatgtagaagtgggggggaggggggagaaaaagaaaactctggcgttagaggatatagaaaaatataagtacaattgttacaaataacgcagacttcaaaaacaaaaaaatcacaacccaaacaaaccaaaatttaaatgatcagaattggcagcacaaagaaaacgccctctcctgacttgtattgtggcagtctgaacgcccccagaaaattgtgccaaagagtttagaaaaataaatatacaataaaagtaaacacatacacacaaaacagcaaacttcaggtaactattttggattgcaaacaggataattaaatgttcaaacaatctgataaaataaccatttggaaactgcttggccttctgttcttttatttgattgactacaatgcggtattggtctcttgctgcacttcaaaagcaaccaacaaaacaaaaacaaaaaaaagtgtgtgtgtgtgaatacacacacacactaactagaagtcttgtgatgaaaatggcacttggaaaaggttttatttttccactgaagttgaaggttaataaaatggtgtcaaacgtcccctggtcacacacttgaatatttttttagaagtgtgatgtggtatgattaccataaatcagacttaattattttcccttttacaagggaacagggcatcctgaattttagagcctttcagcaataagaagggatgttggtgagctttgatcctcttttggttttgcagttgttaggagtttttgctggcattttgaatatgctgctttcagaaaaaccaaggaagttttaaaattgcttcctggtccttagaggactaaaaacaagaccctcattcccactttcatttccactctagcaaaaactgggcttgcgtttttctccaactcctcgtttatatcctcccttccatgtccaagccttccattcctaagtgggattggctcagttttgcccatccatatggcagcatctctaatagctcttgtacagggtatcagatattgtgccttttggtgccaggttcaaagtcaagtgccgatctatgaaccagtgtacaaaaaaaaaaaaatccaggtatttgaaggagagacgctccattgtgaataaagagctcataccagctcctaagccctattaagaagaggcctggtcctctaatgccttgtttccatttcagttgttctttgagagacagaatgatgtactaaccattcgtgattattaagatagggttgggtcagggcttagggagggggcagaaatattggggatagaaaaaaaatctgatcattcctcagtgctacccatttctgtcctgtgtgggctgcttagctagacagcaggagaataaagtacaccgagaaccataatgaaaaaaccttccgtgtgttttgtcatgttttgttccagggaagcagttgatgagtgctgttactaatgctttctcccagatccattcagtggtggagaggaggaaaatgggctggttggatgtggtcttggtgccttgcagttactctgcactggttatgcatttaattctcctcttttctagttaaccttttgccagtgggttttccatagtctgggtatttgtccttatatcagttataccacctaaggcaactgggtgcaaaatgcattctgttcactcactgtctgggccttccccaccctagtcttggcacattccttcaagaatgtagttaccgtctgcttgggaagatgtcagtgcaaatgtgaagataatgggcatcggactaggctttggtttgccacaagtggcagctgcctgtatcaattacatttattaattttgcttttcatttttcccagttctcctcaccccccctttgttgaaatgttggacttgctgtcagaggcaactgtaatattgccttagggacttgtggagaaggggaattgctcagtgtagtgttttaactttcagaaccaagcaatctatttactcttacaaatatttaagaagtgtgttagtccaactttaagaaaaatccaaactcatcagcttttgatagcatcttggtttttgaaacaacttcaatctgtaattggcattcagaatgcccttggcatgccagtctgtgatggcatttaagacctgtaaaacacttgagcccaactcgattaaccaaaaccgataaccaccacctttatcttctaaataaagtccgctttattttta

SEQ ID NO: 101698 - DNA, 5759 bp, Homo sapiens
ctccctcgctccctccctgcgcgccgcctctcactcacagcctcccttccttctttctccctccgcctcccgagcaccagcgcgctctgagctgcccccagggtccctcccccgccgccagcagcccatttggagggaggaagtaagggaagaggagaggaaggggagccggaccgactacccagacagagccggtgaatgggtttgtggtgacccccgccccccaccccaccctcccttcccacccgacccccaacccccatccccagttcgagccgccgcccgaaaggccgggccgtcgtcttaggaggagtcgccgccgccgccacctccgccatggagctgatcaccattctcgagaagaccgtgtctcccgatcggctggagctggaagcggcgcagaagttcctggagcgtgcggccgtggagaacctgcccactttccttgtggaactgtccagagtgctggcaaatccaggaaacagtcaggttgccagagttgcagctggtctacaaatcaagaactctttgacatctaaagatccagatatcaaggcacaatatcagcagaggtggcttgctattgatgctaatgctcgacgagaagtcaagaactatgttttgcagacattgggtacagaaacttaccggcctagttctgcctcacagtgtgtggctggtattgcttgtgcagagatcccagtaaaccagtggccagaactcattcctcagctggtggccaatgtcacaaaccccaacagcacagagcacatgaaggagtcgacattggaagccatcggttatatttgccaagatatagacccagagcagctacaagataaatccaatgagattctgactgccataatccaggggatgaggaaagaagagcctagtaataatgtgaagctagctgctacgaatgcactcctgaactcattggagttcaccaaagcaaactttgataaagagtctgaaaggcactttattatgcaggtggtctgtgaagccacacagtgtccagatacgagggacgaaaatgatgatgacgatgactggaacccctgcaaagcagcaggggtgtgcctcatgcttctggccacctgctgtgaagatgacattgtcccacatgtcctccccttcattaaagaacacatcaagaacccagattggcggtaccgggatgcagcagtgatggcttttggttgtatcttggaaggaccagagcccagtcagctcaaaccactagttatacaggctatgcccaccctaatagaattaatgaaagaccccagtgtagttgttcgagatacagctgcatggactgtaggcagaatttgtgagctgcttcctgaagctgccatcaatgatgtctacttggctcccctgctacagtgtctgattgagggtctcagtgctgaacccagagtggcttcaaatgtgtgctgggctttctccagtctggctgaagctgcttatgaagctgcagacgttgctgatgatcaggaagaaccagctacttactgcttatcttcttcatttgaactcatagttcagaagctcctagagactacagacagacctgatggacaccagaacaacctgaggagttctgcatatgaatctctgatggaaattgtgaaaaacagtgccaaggattgttatcctgctgtccagaaaacgactttggtcatcatggaacgactgcaacaggttcttcagatggagtcacatatccagagcacatccgatagaatccagttcaatgaccttcagtctttactctgtgcaactcttcagaatgttcttcggaaagtgcaacatcaagatgctttgcagatctctgatgtggttatggcctccctgttaaggatgttccaaagcacagctgggtctgggggagtacaagaggatgccctgatggcagttagcacactggtggaagtgttgggtggtgaattcctcaagtacatggaggcctttaaacccttcctgggcattggattaaaaaattatgctgaataccaggtttgtttggcagctgtgggcttagtgggagacttgtgccgtgccctgcaatccaacatcatacctttctgtgacgaggtgatgcagctgcttctggaaaatttggggaatgagaacgtccacaggtctgtgaagccgcagattctgtcagtgtttggtgatattgcccttgctattggaggagagtttaaaaaatacttagaggttgtattgaatactcttcagcaggcctcccaagcccaggtggacaagtcagactatgacatggtggattatctgaatgagctaagggaaagctgcttggaagcctatactggaatcgtccagggattaaagggggatcaggagaacgtacacccggatgtgatgctggtacaacccagagtagaatttattctgtctttcattgaccacattgctggagatgaggatcacacagatggagtagtagcttgtgctgctggactaataggggacttatgtacagcatttgggaaggatgtactgaaattagtagaagctaggccaatgatccatgaattgttaactgaagggcggagatcgaagactaacaaagcaaaaacccttgctacatgggcaacaaaagaactgaggaaactgaagaaccaagcttgatctgttaccattgggatgataacctgaggacccccactggaaatctcccatcttttgaaaaacctggaagtgaggagtgtgcacggatgctgaatgtttgggaatgagaggatgagtgagtgaggcttgaaaacacaccacattgaaaatcctgccacagcagcagccgcagccgccaacagcagcgctgttagtgagctaagtaagcactgacttcgtagaaaaccataacatcggccatcttggaaaagagaaaaacaatggagttacttatttaaaaaaaaagaaagaaagttatctcttcccaggagaggctagaagtagcttttctgtcttttggccagtgccgagtggaatgcctggtttgggggaggaggagggactgggttcagctgtggtgctttgttgtaaaaggcagcctggcctttgctactgaggagaaagatggagcctgggtctcaagcccaccttcgctgtacctttgccacatggtactgtatgcttgccagctagaaggagggtcagggattttttacagtctgagaatgagtgtgtgtgagtgaggcggtatccacattctcaacttcaagtcattgcagtttctttttcccagaaaacaaggggttagatgttgcatttcataaaactaaccgaagttctgtctactgatgcagcacaagagatgtaaaaaaaaaaaaaaaaaaaaaaaaaaaaaaaacacacacacagaggaaagacgctctttaggttttgttttgttttttttttttggttttgttttttgttttttttactctagggaaaacactgacgaatggtcagagctcctatcctgatcttttcatcaaggcgcctttcctaataatatggttcaactgtgaatgtagaagtgggggggaggggggagaaaaagaaaactctggcgttagaggatatagaaaaatataagtacaattgttacaaataacgcagacttcaaaaacaaaaaaatcacaacccaaacaaaccaaaatttaaatgatcagaattggcagcacaaagaaaacgccctctcctgacttgtattgtggcagtctgaacgcccccagaaaattgtgccaaagagtttagaaaaataaatatacaataaaagtaaacacatacacacaaaacagcaaacttcaggtaactattttggattgcaaacaggataattaaatgttcaaacaatctgataaaataaccatttggaaactgcttggccttctgttcttttatttgattgactacaatgcggtattggtctcttgctgcacttcaaaagcaaccaacaaaacaaaaacaaaaaaaagtgtgtgtgtgtgaatacacacacacactaactagaagtcttgtgatgaaaatggcacttggaaaaggttttatttttccactgaagttgaaggttaataaaatggtgtcaaacgtcccctggtcacacacttgaatatttttttagaagtgtgatgtggtatgattaccataaatcagacttaattattttcccttttacaagggaacagggcatcctgaattttagagcctttcagcaataagaagggatgttggtgagctttgatcctcttttggttttgcagttgttaggagtttttgctggcattttgaatatgctgctttcagaaaaaccaaggaagttttaaaattgcttcctggtccttagaggactaaaaacaagaccctcattcccactttcatttccactctagcaaaaactgggcttgcgtttttctccaactcctcgtttatatcctcccttccatgtccaagccttccattcctaagtgggattggctcagttttgcccatccatatggcagcatctctaatagctcttgtacagggtatcagatattgtgccttttggtgccaggttcaaagtcaagtgccgatctatgaaccagtgtacaaaaaaaaaaaaatccaggtatttgaaggagagacgctccattgtgaataaagagctcataccagctcctaagccctattaagaagaggcctggtcctctaatgccttgtttccatttcagttgttctttgagagacagaatgatgtactaaccattcgtgattattaagatagggttgggtcagggcttagggagggggcagaaatattggggatagaaaaaaaatctgatcattcctcagtgctacccatttctgtcctgtgtgggctgcttagctagacagcaggagaataaagtacaccgagaaccataatgaaaaaaccttccgtgtgttttgtcatgttttgttccagggaagcagttgatgagtgctgttactaatgctttctcccagatccattcagtggtggagaggaggaaaatgggctggttggatgtggtcttggtgccttgcagttactctgcactggttatgcatttaattctcctcttttctagttaaccttttgccagtgggttttccatagtctgggtatttgtccttatatcagttataccacctaaggcaactgggtgcaaaatgcattctgttcactcactgtctgggccttccccaccctagtcttggcacattccttcaagaatgtagttaccgtctgcttgggaagatgtcagtgcaaatgtgaagataatgggcatcggactaggctttggtttgccacaagtggcagctgcctgtatcaattacatttattaattttgcttttcatttttcccagttctcctcaccccccctttgttgaaatgttggacttgctgtcagaggcaactgtaatattgccttagggacttgtggagaaggggaattgctcagtgtagtgttttaactttcagaaccaagcaatctatttactcttacaaatatttaagaagtgtgttagtccaactttaagaaaaatccaaactcatcagcttttgatagcatcttggtttttgaaacaacttcaatctgtaattggcattcagaatgcccttggcatgccagtctgtgatggcatttaagacctgtaaaacacttgagcccaactcgattaaccaaaaccgataaccaccacctttatcttctaaataaagtccgctttattttta

SEQ ID NO: 101699 - DNA, 4626 bp, Homo sapiens
gctaggtagcgaggctgggtgtatcaagaacccagattggcggtaccgggatgcagcagtgatggcttttggttgtatcttggaaggaccagagcccagtcagctcaaaccactagttatacaggctatgcccaccctaatagaattaatgaaagaccccagtgtagttgttcgagatacagctgcatggactgtaggcagaatttgtgagctgcttcctgaagctgccatcaatgatgtctacttggctcccctgctacagtgtctgattgagggtctcagtgctgaacccagagtggcttcaaatgtgtgctgggctttctccagtctggctgaagctgcttatgaagctgcagacgttgctgatgatcaggaagaaccagctacttactgcttatcttcttcatttgaactcatagttcagaagctcctagagactacagacagacctgatggacaccagaacaacctgaggagttctgcatatgaatctctgatggaaattgtgaaaaacagtgccaaggattgttatcctgctgtccagaaaacgactttggtcatcatggaacgactgcaacaggttcttcagatggagtcacatatccagagcacatccgatagaatccagttcaatgaccttcagtctttactctgtgcaactcttcagaatgttcttcggaaagtgcaacatcaagatgctttgcagatctctgatgtggttatggcctccctgttaaggatgttccaaagcacagctgggtctgggggagtacaagaggatgccctgatggcagttagcacactggtggaagtgttgggtggtgaattcctcaagtacatggaggcctttaaacccttcctgggcattggattaaaaaattatgctgaataccaggtttgtttggcagctgtgggcttagtgggagacttgtgccgtgccctgcaatccaacatcatacctttctgtgacgaggtgatgcagctgcttctggaaaatttggggaatgagaacgtccacaggtctgtgaagccgcagattctgtcagtgtttggtgatattgcccttgctattggaggagagtttaaaaaatacttagaggttgtattgaatactcttcagcaggcctcccaagcccaggtggacaagtcagactatgacatggtggattatctgaatgagctaagggaaagctgcttggaagcctatactggaatcgtccagggattaaagggggatcaggagaacgtacacccggatgtgatgctggtacaacccagagtagaatttattctgtctttcattgaccacattgctggagatgaggatcacacagatggagtagtagcttgtgctgctggactaataggggacttatgtacagcatttgggaaggatgtactgaaattagtagaagctaggccaatgatccatgaattgttaactgaagggcggagatcgaagactaacaaagcaaaaacccttgctacatgggcaacaaaagaactgaggaaactgaagaaccaagcttgatctgttaccattgggatgataacctgaggacccccactggaaatctcccatcttttgaaaaacctggaagtgaggagtgtgcacggatgctgaatgtttgggaatgagaggatgagtgagtgaggcttgaaaacacaccacattgaaaatcctgccacagcagcagccgcagccgccaacagcagcgctgttagtgagctaagtaagcactgacttcgtagaaaaccataacatcggccatcttggaaaagagaaaaacaatggagttacttatttaaaaaaaaagaaagaaagttatctcttcccaggagaggctagaagtagcttttctgtcttttggccagtgccgagtggaatgcctggtttgggggaggaggagggactgggttcagctgtggtgctttgttgtaaaaggcagcctggcctttgctactgaggagaaagatggagcctgggtctcaagcccaccttcgctgtacctttgccacatggtactgtatgcttgccagctagaaggagggtcagggattttttacagtctgagaatgagtgtgtgtgagtgaggcggtatccacattctcaacttcaagtcattgcagtttctttttcccagaaaacaaggggttagatgttgcatttcataaaactaaccgaagttctgtctactgatgcagcacaagagatgtaaaaaaaaaaaaaaaaaaaaaaaaaaaaaaaacacacacacagaggaaagacgctctttaggttttgttttgttttttttttttggttttgttttttgttttttttactctagggaaaacactgacgaatggtcagagctcctatcctgatcttttcatcaaggcgcctttcctaataatatggttcaactgtgaatgtagaagtgggggggaggggggagaaaaagaaaactctggcgttagaggatatagaaaaatataagtacaattgttacaaataacgcagacttcaaaaacaaaaaaatcacaacccaaacaaaccaaaatttaaatgatcagaattggcagcacaaagaaaacgccctctcctgacttgtattgtggcagtctgaacgcccccagaaaattgtgccaaagagtttagaaaaataaatatacaataaaagtaaacacatacacacaaaacagcaaacttcaggtaactattttggattgcaaacaggataattaaatgttcaaacaatctgataaaataaccatttggaaactgcttggccttctgttcttttatttgattgactacaatgcggtattggtctcttgctgcacttcaaaagcaaccaacaaaacaaaaacaaaaaaaagtgtgtgtgtgtgaatacacacacacactaactagaagtcttgtgatgaaaatggcacttggaaaaggttttatttttccactgaagttgaaggttaataaaatggtgtcaaacgtcccctggtcacacacttgaatatttttttagaagtgtgatgtggtatgattaccataaatcagacttaattattttcccttttacaagggaacagggcatcctgaattttagagcctttcagcaataagaagggatgttggtgagctttgatcctcttttggttttgcagttgttaggagtttttgctggcattttgaatatgctgctttcagaaaaaccaaggaagttttaaaattgcttcctggtccttagaggactaaaaacaagaccctcattcccactttcatttccactctagcaaaaactgggcttgcgtttttctccaactcctcgtttatatcctcccttccatgtccaagccttccattcctaagtgggattggctcagttttgcccatccatatggcagcatctctaatagctcttgtacagggtatcagatattgtgccttttggtgccaggttcaaagtcaagtgccgatctatgaaccagtgtacaaaaaaaaaaaaatccaggtatttgaaggagagacgctccattgtgaataaagagctcataccagctcctaagccctattaagaagaggcctggtcctctaatgccttgtttccatttcagttgttctttgagagacagaatgatgtactaaccattcgtgattattaagatagggttgggtcagggcttagggagggggcagaaatattggggatagaaaaaaaatctgatcattcctcagtgctacccatttctgtcctgtgtgggctgcttagctagacagcaggagaataaagtacaccgagaaccataatgaaaaaaccttccgtgtgttttgtcatgttttgttccagggaagcagttgatgagtgctgttactaatgctttctcccagatccattcagtggtggagaggaggaaaatgggctggttggatgtggtcttggtgccttgcagttactctgcactggttatgcatttaattctcctcttttctagttaaccttttgccagtgggttttccatagtctgggtatttgtccttatatcagttataccacctaaggcaactgggtgcaaaatgcattctgttcactcactgtctgggccttccccaccctagtcttggcacattccttcaagaatgtagttaccgtctgcttgggaagatgtcagtgcaaatgtgaagataatgggcatcggactaggctttggtttgccacaagtggcagctgcctgtatcaattacatttattaattttgcttttcatttttcccagttctcctcaccccccctttgttgaaatgttggacttgctgtcagaggcaactgtaatattgccttagggacttgtggagaaggggaattgctcagtgtagtgttttaactttcagaaccaagcaatctatttactcttacaaatatttaagaagtgtgttagtccaactttaagaaaaatccaaactcatcagcttttgatagcatcttggtttttgaaacaacttcaatctgtaattggcattcagaatgcccttggcatgccagtctgtgatggcatttaagacctgtaaaacacttgagcccaactcgattaaccaaaaccgataaccaccacctttatcttctaaataaagtccgctttattttta

SEQ ID NO: 101700 - DNA, 4477 bp, Homo sapiens
gctgaaattgaacagtaccgcctgcagagggagctgcatggactgtaggcagaatttgtgagctgcttcctgaagctgccatcaatgatgtctacttggctcccctgctacagtgtctgattgagggtctcagtgctgaacccagagtggcttcaaatgtgtgctgggctttctccagtctggctgaagctgcttatgaagctgcagacgttgctgatgatcaggaagaaccagctacttactgcttatcttcttcatttgaactcatagttcagaagctcctagagactacagacagacctgatggacaccagaacaacctgaggagttctgcatatgaatctctgatggaaattgtgaaaaacagtgccaaggattgttatcctgctgtccagaaaacgactttggtcatcatggaacgactgcaacaggttcttcagatggagtcacatatccagagcacatccgatagaatccagttcaatgaccttcagtctttactctgtgcaactcttcagaatgttcttcggaaagtgcaacatcaagatgctttgcagatctctgatgtggttatggcctccctgttaaggatgttccaaagcacagctgggtctgggggagtacaagaggatgccctgatggcagttagcacactggtggaagtgttgggtggtgaattcctcaagtacatggaggcctttaaacccttcctgggcattggattaaaaaattatgctgaataccaggtttgtttggcagctgtgggcttagtgggagacttgtgccgtgccctgcaatccaacatcatacctttctgtgacgaggtgatgcagctgcttctggaaaatttggggaatgagaacgtccacaggtctgtgaagccgcagattctgtcagtgtttggtgatattgcccttgctattggaggagagtttaaaaaatacttagaggttgtattgaatactcttcagcaggcctcccaagcccaggtggacaagtcagactatgacatggtggattatctgaatgagctaagggaaagctgcttggaagcctatactggaatcgtccagggattaaagggggatcaggagaacgtacacccggatgtgatgctggtacaacccagagtagaatttattctgtctttcattgaccacattgctggagatgaggatcacacagatggagtagtagcttgtgctgctggactaataggggacttatgtacagcatttgggaaggatgtactgaaattagtagaagctaggccaatgatccatgaattgttaactgaagggcggagatcgaagactaacaaagcaaaaacccttgctacatgggcaacaaaagaactgaggaaactgaagaaccaagcttgatctgttaccattgggatgataacctgaggacccccactggaaatctcccatcttttgaaaaacctggaagtgaggagtgtgcacggatgctgaatgtttgggaatgagaggatgagtgagtgaggcttgaaaacacaccacattgaaaatcctgccacagcagcagccgcagccgccaacagcagcgctgttagtgagctaagtaagcactgacttcgtagaaaaccataacatcggccatcttggaaaagagaaaaacaatggagttacttatttaaaaaaaaagaaagaaagttatctcttcccaggagaggctagaagtagcttttctgtcttttggccagtgccgagtggaatgcctggtttgggggaggaggagggactgggttcagctgtggtgctttgttgtaaaaggcagcctggcctttgctactgaggagaaagatggagcctgggtctcaagcccaccttcgctgtacctttgccacatggtactgtatgcttgccagctagaaggagggtcagggattttttacagtctgagaatgagtgtgtgtgagtgaggcggtatccacattctcaacttcaagtcattgcagtttctttttcccagaaaacaaggggttagatgttgcatttcataaaactaaccgaagttctgtctactgatgcagcacaagagatgtaaaaaaaaaaaaaaaaaaaaaaaaaaaaaaaacacacacacagaggaaagacgctctttaggttttgttttgttttttttttttggttttgttttttgttttttttactctagggaaaacactgacgaatggtcagagctcctatcctgatcttttcatcaaggcgcctttcctaataatatggttcaactgtgaatgtagaagtgggggggaggggggagaaaaagaaaactctggcgttagaggatatagaaaaatataagtacaattgttacaaataacgcagacttcaaaaacaaaaaaatcacaacccaaacaaaccaaaatttaaatgatcagaattggcagcacaaagaaaacgccctctcctgacttgtattgtggcagtctgaacgcccccagaaaattgtgccaaagagtttagaaaaataaatatacaataaaagtaaacacatacacacaaaacagcaaacttcaggtaactattttggattgcaaacaggataattaaatgttcaaacaatctgataaaataaccatttggaaactgcttggccttctgttcttttatttgattgactacaatgcggtattggtctcttgctgcacttcaaaagcaaccaacaaaacaaaaacaaaaaaaagtgtgtgtgtgtgaatacacacacacactaactagaagtcttgtgatgaaaatggcacttggaaaaggttttatttttccactgaagttgaaggttaataaaatggtgtcaaacgtcccctggtcacacacttgaatatttttttagaagtgtgatgtggtatgattaccataaatcagacttaattattttcccttttacaagggaacagggcatcctgaattttagagcctttcagcaataagaagggatgttggtgagctttgatcctcttttggttttgcagttgttaggagtttttgctggcattttgaatatgctgctttcagaaaaaccaaggaagttttaaaattgcttcctggtccttagaggactaaaaacaagaccctcattcccactttcatttccactctagcaaaaactgggcttgcgtttttctccaactcctcgtttatatcctcccttccatgtccaagccttccattcctaagtgggattggctcagttttgcccatccatatggcagcatctctaatagctcttgtacagggtatcagatattgtgccttttggtgccaggttcaaagtcaagtgccgatctatgaaccagtgtacaaaaaaaaaaaaatccaggtatttgaaggagagacgctccattgtgaataaagagctcataccagctcctaagccctattaagaagaggcctggtcctctaatgccttgtttccatttcagttgttctttgagagacagaatgatgtactaaccattcgtgattattaagatagggttgggtcagggcttagggagggggcagaaatattggggatagaaaaaaaatctgatcattcctcagtgctacccatttctgtcctgtgtgggctgcttagctagacagcaggagaataaagtacaccgagaaccataatgaaaaaaccttccgtgtgttttgtcatgttttgttccagggaagcagttgatgagtgctgttactaatgctttctcccagatccattcagtggtggagaggaggaaaatgggctggttggatgtggtcttggtgccttgcagttactctgcactggttatgcatttaattctcctcttttctagttaaccttttgccagtgggttttccatagtctgggtatttgtccttatatcagttataccacctaaggcaactgggtgcaaaatgcattctgttcactcactgtctgggccttccccaccctagtcttggcacattccttcaagaatgtagttaccgtctgcttgggaagatgtcagtgcaaatgtgaagataatgggcatcggactaggctttggtttgccacaagtggcagctgcctgtatcaattacatttattaattttgcttttcatttttcccagttctcctcaccccccctttgttgaaatgttggacttgctgtcagaggcaactgtaatattgccttagggacttgtggagaaggggaattgctcagtgtagtgttttaactttcagaaccaagcaatctatttactcttacaaatatttaagaagtgtgttagtccaactttaagaaaaatccaaactcatcagcttttgatagcatcttggtttttgaaacaacttcaatctgtaattggcattcagaatgcccttggcatgccagtctgtgatggcatttaagacctgtaaaacacttgagcccaactcgattaaccaaaaccgataaccaccacctttatcttctaaataaagtccgctttattttta

SEQ ID NO: 101701 - DNA, 3031 bp, Homo sapiens
ctccctcgctccctccctgcgcgccgcctctcactcacagcctcccttccttctttctccctccgcctcccgagcaccagcgcgctctgagctgcccccagggtccctcccccgccgccagcagcccatttggagggaggaagtaagggaagaggagaggaaggggagccggaccgactacccagacagagccggtgaatgggtttgtggtgacccccgccccccaccccaccctcccttcccacccgacccccaacccccatccccagttcgagccgccgcccgaaaggccgggccgtcgtcttaggaggagtcgccgccgccgccacctccgccatggagctgatcaccattctcgagaagaccgtgtctcccgatcggctggagctggaagcggcgcagaagttcctggagcgtgcggccgtggagaacctgcccactttccttgtggaactgtccagagtgctggcaaatccaggaaacagtcaggttgccagagttgcagctggtctacaaatcaagaactctttgacatctaaagatccagatatcaaggcacaatatcagcagaggtggcttgctattgatgctaatgctcgacgagaagtcaagaactatgttttgcagacattgggtacagaaacttaccggcctagttctgcctcacagtgtgtggctggtattgcttgtgcagagatcccagtaaaccagtggccagaactcattcctcagctggtggccaatgtcacaaaccccaacagcacagagcacatgaaggagtcgacattggaagccatcggttatatttgccaagatatagacccagagcagctacaagataaatccaatgagattctgactgccataatccaggggatgaggaaagaagagcctagtaataatgtgaagctagctgctacgaatgcactcctgaactcattggagttcaccaaagcaaactttgataaagagtctgaaaggcactttattatgcaggtggtctgtgaagccacacagtgtccagatacgagggtacgagtggctgctttacagaatctggtgaagataatgtccttatattatcagtacatggagacatatatgggtcctgctctttttgcaatcacaatcgaagcaatgaaaagtgacattgatgaggtggctttacaagggatagaattctggtccaatgtctgtgatgaggaaatggatttggccattgaagcttcagaggcagcagaacaaggacggccccctgagcacaccagcaagttttatgcgaagggagcactacagtatctggttccaatcctcacacagacactaactaaacaggacgaaaatgatgatgacgatgactggaacccctgcaaagcagcaggggtgtgcctcatgcttctggccacctgctgtgaagatgacattgtcccacatgtcctccccttcattaaagaacacatcaagaacccagattggcggtaccgggatgcagcagtgatggcttttggttgtatcttggaaggaccagagcccagtcagctcaaaccactagttatacaggctatgcccaccctaatagaattaatgaaagaccccagtgtagttgttcgagatacagctgcatggactgtaggcagaatttgtgagctgcttcctgaagctgccatcaatgatgtctacttggctcccctgctacagtgtctgattgagggtctcagtgctgaacccagagtggcttcaaatgtgtgctgggctttctccagtctggctgaagctgcttatgaagctgcagacgttgctgatgatcaggaagaaccagctacttactgcttatcttcttcatttgaactcatagttcagaagctcctagagactacagacagacctgatggacaccagaacaacctgaggagttctgcatatgaatctctgatggaaattgtgaaaaacagtgccaaggattgttatcctgctgtccagaaaacgactttggtcatcatggaacgactgcaacaggttcttcagatggagtcacatatccagagcacatccgatagaatccagttcaatgaccttcagtctttactctgtgcaactcttcagaatgttcttcggaaagtgcaacatcaagatgctttgcagatctctgatgtggttatggcctccctgttaaggatgttccaaagcacagctgggtctgggggagtacaagaggatgccctgatggcagttagcacactggtggaagtgttgggtggtgaattcctcaagtacatggaggcctttaaacccttcctgggcattggattaaaaaattatgctgaataccaggtttgtttggcagctgtgggcttagtgggagacttgtgccgtgccctgcaatccaacatcatacctttctgtgacgaggtgatgcagctgcttctggaaaatttggggaatgagaacgtccacaggtctgtgaagccgcagattctgtcagtgtttggtgatattgcccttgctattggaggagagtttaaaaaatacttagaggttgtattgaatactcttcagcaggcctcccaagcccaggtggacaagtcagactatgacatggtggattatctgaatgagctaagggaaagctgcttggaagcctatactggaatcgtccagggattaaagggggatcaggagaacgtacacccggatgtgatgctggtacaacccagagtagaatttattctgtctttcattgaccacattgctggagatgaggatcacacagatggagtagtagcttgtgctgctggactaataggggacttatgtacagcatttgggaaggatgtactgaaattagtagaagctaggccaatgatccatgaattgttaactgaagggcggagatcgaagactaacaaagcaaaaacccttgctacatgggcaacaaaagaactgaggaactggacaccagctggtcttgtccttggggtatactgggccctggggatcccttttcaacccggatgagtggcgctattgaaag

SEQ ID NO: 101702 - DNA, 4237 bp, Homo sapiens
tacggcttaggagaggccggtgtttatcggccgagggaagctcctagagactacagacacctgatggacaccagaacaacctgaggagttctgcatatgaatctctgatggaaattgtgaaaaacagtgccaaggattgttatcctgctgtccagaaaacgactttggtcatcatggaacgactgcaacaggttcttcagatggagtcacatatccagagcacatccgatagaatccagttcaatgaccttcagtctttactctgtgcaactcttcagaatgttcttcggaaagtgcaacatcaagatgctttgcagatctctgatgtggttatggcctccctgttaaggatgttccaaagcacagctgggtctgggggagtacaagaggatgccctgatggcagttagcacactggtggaagtgttgggtggtgaattcctcaagtacatggaggcctttaaacccttcctgggcattggattaaaaaattatgctgaataccaggtttgtttggcagctgtgggcttagtgggagacttgtgccgtgccctgcaatccaacatcatacctttctgtgacgaggtgatgcagctgcttctggaaaatttggggaatgagaacgtccacaggtctgtgaagccgcagattctgtcagtgtttggtgatattgcccttgctattggaggagagtttaaaaaatacttagaggttgtattgaatactcttcagcaggcctcccaagcccaggtggacaagtcagactatgacatggtggattatctgaatgagctaagggaaagctgcttggaagcctatactggaatcgtccagggattaaagggggatcaggagaacgtacacccggatgtgatgctggtacaacccagagtagaatttattctgtctttcattgaccacattgctggagatgaggatcacacagatggagtagtagcttgtgctgctggactaataggggacttatgtacagcatttgggaaggatgtactgaaattagtagaagctaggccaatgatccatgaattgttaactgaagggcggagatcgaagactaacaaagcaaaaacccttgctacatgggcaacaaaagaactgaggaaactgaagaaccaagcttgatctgttaccattgggatgataacctgaggacccccactggaaatctcccatcttttgaaaaacctggaagtgaggagtgtgcacggatgctgaatgtttgggaatgagaggatgagtgagtgaggcttgaaaacacaccacattgaaaatcctgccacagcagcagccgcagccgccaacagcagcgctgttagtgagctaagtaagcactgacttcgtagaaaaccataacatcggccatcttggaaaagagaaaaacaatggagttacttatttaaaaaaaaagaaagaaagttatctcttcccaggagaggctagaagtagcttttctgtcttttggccagtgccgagtggaatgcctggtttgggggaggaggagggactgggttcagctgtggtgctttgttgtaaaaggcagcctggcctttgctactgaggagaaagatggagcctgggtctcaagcccaccttcgctgtacctttgccacatggtactgtatgcttgccagctagaaggagggtcagggattttttacagtctgagaatgagtgtgtgtgagtgaggcggtatccacattctcaacttcaagtcattgcagtttctttttcccagaaaacaaggggttagatgttgcatttcataaaactaaccgaagttctgtctactgatgcagcacaagagatgtaaaaaaaaaaaaaaaaaaaaaaaaaaaaaaaacacacacacagaggaaagacgctctttaggttttgttttgttttttttttttggttttgttttttgttttttttactctagggaaaacactgacgaatggtcagagctcctatcctgatcttttcatcaaggcgcctttcctaataatatggttcaactgtgaatgtagaagtgggggggaggggggagaaaaagaaaactctggcgttagaggatatagaaaaatataagtacaattgttacaaataacgcagacttcaaaaacaaaaaaatcacaacccaaacaaaccaaaatttaaatgatcagaattggcagcacaaagaaaacgccctctcctgacttgtattgtggcagtctgaacgcccccagaaaattgtgccaaagagtttagaaaaataaatatacaataaaagtaaacacatacacacaaaacagcaaacttcaggtaactattttggattgcaaacaggataattaaatgttcaaacaatctgataaaataaccatttggaaactgcttggccttctgttcttttatttgattgactacaatgcggtattggtctcttgctgcacttcaaaagcaaccaacaaaacaaaaacaaaaaaaagtgtgtgtgtgtgaatacacacacacactaactagaagtcttgtgatgaaaatggcacttggaaaaggttttatttttccactgaagttgaaggttaataaaatggtgtcaaacgtcccctggtcacacacttgaatatttttttagaagtgtgatgtggtatgattaccataaatcagacttaattattttcccttttacaagggaacagggcatcctgaattttagagcctttcagcaataagaagggatgttggtgagctttgatcctcttttggttttgcagttgttaggagtttttgctggcattttgaatatgctgctttcagaaaaaccaaggaagttttaaaattgcttcctggtccttagaggactaaaaacaagaccctcattcccactttcatttccactctagcaaaaactgggcttgcgtttttctccaactcctcgtttatatcctcccttccatgtccaagccttccattcctaagtgggattggctcagttttgcccatccatatggcagcatctctaatagctcttgtacagggtatcagatattgtgccttttggtgccaggttcaaagtcaagtgccgatctatgaaccagtgtacaaaaaaaaaaaaatccaggtatttgaaggagagacgctccattgtgaataaagagctcataccagctcctaagccctattaagaagaggcctggtcctctaatgccttgtttccatttcagttgttctttgagagacagaatgatgtactaaccattcgtgattattaagatagggttgggtcagggcttagggagggggcagaaatattggggatagaaaaaaaatctgatcattcctcagtgctacccatttctgtcctgtgtgggctgcttagctagacagcaggagaataaagtacaccgagaaccataatgaaaaaaccttccgtgtgttttgtcatgttttgttccagggaagcagttgatgagtgctgttactaatgctttctcccagatccattcagtggtggagaggaggaaaatgggctggttggatgtggtcttggtgccttgcagttactctgcactggttatgcatttaattctcctcttttctagttaaccttttgccagtgggttttccatagtctgggtatttgtccttatatcagttataccacctaaggcaactgggtgcaaaatgcattctgttcactcactgtctgggccttccccaccctagtcttggcacattccttcaagaatgtagttaccgtctgcttgggaagatgtcagtgcaaatgtgaagataatgggcatcggactaggctttggtttgccacaagtggcagctgcctgtatcaattacatttattaattttgcttttcatttttcccagttctcctcaccccccctttgttgaaatgttggacttgctgtcagaggcaactgtaatattgccttagggacttgtggagaaggggaattgctcagtgtagtgttttaactttcagaaccaagcaatctatttactcttacaaatatttaagaagtgtgttagtccaactttaagaaaaatccaaactcatcagcttttgatagcatcttggtttttgaaacaacttcaatctgtaattggcattcagaatgcccttggcatgccagtctgtgatggcatttaagacctgtaaaacacttgagcccaactcgattaaccaaaaccgataaccaccacctttatcttctaaataaagtccgctttattttta

SEQ ID NO: 101703 - DNA, 3299 bp, Homo sapiens
ctccctcgctccctccctgcgcgccgcctctcactcacagcctcccttccttctttctccctccgcctcccgagcaccagcgcgctctgagctgcccccagggtccctcccccgccgccagcagcccatttggagggaggaagtaagggaagaggagaggaaggggagccggaccgactacccagacagagccggtgaatgggtttgtggtgacccccgccccccaccccaccctcccttcccacccgacccccaacccccatccccagttcgagccgccgcccgaaaggccgggccgtcgtcttaggaggagtcgccgccgccgccacctccgccatggagctgatcaccattctcgagaagaccgtgtctcccgatcggctggagctggaagcggcgcagaagttcctggagcgtgcggccgtggagaacctgcccactttccttgtggaactgtccagagtgctggcaaatccaggaaacagtcaggttgccagagttgcagctggtctacaaatcaagaactctttgacatctaaagatccagatatcaaggcacaatatcagcagaggtggcttgctattgatgctaatgctcgacgagaagtcaagaactatgttttgcagacattgggtacagaaacttaccggcctagttctgcctcacagtgtgtggctggtattgcttgtgcagagatcccagtaaaccagtggccagaactcattcctcagctggtggccaatgtcacaaaccccaacagcacagagcacatgaaggagtcgacattggaagccatcggttatatttgccaagatatagacccagagcagctacaagataaatccaatgagattctgactgccataatccaggggatgaggaaagaagagcctagtaataatgtgaagctagctgctacgaatgcactcctgaactcattggagttcaccaaagcaaactttgataaagagtctgaaaggcactttattatgcaggtggtctgtgaagccacacagtgtccagatacgagggtacgagtggctgctttacagaatctggtgaagataatgtccttatattatcagtacatggagacatatatgggtcctgctctttttgcaatcacaatcgaagcaatgaaaagtgacattgatgaggtggctttacaagggatagaattctggtccaatgtctgtgatgaggaaatggatttggccattgaagcttcagaggcagcagaacaaggacggccccctgagcacaccagcaagttttatgcgaagggagcactacagtatctggttccaatcctcacacagacactaactaaacaggacgaaaatgatgatgacgatgactggaacccctgcaaagcagcaggggtgtgcctcatgcttctggccacctgctgtgaagatgacattgtcccacatgtcctccccttcattaaagaacacatcaagaacccagattggcggtaccgggatgcagcagtgatggcttttggttgtatcttggaaggaccagagcccagtcagctcaaaccactagttatacaggctatgcccaccctaatagaattaatgaaagaccccagtgtagttgttcgagatacagctgcatggactgtaggcagaatttgtgagctgcttcctgaagctgccatcaatgatgtctacttggctcccctgctacagtgtctgattgagggtctcagtgctgaacccagagtggcttcaaatgtgtgctgggctttctccagtctggctgaagctgcttatgaagctgcagacgttgctgatgatcaggaagaaccagctacttactgcttatcttcttcatttgaactcatagttcagaagctcctagagactacagacagacctgatggacaccagaacaacctgaggagttctgcatatgaatctctgatggaaattgtgaaaaacagtgccaaggattgttatcctgctgtccagaaaacgactttggtcatcatggaacgactgcaacaggttcttcagatggagtcacatatccagagcacatccgatagaatccagttcaatgaccttcagtctttactctgtgcaactcttcagaatgttcttcggaaagtgcaacatcaagatgctttgcagatctctgatgtggttatggcctccctgttaaggatgttccaaagcacagctgggtctgggggagtacaagaggatgccctgatggcagttagcacactggtggaagtgttgggtggtgaattcctcaagtacatggaggcctttaaacccttcctgggcattggattaaaaaattatgctgaataccaggtttgtttggcagctgtgggcttagtgggagacttgtgccgtgccctgcaatccaacatcatacctttctgtgacgaggtgatgcagctgcttctggaaaatttggggaatgagaacgtccacaggtctgtgaagccgcagattctgtcagtgtttggtgatattgcccttgctattggaggagagtttaaaaaatacttagaggttgtattgaatactcttcagcaggcctcccaagcccaggtggacaagtcagactatgacatggtggattatctgaatgagctaagggaaagctgcttggaagcctatactggaatcgtccagggattaaagggggatcaggagaacgtacacccccggattgtggattgcctggttacaaaccccaggagctaagaattttattcctggtcctttttcattggaacccaacatttgctggggcagaattgacgggattcaccacccagcacatggggcagtaggtaagccttgggtgcctttgcctgtggaacctaacttaagggggacctttctgggtcccgcgcccatttgggggcacacggacggttcctcggagaacagtgttaaggttacgaaacgctataggggccaatttgaattctcccatttgcaagttggggcttcaacctcttggcaaagcgggcctggagcaaaatttttcgactacgaactcttgaatccaatggtgccatgaaaaatagcccctttggggcctataaacacatttggggggaccacaaccagataggtgacagccttgcgcggcaagaccctgtgtaatataacaccccaaggtctgttgatatcctctgggctacactcccacacttggctgcattgaatctaacccagctgggagggtacacccccccgctgcggtgagaagtctcccaccatgctttgtggagacaacccagcgtgagacgtagctgcacgcatgt

SEQ ID NO: 101704 - DNA, 3874 bp, Homo sapiens
  misc_feature (19)..(19): n is a, c, g, or t
caaagtaaacatcggctanatgagctggggttaatcggacgaggagacactggtggaatatgttgggtggtgaattcctcaagtacatggaggcctttaaacccttcctgggcattggattaaaaaattatgctgaataccaggtttgtttggcagctgtgggcttagtgggagacttgtgccgtgccctgcaatccaacatcatacctttctgtgacgaggtgatgcagctgcttctggaaaatttggggaatgagaacgtccacaggtctgtgaagccgcagattctgtcagtgtttggtgatattgcccttgctattggaggagagtttaaaaaatacttagaggttgtattgaatactcttcagcaggcctcccaagcccaggtggacaagtcagactatgacatggtggattatctgaatgagctaagggaaagctgcttggaagcctatactggaatcgtccagggattaaagggggatcaggagaacgtacacccggatgtgatgctggtacaacccagagtagaatttattctgtctttcattgaccacattgctggagatgaggatcacacagatggagtagtagcttgtgctgctggactaataggggacttatgtacagcatttgggaaggatgtactgaaattagtagaagctaggccaatgatccatgaattgttaactgaagggcggagatcgaagactaacaaagcaaaaacccttgctacatgggcaacaaaagaactgaggaaactgaagaaccaagcttgatctgttaccattgggatgataacctgaggacccccactggaaatctcccatcttttgaaaaacctggaagtgaggagtgtgcacggatgctgaatgtttgggaatgagaggatgagtgagtgaggcttgaaaacacaccacattgaaaatcctgccacagcagcagccgcagccgccaacagcagcgctgttagtgagctaagtaagcactgacttcgtagaaaaccataacatcggccatcttggaaaagagaaaaacaatggagttacttatttaaaaaaaaagaaagaaagttatctcttcccaggagaggctagaagtagcttttctgtcttttggccagtgccgagtggaatgcctggtttgggggaggaggagggactgggttcagctgtggtgctttgttgtaaaaggcagcctggcctttgctactgaggagaaagatggagcctgggtctcaagcccaccttcgctgtacctttgccacatggtactgtatgcttgccagctagaaggagggtcagggattttttacagtctgagaatgagtgtgtgtgagtgaggcggtatccacattctcaacttcaagtcattgcagtttctttttcccagaaaacaaggggttagatgttgcatttcataaaactaaccgaagttctgtctactgatgcagcacaagagatgtaaaaaaaaaaaaaaaaaaaaaaaaaaaaaaaacacacacacagaggaaagacgctctttaggttttgttttgttttttttttttggttttgttttttgttttttttactctagggaaaacactgacgaatggtcagagctcctatcctgatcttttcatcaaggcgcctttcctaataatatggttcaactgtgaatgtagaagtgggggggaggggggagaaaaagaaaactctggcgttagaggatatagaaaaatataagtacaattgttacaaataacgcagacttcaaaaacaaaaaaatcacaacccaaacaaaccaaaatttaaatgatcagaattggcagcacaaagaaaacgccctctcctgacttgtattgtggcagtctgaacgcccccagaaaattgtgccaaagagtttagaaaaataaatatacaataaaagtaaacacatacacacaaaacagcaaacttcaggtaactattttggattgcaaacaggataattaaatgttcaaacaatctgataaaataaccatttggaaactgcttggccttctgttcttttatttgattgactacaatgcggtattggtctcttgctgcacttcaaaagcaaccaacaaaacaaaaacaaaaaaaagtgtgtgtgtgtgaatacacacacacactaactagaagtcttgtgatgaaaatggcacttggaaaaggttttatttttccactgaagttgaaggttaataaaatggtgtcaaacgtcccctggtcacacacttgaatatttttttagaagtgtgatgtggtatgattaccataaatcagacttaattattttcccttttacaagggaacagggcatcctgaattttagagcctttcagcaataagaagggatgttggtgagctttgatcctcttttggttttgcagttgttaggagtttttgctggcattttgaatatgctgctttcagaaaaaccaaggaagttttaaaattgcttcctggtccttagaggactaaaaacaagaccctcattcccactttcatttccactctagcaaaaactgggcttgcgtttttctccaactcctcgtttatatcctcccttccatgtccaagccttccattcctaagtgggattggctcagttttgcccatccatatggcagcatctctaatagctcttgtacagggtatcagatattgtgccttttggtgccaggttcaaagtcaagtgccgatctatgaaccagtgtacaaaaaaaaaaaaatccaggtatttgaaggagagacgctccattgtgaataaagagctcataccagctcctaagccctattaagaagaggcctggtcctctaatgccttgtttccatttcagttgttctttgagagacagaatgatgtactaaccattcgtgattattaagatagggttgggtcagggcttagggagggggcagaaatattggggatagaaaaaaaatctgatcattcctcagtgctacccatttctgtcctgtgtgggctgcttagctagacagcaggagaataaagtacaccgagaaccataatgaaaaaaccttccgtgtgttttgtcatgttttgttccagggaagcagttgatgagtgctgttactaatgctttctcccagatccattcagtggtggagaggaggaaaatgggctggttggatgtggtcttggtgccttgcagttactctgcactggttatgcatttaattctcctcttttctagttaaccttttgccagtgggttttccatagtctgggtatttgtccttatatcagttataccacctaaggcaactgggtgcaaaatgcattctgttcactcactgtctgggccttccccaccctagtcttggcacattccttcaagaatgtagttaccgtctgcttgggaagatgtcagtgcaaatgtgaagataatgggcatcggactaggctttggtttgccacaagtggcagctgcctgtatcaattacatttattaattttgcttttcatttttcccagttctcctcaccccccctttgttgaaatgttggacttgctgtcagaggcaactgtaatattgccttagggacttgtggagaaggggaattgctcagtgtagtgttttaactttcagaaccaagcaatctatttactcttacaaatatttaagaagtgtgttagtccaactttaagaaaaatccaaactcatcagcttttgatagcatcttggtttttgaaacaacttcaatctgtaattggcattcagaatgcccttggcatgccagtctgtgatggcatttaagacctgtaaaacacttgagcccaactcgattaaccaaaaccgataaccaccacctttatcttctaaataaagtccgctttattttta

SEQ ID NO: 101705 - DNA, 2993 bp, Homo sapiens
  misc_feature (2794)..(2794): n is a, c, g, or t
ctccctcgctccctccctgcgcgccgcctctcactcacagcctcccttccttctttctccctccgcctcccgagcaccagcgcgctctgagctgcccccagggtccctcccccgccgccagcagcccatttggagggaggaagtaagggaagaggagaggaaggggagccggaccgactacccagacagagccggtgaatgggtttgtggtgacccccgccccccaccccaccctcccttcccacccgacccccaacccccatccccagttcgagccgccgcccgaaaggccgggccgtcgtcttaggaggagtcgccgccgccgccacctccgccatggagctgatcaccattctcgagaagaccgtgtctcccgatcggctggagctggaagcggcgcagaagttcctggagcgtgcggccgtggagaacctgcccactttccttgtggaactgtccagagtgctggcaaatccaggaaacagtcaggttgccagagttgcagctggtctacaaatcaagaactctttgacatctaaagatccagatatcaaggcacaatatcagcagaggtggcttgctattgatgctaatgctcgacgagaagtcaagaactatgttttgcagacattgggtacagaaacttaccggcctagttctgcctcacagtgtgtggctggtattgcttgtgcagagatcccagtaaaccagtggccagaactcattcctcagctggtggccaatgtcacaaaccccaacagcacagagcacatgaaggagtcgacattggaagccatcggttatatttgccaagatatagacccagagcagctacaagataaatccaatgagattctgactgccataatccaggggatgaggaaagaagagcctagtaataatgtgaagctagctgctacgaatgcactcctgaactcattggagttcaccaaagcaaactttgataaagagtctgaaaggcactttattatgcaggtggtctgtgaagccacacagtgtccagatacgagggtacgagtggctgctttacagaatctggtgaagataatgtccttatattatcagtacatggagacatatatgggtcctgctctttttgcaatcacaatcgaagcaatgaaaagtgacattgatgaggtggctttacaagggatagaattctggtccaatgtctgtgatgaggaaatggatttggccattgaagcttcagaggcagcagaacaaggacggccccctgagcacaccagcaagttttatgcgaagggagcactacagtatctggttccaatcctcacacagacactaactaaacaggacgaaaatgatgatgacgatgactggaacccctgcaaagcagcaggggtgtgcctcatgcttctggccacctgctgtgaagatgacattgtcccacatgtcctccccttcattaaagaacacatcaagaacccagattggcggtaccgggatgcagcagtgatggcttttggttgtatcttggaaggaccagagcccagtcagctcaaaccactagttatacaggctatgcccaccctaatagaattaatgaaagaccccagtgtagttgttcgagatacagctgcatggactgtaggcagaatttgtgagctgcttcctgaagctgccatcaatgatgtctacttggctcccctgctacagtgtctgattgagggtctcagtgctgaacccagagtggcttcaaatgtgtgctgggctttctccagtctggctgaagctgcttatgaagctgcagacgttgctgatgatcaggaagaaccagctacttactgcttatcttcttcatttgaactcatagttcagaagctcctagagactacagacagacctgatggacaccagaacaacctgaggagttctgcatatgaatctctgatggaaattgtgaaaaacagtgccaaggattgttatcctgctgtccagaaaacgactttggtcatcatggaacgactgcaacaggttcttcagatggagtcacatatccagagcacatccgatagaatccagttcaatgaccttcagtctttactctgtgcaactcttcagaatgttcttcggaaagtgcaacatcaagatgctttgcagatctctgatgtggttatggcctccctgttaaggatgttccaaagcacagctgggtctgggggagtacaagaggatgccctgatggcagttagcacactggtggaagtgttgggtggtgaattcctcaagtacatggaggcctttaaacccttcctgggcattggattaaaaaattatgctgaataccaggtttgtttggcagctgtgggcttagtgggagacttgtgccgtgccctgcaatccaacatcatacctttctgtgacgaggtgatgcagctgcttctggaaaatttggggaatgagaacgtccacaggtctgtgaagccgcagattctgtcagtgtttggtgatattgcccttgctattggaggagagtttaaaaaatacttagaggttgtattgaatactcttcagcaggcctcccaagcccaggtggacaagtcagactatgacatggtggattatctgaatgagtctggagagctgcatgggctcacaactgaggaggaatttgtagaagggatatacaaagtggaaatagacaccaaatcttactggaaggcacttggcatctccccattccatgagcatgcagaggtggtattcacagccaacgactccggcccccgccgctacaccattgccgccctgntgagcccctactcctattccaccacggctgtcgtcaccaatcccaaggaatgagggacttctcctccagtggacctgaaggacgagggatgggatttcatgtaaccaagagtattccatttttactaaagcagtgttttcacctcatatgctatgttagaagtccaggcagagacaataaaacattcctgtgaaaggca

SEQ ID NO: 101706 - DNA, 3955 bp, Homo sapiens
  misc_feature (220)..(220): n is a, c, g, or t
ggtcactgtcatatgtggggtatgtgtggggaatggggcacgtggaatgatcagttccttcgtatgtgaagtcaggaaaggcttctggaaccagggagttatagacgttatatggagttatagaaacacagtggaaggggtggcgttagatactgttcctgcctcaggtgagtctgactgggtctcagtcttttctcatagagaagaagaatggctaatnccaggtttgtttggcagctgtgggcttagtgggagacttgtgccgtgccctgcaatccaacatcatacctttctgtgacgaggtgatgcagctgcttctggaaaatttggggaatgagaacgtccacaggtctgtgaagccgcagattctgtcagtgtttggtgatattgcccttgctattggaggagagtttaaaaaatacttagaggttgtattgaatactcttcagcaggcctcccaagcccaggtggacaagtcagactatgacatggtggattatctgaatgagctaagggaaagctgcttggaagcctatactggaatcgtccagggattaaagggggatcaggagaacgtacacccggatgtgatgctggtacaacccagagtagaatttattctgtctttcattgaccacattgctggagatgaggatcacacagatggagtagtagcttgtgctgctggactaataggggacttatgtacagcatttgggaaggatgtactgaaattagtagaagctaggccaatgatccatgaattgttaactgaagggcggagatcgaagactaacaaagcaaaaacccttgctacatgggcaacaaaagaactgaggaaactgaagaaccaagcttgatctgttaccattgggatgataacctgaggacccccactggaaatctcccatcttttgaaaaacctggaagtgaggagtgtgcacggatgctgaatgtttgggaatgagaggatgagtgagtgaggcttgaaaacacaccacattgaaaatcctgccacagcagcagccgcagccgccaacagcagcgctgttagtgagctaagtaagcactgacttcgtagaaaaccataacatcggccatcttggaaaagagaaaaacaatggagttacttatttaaaaaaaaagaaagaaagttatctcttcccaggagaggctagaagtagcttttctgtcttttggccagtgccgagtggaatgcctggtttgggggaggaggagggactgggttcagctgtggtgctttgttgtaaaaggcagcctggcctttgctactgaggagaaagatggagcctgggtctcaagcccaccttcgctgtacctttgccacatggtactgtatgcttgccagctagaaggagggtcagggattttttacagtctgagaatgagtgtgtgtgagtgaggcggtatccacattctcaacttcaagtcattgcagtttctttttcccagaaaacaaggggttagatgttgcatttcataaaactaaccgaagttctgtctactgatgcagcacaagagatgtaaaaaaaaaaaaaaaaaaaaaaaaaaaaaaaacacacacacagaggaaagacgctctttaggttttgttttgttttttttttttggttttgttttttgttttttttactctagggaaaacactgacgaatggtcagagctcctatcctgatcttttcatcaaggcgcctttcctaataatatggttcaactgtgaatgtagaagtgggggggaggggggagaaaaagaaaactctggcgttagaggatatagaaaaatataagtacaattgttacaaataacgcagacttcaaaaacaaaaaaatcacaacccaaacaaaccaaaatttaaatgatcagaattggcagcacaaagaaaacgccctctcctgacttgtattgtggcagtctgaacgcccccagaaaattgtgccaaagagtttagaaaaataaatatacaataaaagtaaacacatacacacaaaacagcaaacttcaggtaactattttggattgcaaacaggataattaaatgttcaaacaatctgataaaataaccatttggaaactgcttggccttctgttcttttatttgattgactacaatgcggtattggtctcttgctgcacttcaaaagcaaccaacaaaacaaaaacaaaaaaaagtgtgtgtgtgtgaatacacacacacactaactagaagtcttgtgatgaaaatggcacttggaaaaggttttatttttccactgaagttgaaggttaataaaatggtgtcaaacgtcccctggtcacacacttgaatatttttttagaagtgtgatgtggtatgattaccataaatcagacttaattattttcccttttacaagggaacagggcatcctgaattttagagcctttcagcaataagaagggatgttggtgagctttgatcctcttttggttttgcagttgttaggagtttttgctggcattttgaatatgctgctttcagaaaaaccaaggaagttttaaaattgcttcctggtccttagaggactaaaaacaagaccctcattcccactttcatttccactctagcaaaaactgggcttgcgtttttctccaactcctcgtttatatcctcccttccatgtccaagccttccattcctaagtgggattggctcagttttgcccatccatatggcagcatctctaatagctcttgtacagggtatcagatattgtgccttttggtgccaggttcaaagtcaagtgccgatctatgaaccagtgtacaaaaaaaaaaaaatccaggtatttgaaggagagacgctccattgtgaataaagagctcataccagctcctaagccctattaagaagaggcctggtcctctaatgccttgtttccatttcagttgttctttgagagacagaatgatgtactaaccattcgtgattattaagatagggttgggtcagggcttagggagggggcagaaatattggggatagaaaaaaaatctgatcattcctcagtgctacccatttctgtcctgtgtgggctgcttagctagacagcaggagaataaagtacaccgagaaccataatgaaaaaaccttccgtgtgttttgtcatgttttgttccagggaagcagttgatgagtgctgttactaatgctttctcccagatccattcagtggtggagaggaggaaaatgggctggttggatgtggtcttggtgccttgcagttactctgcactggttatgcatttaattctcctcttttctagttaaccttttgccagtgggttttccatagtctgggtatttgtccttatatcagttataccacctaaggcaactgggtgcaaaatgcattctgttcactcactgtctgggccttccccaccctagtcttggcacattccttcaagaatgtagttaccgtctgcttgggaagatgtcagtgcaaatgtgaagataatgggcatcggactaggctttggtttgccacaagtggcagctgcctgtatcaattacatttattaattttgcttttcatttttcccagttctcctcaccccccctttgttgaaatgttggacttgctgtcagaggcaactgtaatattgccttagggacttgtggagaaggggaattgctcagtgtagtgttttaactttcagaaccaagcaatctatttactcttacaaatatttaagaagtgtgttagtccaactttaagaaaaatccaaactcatcagcttttgatagcatcttggtttttgaaacaacttcaatctgtaattggcattcagaatgcccttggcatgccagtctgtgatggcatttaagacctgtaaaacacttgagcccaactcgattaaccaaaaccgataaccaccacctttatcttctaaataaagtccgctttattttta

SEQ ID NO: 101707 - DNA, 2469 bp, Homo sapiens
ctccctcgctccctccctgcgcgccgcctctcactcacagcctcccttccttctttctccctccgcctcccgagcaccagcgcgctctgagctgcccccagggtccctcccccgccgccagcagcccatttggagggaggaagtaagggaagaggagaggaaggggagccggaccgactacccagacagagccggtgaatgggtttgtggtgacccccgccccccaccccaccctcccttcccacccgacccccaacccccatccccagttcgagccgccgcccgaaaggccgggccgtcgtcttaggaggagtcgccgccgccgccacctccgccatggagctgatcaccattctcgagaagaccgtgtctcccgatcggctggagctggaagcggcgcagaagttcctggagcgtgcggccgtggagaacctgcccactttccttgtggaactgtccagagtgctggcaaatccaggaaacagtcaggttgccagagttgcagctggtctacaaatcaagaactctttgacatctaaagatccagatatcaaggcacaatatcagcagaggtggcttgctattgatgctaatgctcgacgagaagtcaagaactatgttttgcagacattgggtacagaaacttaccggcctagttctgcctcacagtgtgtggctggtattgcttgtgcagagatcccagtaaaccagtggccagaactcattcctcagctggtggccaatgtcacaaaccccaacagcacagagcacatgaaggagtcgacattggaagccatcggttatatttgccaagatatagacccagagcagctacaagataaatccaatgagattctgactgccataatccaggggatgaggaaagaagagcctagtaataatgtgaagctagctgctacgaatgcactcctgaactcattggagttcaccaaagcaaactttgataaagagtctgaaaggcactttattatgcaggtggtctgtgaagccacacagtgtccagatacgagggtacgagtggctgctttacagaatctggtgaagataatgtccttatattatcagtacatggagacatatatgggtcctgctctttttgcaatcacaatcgaagcaatgaaaagtgacattgatgaggtggctttacaagggatagaattctggtccaatgtctgtgatgaggaaatggatttggccattgaagcttcagaggcagcagaacaaggacggccccctgagcacaccagcaagttttatgcgaagggagcactacagtatctggttccaatcctcacacagacactaactaaacaggacgaaaatgatgatgacgatgactggaacccctgcaaagcagcaggggtgtgcctcatgcttctggccacctgctgtgaagatgacattgtcccacatgtcctccccttcattaaagaacacatcaagaacccagattggcggtaccgggatgcagcagtgatggcttttggttgtatcttggaaggaccagagcccagtcagctcaaaccactagttatacaggctatgcccaccctaatagaattaatgaaagaccccagtgtagttgttcgagatacagctgcatggactgtaggcagaatttgtgagctgcttcctgaagctgccatcaatgatgtctacttggctcccctgctacagtgtctgattgagggtctcagtgctgaacccagagtggcttcaaatgtgtgctgggctttctccagtctggctgaagctgcttatgaagctgcagacgttgctgatgatcaggaagaaccagctacttactgcttatcttcttcatttgaactcatagttcagaagctcctagagactacagacagacctgatggacaccagaacaacctgaggagttctgcatatgaatctctgatggaaattgtgaaaaacagtgccaaggattgttatcctgctgtccagaaaacgactttggtcatcatggaacgactgcaacaggttcttcagatggagtcacatatccagagcacatccgatagaatccagttcaatgaccttcagtctttactctgtgcaactcttcagaatgttcttcggaaagtgcaacatcaagatgctttgcagatctctgatgtggttatggcctccctgttaaggatgttccaaagcacagctgggtctgggggagtacaagaggatgccctgatggcagttagcacactggtggaagtgtggggtggttgaatttcttcaagtacattggagggcctttaaccctttctggggattggatttaaaacttatgatgaatacaggttcgttggcagctgtggggtaagtgggagaattgtgccggccctgtattcaaattataacttttgtgagaggtgagagtggttttggaacattggcatggaattcccgttgtgaacgagtttgcagatgggaatc

SEQ ID NO: 101708 - DNA, 3553 bp, Homo sapiens
tgctaggacagggccgggtgttaatcggccgagggaatactcttcagcaggtctcccaagcacaggtggacaagtcagactatgacatggtggattatctgaatgagctaagggaaagctgcttggaagcctatactggaatcgtccagggattaaagggggatcaggagaacgtacacccggatgtgatgctggtacaacccagagtagaatttattctgtctttcattgaccacattgctggagatgaggatcacacagatggagtagtagcttgtgctgctggactaataggggacttatgtacagcatttgggaaggatgtactgaaattagtagaagctaggccaatgatccatgaattgttaactgaagggcggagatcgaagactaacaaagcaaaaacccttgctacatgggcaacaaaagaactgaggaaactgaagaaccaagcttgatctgttaccattgggatgataacctgaggacccccactggaaatctcccatcttttgaaaaacctggaagtgaggagtgtgcacggatgctgaatgtttgggaatgagaggatgagtgagtgaggcttgaaaacacaccacattgaaaatcctgccacagcagcagccgcagccgccaacagcagcgctgttagtgagctaagtaagcactgacttcgtagaaaaccataacatcggccatcttggaaaagagaaaaacaatggagttacttatttaaaaaaaaagaaagaaagttatctcttcccaggagaggctagaagtagcttttctgtcttttggccagtgccgagtggaatgcctggtttgggggaggaggagggactgggttcagctgtggtgctttgttgtaaaaggcagcctggcctttgctactgaggagaaagatggagcctgggtctcaagcccaccttcgctgtacctttgccacatggtactgtatgcttgccagctagaaggagggtcagggattttttacagtctgagaatgagtgtgtgtgagtgaggcggtatccacattctcaacttcaagtcattgcagtttctttttcccagaaaacaaggggttagatgttgcatttcataaaactaaccgaagttctgtctactgatgcagcacaagagatgtaaaaaaaaaaaaaaaaaaaaaaaaaaaaaaaacacacacacagaggaaagacgctctttaggttttgttttgttttttttttttggttttgttttttgttttttttactctagggaaaacactgacgaatggtcagagctcctatcctgatcttttcatcaaggcgcctttcctaataatatggttcaactgtgaatgtagaagtgggggggaggggggagaaaaagaaaactctggcgttagaggatatagaaaaatataagtacaattgttacaaataacgcagacttcaaaaacaaaaaaatcacaacccaaacaaaccaaaatttaaatgatcagaattggcagcacaaagaaaacgccctctcctgacttgtattgtggcagtctgaacgcccccagaaaattgtgccaaagagtttagaaaaataaatatacaataaaagtaaacacatacacacaaaacagcaaacttcaggtaactattttggattgcaaacaggataattaaatgttcaaacaatctgataaaataaccatttggaaactgcttggccttctgttcttttatttgattgactacaatgcggtattggtctcttgctgcacttcaaaagcaaccaacaaaacaaaaacaaaaaaaagtgtgtgtgtgtgaatacacacacacactaactagaagtcttgtgatgaaaatggcacttggaaaaggttttatttttccactgaagttgaaggttaataaaatggtgtcaaacgtcccctggtcacacacttgaatatttttttagaagtgtgatgtggtatgattaccataaatcagacttaattattttcccttttacaagggaacagggcatcctgaattttagagcctttcagcaataagaagggatgttggtgagctttgatcctcttttggttttgcagttgttaggagtttttgctggcattttgaatatgctgctttcagaaaaaccaaggaagttttaaaattgcttcctggtccttagaggactaaaaacaagaccctcattcccactttcatttccactctagcaaaaactgggcttgcgtttttctccaactcctcgtttatatcctcccttccatgtccaagccttccattcctaagtgggattggctcagttttgcccatccatatggcagcatctctaatagctcttgtacagggtatcagatattgtgccttttggtgccaggttcaaagtcaagtgccgatctatgaaccagtgtacaaaaaaaaaaaaatccaggtatttgaaggagagacgctccattgtgaataaagagctcataccagctcctaagccctattaagaagaggcctggtcctctaatgccttgtttccatttcagttgttctttgagagacagaatgatgtactaaccattcgtgattattaagatagggttgggtcagggcttagggagggggcagaaatattggggatagaaaaaaaatctgatcattcctcagtgctacccatttctgtcctgtgtgggctgcttagctagacagcaggagaataaagtacaccgagaaccataatgaaaaaaccttccgtgtgttttgtcatgttttgttccagggaagcagttgatgagtgctgttactaatgctttctcccagatccattcagtggtggagaggaggaaaatgggctggttggatgtggtcttggtgccttgcagttactctgcactggttatgcatttaattctcctcttttctagttaaccttttgccagtgggttttccatagtctgggtatttgtccttatatcagttataccacctaaggcaactgggtgcaaaatgcattctgttcactcactgtctgggccttccccaccctagtcttggcacattccttcaagaatgtagttaccgtctgcttgggaagatgtcagtgcaaatgtgaagataatgggcatcggactaggctttggtttgccacaagtggcagctgcctgtatcaattacatttattaattttgcttttcatttttcccagttctcctcaccccccctttgttgaaatgttggacttgctgtcagaggcaactgtaatattgccttagggacttgtggagaaggggaattgctcagtgtagtgttttaactttcagaaccaagcaatctatttactcttacaaatatttaagaagtgtgttagtccaactttaagaaaaatccaaactcatcagcttttgatagcatcttggtttttgaaacaacttcaatctgtaattggcattcagaatgcccttggcatgccagtctgtgatggcatttaagacctgtaaaacacttgagcccaactcgattaaccaaaaccgataaccaccacctttatcttctaaataaagtccgctttattttta

SEQ ID NO: 101709 - DNA, 2260 bp, Homo sapiens
  misc_feature (2107)..(2107): n is a, c, g, or t
  misc_feature (2110)..(2111): n is a, c, g, or t
  misc_feature (2114)..(2114): n is a, c, g, or t
  misc_feature (2116)..(2116): n is a, c, g, or t
  misc_feature (2119)..(2119): n is a, c, g, or t
  misc_feature (2122)..(2122): n is a, c, g, or t
  misc_feature (2127)..(2127): n is a, c, g, or t
  misc_feature (2129)..(2129): n is a, c, g, or t
  misc_feature (2131)..(2131): n is a, c, g, or t
  misc_feature (2135)..(2136): n is a, c, g, or t
  misc_feature (2157)..(2157): n is a, c, g, or t
  misc_feature (2160)..(2161): n is a, c, g, or t
  misc_feature (2171)..(2171): n is a, c, g, or t
  misc_feature (2176)..(2176): n is a, c, g, or t
  misc_feature (2178)..(2178): n is a, c, g, or t
  misc_feature (2186)..(2186): n is a, c, g, or t
  misc_feature (2195)..(2195): n is a, c, g, or t
ctccctcgctccctccctgcgcgccgcctctcactcacagcctcccttccttctttctccctccgcctcccgagcaccagcgcgctctgagctgcccccagggtccctcccccgccgccagcagcccatttggagggaggaagtaagggaagaggagaggaaggggagccggaccgactacccagacagagccggtgaatgggtttgtggtgacccccgccccccaccccaccctcccttcccacccgacccccaacccccatccccagttcgagccgccgcccgaaaggccgggccgtcgtcttaggaggagtcgccgccgccgccacctccgccatggagctgatcaccattctcgagaagaccgtgtctcccgatcggctggagctggaagcggcgcagaagttcctggagcgtgcggccgtggagaacctgcccactttccttgtggaactgtccagagtgctggcaaatccaggaaacagtcaggttgccagagttgcagctggtctacaaatcaagaactctttgacatctaaagatccagatatcaaggcacaatatcagcagaggtggcttgctattgatgctaatgctcgacgagaagtcaagaactatgttttgcagacattgggtacagaaacttaccggcctagttctgcctcacagtgtgtggctggtattgcttgtgcagagatcccagtaaaccagtggccagaactcattcctcagctggtggccaatgtcacaaaccccaacagcacagagcacatgaaggagtcgacattggaagccatcggttatatttgccaagatatagacccagagcagctacaagataaatccaatgagattctgactgccataatccaggggatgaggaaagaagagcctagtaataatgtgaagctagctgctacgaatgcactcctgaactcattggagttcaccaaagcaaactttgataaagagtctgaaaggcactttattatgcaggtggtctgtgaagccacacagtgtccagatacgagggtacgagtggctgctttacagaatctggtgaagataatgtccttatattatcagtacatggagacatatatgggtcctgctctttttgcaatcacaatcgaagcaatgaaaagtgacattgatgaggtggctttacaagggatagaattctggtccaatgtctgtgatgaggaaatggatttggccattgaagcttcagaggcagcagaacaaggacggccccctgagcacaccagcaagttttatgcgaagggagcactacagtatctggttccaatcctcacacagacactaactaaacaggacgaaaatgatgatgacgatgactggaacccctgcaaagcagcaggggtgtgcctcatgcttctggccacctgctgtgaagatgacattgtcccacatgtcctccccttcattaaagaacacatcaagaacccagattggcggtaccgggatgcagcagtgatggcttttggttgtatcttggaaggaccagagcccagtcagctcaaaccactagttatacaggctatgcccaccctaatagaattaatgaaagaccccagtgtagttgttcgagatacagctgcatggactgtaggcagaatttgtgagctgcttcctgaagctgccatcaatgatgtctacttggctcccctgctacagtgtctgattgagggtctcagtgctgaacccagagtggcttcaaatgtgtgctgggctttctccagtctggctgaagctgcttatgaagctgcagacgttgctgatgatcaggaagaaccagctacttactgcttatcttcttcatttgaactcatagttcagaagctcctagagactacagacagacctgatggacaccagaacaacctgaggagttctgcatatgaatctctgatggaaattgtgaaaaacagtgccaaggattgttatcctgctgtccagaaaacgactttggtcatcatggaacgactgcaacaggttcttcagatggagtcacatatccagagcacatccgatagaatccagttcaatgaccttcagtctttactctgtgcaactcttcaggaanggnntcngnagngcncctcngngnttgnnactctggggggtggccccgtnggnnttccagccgnggtcngnggtcaagngccctggtncccgcgggtggggggccccccagggggctccccgcctgggtgactccgccctcgggggcgcccgc

SEQ ID NO: 101710 - DNA, 2382 bp, Homo sapiens
ctccctcgctccctccctgcgcgccgcctctcactcacagcctcccttccttctttctccctccgcctcccgagcaccagcgcgctctgagctgcccccagggtccctcccccgccgccagcagcccatttggagggaggaagtaagggaagaggagaggaaggggagccggaccgactacccagacagagccggtgaatgggtttgtggtgacccccgccccccaccccaccctcccttcccacccgacccccaacccccatccccagttcgagccgccgcccgaaaggccgggccgtcgtcttaggaggagtcgccgccgccgccacctccgccatggagctgatcaccattctcgagaagaccgtgtctcccgatcggctggagctggaagcggcgcagaagttcctggagcgtgcggccgtggagaacctgcccactttccttgtggaactgtccagagtgctggcaaatccaggaaacagtcaggttgccagagttgcagctggtctacaaatcaagaactctttgacatctaaagatccagatatcaaggcacaatatcagcagaggtggcttgctattgatgctaatgctcgacgagaagtcaagaactatgttttgcagacattgggtacagaaacttaccggcctagttctgcctcacagtgtgtggctggtattgcttgtgcagagatcccagtaaaccagtggccagaactcattcctcagctggtggccaatgtcacaaaccccaacagcacagagcacatgaaggagtcgacattggaagccatcggttatatttgccaagatatagacccagagcagctacaagataaatccaatgagattctgactgccataatccaggggatgaggaaagaagagcctagtaataatgtgaagctagctgctacgaatgcactcctgaactcattggagttcaccaaagcaaactttgataaagagtctgaaaggcactttattatgcaggtggtctgtgaagccacacagtgtccagatacgagggtacgagtggctgctttacagaatctggtgaagataatgtccttatattatcagtacatggagacatatatgggtcctgctctttttgcaatcacaatcgaagcaatgaaaagtgacattgatgaggtggctttacaagggatagaattctggtccaatgtctgtgatgaggaaatggatttggccattgaagcttcagaggcagcagaacaaggacggccccctgagcacaccagcaagttttatgcgaagggagcactacagtatctggttccaatcctcacacagacactaactaaacaggacgaaaatgatgatgacgatgactggaacccctgcaaagcagcaggggtgtgcctcatgcttctggccacctgctgtgaagatgacattgtcccacatgtcctccccttcattaaagaacacatcaagaacccagattggcggtaccgggatgcagcagtgatggcttttggttgtatcttggaaggaccagagcccagtcagctcaaaccactagttatacaggctatgcccaccctaatagaattaatgaaagaccccagtgtagttgttcgagatacagctgcatggactgtaggcagaatttgtgagctgcttcctgaagctgccatcaatgatgtctacttggctcccctgctacagtgtctgattgagggtctcagtgctgaacccagagtggcttcaaatgtgtgctgggctttctccagtctggctgaagctgcttatgaagctgcagacgttgctgatgatcaggaagaaccagctacttactgcttatcttcttcatttgaactcatagttcagaagctcctagagactacagacagacctgatggacaccagaacaacctgaggagttctgcatatgaatctctgatggaaattgtgaaaaacagtgccaaggattgttatcctgctgtccagaaaacgactttggtcatcatggaacgactgcaacaggttcttcagatggagtcacatatccagagcacatccgatagaatccagttcaatgaccttcagtctttactctgtgcaactcttcagggtatggtggtgccttatgacttaataactccaggttggagaattattagtatctcagtataacaagttcgtgtacacacagaactcgaaaatggtatagatgatgcggatcagaagctgttctcagaaggctttggtctgtgattggttgattgggagaggaattccccacctgccttacctgtctgtctagaaagattcaaatcctacttatttacagatggtctagatgtaatcttgataaaatcaaaccaacttgacttctcctaattcaacata

SEQ ID NO: 101711 - DNA, 3513 bp, Homo sapiens
gtagagacggggtttcaccgagttagccaggatggtctcgatcttctgaccttgtgatccacccgcctgggcctcctaaagtgctgggtttacaggcatgagccaccgcacccgaccaataccttctctctcttttatagcggatgtgatgctggtacaacccagagtagaatttattctgtctttcattgaccacattgctggagatgaggatcacacagatggagtagtagcttgtgctgctggactaataggggacttatgtacagcatttgggaaggatgtactgaaattagtagaagctaggccaatgatccatgaattgttaactgaagggcggagatcgaagactaacaaagcaaaaacccttgctacatgggcaacaaaagaactgaggaaactgaagaaccaagcttgatctgttaccattgggatgataacctgaggacccccactggaaatctcccatcttttgaaaaacctggaagtgaggagtgtgcacggatgctgaatgtttgggaatgagaggatgagtgagtgaggcttgaaaacacaccacattgaaaatcctgccacagcagcagccgcagccgccaacagcagcgctgttagtgagctaagtaagcactgacttcgtagaaaaccataacatcggccatcttggaaaagagaaaaacaatggagttacttatttaaaaaaaaagaaagaaagttatctcttcccaggagaggctagaagtagcttttctgtcttttggccagtgccgagtggaatgcctggtttgggggaggaggagggactgggttcagctgtggtgctttgttgtaaaaggcagcctggcctttgctactgaggagaaagatggagcctgggtctcaagcccaccttcgctgtacctttgccacatggtactgtatgcttgccagctagaaggagggtcagggattttttacagtctgagaatgagtgtgtgtgagtgaggcggtatccacattctcaacttcaagtcattgcagtttctttttcccagaaaacaaggggttagatgttgcatttcataaaactaaccgaagttctgtctactgatgcagcacaagagatgtaaaaaaaaaaaaaaaaaaaaaaaaaaaaaaaacacacacacagaggaaagacgctctttaggttttgttttgttttttttttttggttttgttttttgttttttttactctagggaaaacactgacgaatggtcagagctcctatcctgatcttttcatcaaggcgcctttcctaataatatggttcaactgtgaatgtagaagtgggggggaggggggagaaaaagaaaactctggcgttagaggatatagaaaaatataagtacaattgttacaaataacgcagacttcaaaaacaaaaaaatcacaacccaaacaaaccaaaatttaaatgatcagaattggcagcacaaagaaaacgccctctcctgacttgtattgtggcagtctgaacgcccccagaaaattgtgccaaagagtttagaaaaataaatatacaataaaagtaaacacatacacacaaaacagcaaacttcaggtaactattttggattgcaaacaggataattaaatgttcaaacaatctgataaaataaccatttggaaactgcttggccttctgttcttttatttgattgactacaatgcggtattggtctcttgctgcacttcaaaagcaaccaacaaaacaaaaacaaaaaaaagtgtgtgtgtgtgaatacacacacacactaactagaagtcttgtgatgaaaatggcacttggaaaaggttttatttttccactgaagttgaaggttaataaaatggtgtcaaacgtcccctggtcacacacttgaatatttttttagaagtgtgatgtggtatgattaccataaatcagacttaattattttcccttttacaagggaacagggcatcctgaattttagagcctttcagcaataagaagggatgttggtgagctttgatcctcttttggttttgcagttgttaggagtttttgctggcattttgaatatgctgctttcagaaaaaccaaggaagttttaaaattgcttcctggtccttagaggactaaaaacaagaccctcattcccactttcatttccactctagcaaaaactgggcttgcgtttttctccaactcctcgtttatatcctcccttccatgtccaagccttccattcctaagtgggattggctcagttttgcccatccatatggcagcatctctaatagctcttgtacagggtatcagatattgtgccttttggtgccaggttcaaagtcaagtgccgatctatgaaccagtgtacaaaaaaaaaaaaatccaggtatttgaaggagagacgctccattgtgaataaagagctcataccagctcctaagccctattaagaagaggcctggtcctctaatgccttgtttccatttcagttgttctttgagagacagaatgatgtactaaccattcgtgattattaagatagggttgggtcagggcttagggagggggcagaaatattggggatagaaaaaaaatctgatcattcctcagtgctacccatttctgtcctgtgtgggctgcttagctagacagcaggagaataaagtacaccgagaaccataatgaaaaaaccttccgtgtgttttgtcatgttttgttccagggaagcagttgatgagtgctgttactaatgctttctcccagatccattcagtggtggagaggaggaaaatgggctggttggatgtggtcttggtgccttgcagttactctgcactggttatgcatttaattctcctcttttctagttaaccttttgccagtgggttttccatagtctgggtatttgtccttatatcagttataccacctaaggcaactgggtgcaaaatgcattctgttcactcactgtctgggccttccccaccctagtcttggcacattccttcaagaatgtagttaccgtctgcttgggaagatgtcagtgcaaatgtgaagataatgggcatcggactaggctttggtttgccacaagtggcagctgcctgtatcaattacatttattaattttgcttttcatttttcccagttctcctcaccccccctttgttgaaatgttggacttgctgtcagaggcaactgtaatattgccttagggacttgtggagaaggggaattgctcagtgtagtgttttaactttcagaaccaagcaatctatttactcttacaaatatttaagaagtgtgttagtccaactttaagaaaaatccaaactcatcagcttttgatagcatcttggtttttgaaacaacttcaatctgtaattggcattcagaatgcccttggcatgccagtctgtgatggcatttaagacctgtaaaacacttgagcccaactcgattaaccaaaaccgataaccaccacctttatcttctaaataaagtccgctttattttta

SEQ ID NO: 101712 - DNA, 3456 bp, Homo sapiens
ggacggctacggcgtagggtggcaggcacaatctccgggggcagatgaaggtaatcacggaggggatcaggagaacgtacacccggatgtgatgctggtacaacccagagtagaatttattctgtctttcattgaccacattgctggagatgaggatcacacagatggagtagtagcttgtgctgctggactaataggggacttatgtacagcatttgggaaggatgtactgaaattagtagaagctaggccaatgatccatgaattgttaactgaagggcggagatcgaagactaacaaagcaaaaacccttgctacatgggcaacaaaagaactgaggaaactgaagaaccaagcttgatctgttaccattgggatgataacctgaggacccccactggaaatctcccatcttttgaaaaacctggaagtgaggagtgtgcacggatgctgaatgtttgggaatgagaggatgagtgagtgaggcttgaaaacacaccacattgaaaatcctgccacagcagcagccgcagccgccaacagcagcgctgttagtgagctaagtaagcactgacttcgtagaaaaccataacatcggccatcttggaaaagagaaaaacaatggagttacttatttaaaaaaaaagaaagaaagttatctcttcccaggagaggctagaagtagcttttctgtcttttggccagtgccgagtggaatgcctggtttgggggaggaggagggactgggttcagctgtggtgctttgttgtaaaaggcagcctggcctttgctactgaggagaaagatggagcctgggtctcaagcccaccttcgctgtacctttgccacatggtactgtatgcttgccagctagaaggagggtcagggattttttacagtctgagaatgagtgtgtgtgagtgaggcggtatccacattctcaacttcaagtcattgcagtttctttttcccagaaaacaaggggttagatgttgcatttcataaaactaaccgaagttctgtctactgatgcagcacaagagatgtaaaaaaaaaaaaaaaaaaaaaaaaaaaaaaaacacacacacagaggaaagacgctctttaggttttgttttgttttttttttttggttttgttttttgttttttttactctagggaaaacactgacgaatggtcagagctcctatcctgatcttttcatcaaggcgcctttcctaataatatggttcaactgtgaatgtagaagtgggggggaggggggagaaaaagaaaactctggcgttagaggatatagaaaaatataagtacaattgttacaaataacgcagacttcaaaaacaaaaaaatcacaacccaaacaaaccaaaatttaaatgatcagaattggcagcacaaagaaaacgccctctcctgacttgtattgtggcagtctgaacgcccccagaaaattgtgccaaagagtttagaaaaataaatatacaataaaagtaaacacatacacacaaaacagcaaacttcaggtaactattttggattgcaaacaggataattaaatgttcaaacaatctgataaaataaccatttggaaactgcttggccttctgttcttttatttgattgactacaatgcggtattggtctcttgctgcacttcaaaagcaaccaacaaaacaaaaacaaaaaaaagtgtgtgtgtgtgaatacacacacacactaactagaagtcttgtgatgaaaatggcacttggaaaaggttttatttttccactgaagttgaaggttaataaaatggtgtcaaacgtcccctggtcacacacttgaatatttttttagaagtgtgatgtggtatgattaccataaatcagacttaattattttcccttttacaagggaacagggcatcctgaattttagagcctttcagcaataagaagggatgttggtgagctttgatcctcttttggttttgcagttgttaggagtttttgctggcattttgaatatgctgctttcagaaaaaccaaggaagttttaaaattgcttcctggtccttagaggactaaaaacaagaccctcattcccactttcatttccactctagcaaaaactgggcttgcgtttttctccaactcctcgtttatatcctcccttccatgtccaagccttccattcctaagtgggattggctcagttttgcccatccatatggcagcatctctaatagctcttgtacagggtatcagatattgtgccttttggtgccaggttcaaagtcaagtgccgatctatgaaccagtgtacaaaaaaaaaaaaatccaggtatttgaaggagagacgctccattgtgaataaagagctcataccagctcctaagccctattaagaagaggcctggtcctctaatgccttgtttccatttcagttgttctttgagagacagaatgatgtactaaccattcgtgattattaagatagggttgggtcagggcttagggagggggcagaaatattggggatagaaaaaaaatctgatcattcctcagtgctacccatttctgtcctgtgtgggctgcttagctagacagcaggagaataaagtacaccgagaaccataatgaaaaaaccttccgtgtgttttgtcatgttttgttccagggaagcagttgatgagtgctgttactaatgctttctcccagatccattcagtggtggagaggaggaaaatgggctggttggatgtggtcttggtgccttgcagttactctgcactggttatgcatttaattctcctcttttctagttaaccttttgccagtgggttttccatagtctgggtatttgtccttatatcagttataccacctaaggcaactgggtgcaaaatgcattctgttcactcactgtctgggccttccccaccctagtcttggcacattccttcaagaatgtagttaccgtctgcttgggaagatgtcagtgcaaatgtgaagataatgggcatcggactaggctttggtttgccacaagtggcagctgcctgtatcaattacatttattaattttgcttttcatttttcccagttctcctcaccccccctttgttgaaatgttggacttgctgtcagaggcaactgtaatattgccttagggacttgtggagaaggggaattgctcagtgtagtgttttaactttcagaaccaagcaatctatttactcttacaaatatttaagaagtgtgttagtccaactttaagaaaaatccaaactcatcagcttttgatagcatcttggtttttgaaacaacttcaatctgtaattggcattcagaatgcccttggcatgccagtctgtgatggcatttaagacctgtaaaacacttgagcccaactcgattaaccaaaaccgataaccaccacctttatcttctaaataaagtccgctttattttta

SEQ ID NO: 101713 - DNA, 1902 bp, Homo sapiens
ctccctcgctccctccctgcgcgccgcctctcactcacagcctcccttccttctttctccctccgcctcccgagcaccagcgcgctctgagctgcccccagggtccctcccccgccgccagcagcccatttggagggaggaagtaagggaagaggagaggaaggggagccggaccgactacccagacagagccggtgaatgggtttgtggtgacccccgccccccaccccaccctcccttcccacccgacccccaacccccatccccagttcgagccgccgcccgaaaggccgggccgtcgtcttaggaggagtcgccgccgccgccacctccgccatggagctgatcaccattctcgagaagaccgtgtctcccgatcggctggagctggaagcggcgcagaagttcctggagcgtgcggccgtggagaacctgcccactttccttgtggaactgtccagagtgctggcaaatccaggaaacagtcaggttgccagagttgcagctggtctacaaatcaagaactctttgacatctaaagatccagatatcaaggcacaatatcagcagaggtggcttgctattgatgctaatgctcgacgagaagtcaagaactatgttttgcagacattgggtacagaaacttaccggcctagttctgcctcacagtgtgtggctggtattgcttgtgcagagatcccagtaaaccagtggccagaactcattcctcagctggtggccaatgtcacaaaccccaacagcacagagcacatgaaggagtcgacattggaagccatcggttatatttgccaagatatagacccagagcagctacaagataaatccaatgagattctgactgccataatccaggggatgaggaaagaagagcctagtaataatgtgaagctagctgctacgaatgcactcctgaactcattggagttcaccaaagcaaactttgataaagagtctgaaaggcactttattatgcaggtggtctgtgaagccacacagtgtccagatacgagggtacgagtggctgctttacagaatctggtgaagataatgtccttatattatcagtacatggagacatatatgggtcctgctctttttgcaatcacaatcgaagcaatgaaaagtgacattgatgaggtggctttacaagggatagaattctggtccaatgtctgtgatgaggaaatggatttggccattgaagcttcagaggcagcagaacaaggacggccccctgagcacaccagcaagttttatgcgaagggagcactacagtatctggttccaatcctcacacagacactaactaaacaggacgaaaatgatgatgacgatgactggaacccctgcaaagcagcaggggtgtgcctcatgcttctggccacctgctgtgaagatgacattgtcccacatgtcctccccttcattaaagaacacatcaagaacccagattggcggtaccgggatgcagcagtgatggcttttggttgtatcttggaaggaccagagcccagtcagctcaaaccactagttatacaggctatgcccaccctaatagaattaatgaaagaccccagtgtagttgttcgagatacagctgcatggactgtaggcagaatttgtgagctgcttcctgaagctgccatcaatgatgtctacttggctcccctgctacagtgtctgattgagggtctcagtgctgaacccagagtggcttcaaatgtgtgctgggctttctccagtctggctgaagctgcttatgaagctgcagacgttgctgatgatcaggaagaaccagctacttactgcttatcttcttcatttgaactcatagtcaaaaagtcttcacgacttcgaggggatcctctctagagtcgccgg

SEQ ID NO: 101714 - DNA, 4914 bp, Homo sapiens
tcagaaagggcgaaaggacaatgactcccatgtgtatgcagtcatcgaggacaccatggtatatgggcatctgctacaggattccagcggctccttcctgcagccagaggtggacacctaccggccgttccagggcaccatgggggtctgtcctccctccccacccaccatatgctccagggccccaactgcaaagttggccactgaggagccacctcctcgctcccctcctgagtctgagagtgaaccgtacaccttctcccatcccaacaatggggatgtaagcagcaaggacacagacattcccttactgaacactcaggagcccatggagccagcagaataacttgatccattccagacgctttgctgagtttcataaagcagggcactgagacacccgtccgtgttcctaaccagaaatcctaaagaagaggaattatacagaaggaacagcaggaggttttcctggacaccgccaacttcacattgctcagtggactcattctaagggcaagacattgaaaatgatgaattccaatctggatacagtcatgacagctcatgtgctcctcaacttaggctgtgcggttagccagcctgtaatgagaggagagaggcctgagtcacctagcatagggttgcagcaagccctggattcagagtgttaaacagaggcttgccctcttcaggacaacagttccaattccaaggagcctacctgaggtccctactctcactggggtccccaggatgaaaacgacaatgtgcctttttattattatttatttggtggtcctgtgttatttaagagatcaaatgtataaccacctagctcttttcacctgacttagtaataactcatactaactggtttggatgcctgggttgtgacttctactgaccgctagataaacatgtgcctgtcccccaggtggtgggaataatttacaatctgtccaaccagaaaagaatgtgtgtgtttgagcagcattgacacatatctgctttgataagagacttcctgattctctaggtcggttcgtggttatcccattgtggaaattcatcttgaatcccattgtcctatagtcctagcaataagagaaatttcctcaagtttccatgtgcggttctcctagctgcagcaatactttgacatttaaagagaaatttagagaatattctcatcctctaaaaatgtttaaatatataccaaacagtggccccctgcattagttttctgttgccactgcaacccattacttggtagcttaaaaacaacacattagcttatagtcctggggatcagaattccaaaatggatgtccctgaatgaaaatcaaggtgtcagcagagctgtgctccttctgaaggctctagggagaagccggttccttgccatttcaagcttctagaggctggctgcattcccaggctccagtggctggtcaagcttttctcacatggcatcactgtgacactggccctcccacttccctctttgacttacaaagcccaccaggaagatccaggataatctctccatctaaagatccttcatcatcctggaagagccttttgccatgcaagacaacatagccacaggtggggattaggaccaggacatctttggggtgctgttattctgcctaccacaccttcctgccactgactcccacaggagaggctacaaaatgatctggcgcacagggatgttttgtttagcttgcggactctaacacttaaaaaaaaacccagatcagaagatctggccatgctggggctcacattctcacctagcaacaactggctggagctgggcaccagctctgcctttagaaggggtgtccacttcaccaggtcaccacagcccacactacgccctatgaggagtgtgcacggatgctgaatgtttgggaatgagaggatgagtgagtgaggcttgaaaacacaccacattgaaaatcctgccacagcagcagccgcagccgccaacagcagcgctgttagtgagctaagtaagcactgacttcgtagaaaaccataacatcggccatcttggaaaagagaaaaacaatggagttacttatttaaaaaaaaagaaagaaagttatctcttcccaggagaggctagaagtagcttttctgtcttttggccagtgccgagtggaatgcctggtttgggggaggaggagggactgggttcagctgtggtgctttgttgtaaaaggcagcctggcctttgctactgaggagaaagatggagcctgggtctcaagcccaccttcgctgtacctttgccacatggtactgtatgcttgccagctagaaggagggtcagggattttttacagtctgagaatgagtgtgtgtgagtgaggcggtatccacattctcaacttcaagtcattgcagtttctttttcccagaaaacaaggggttagatgttgcatttcataaaactaaccgaagttctgtctactgatgcagcacaagagatgtaaaaaaaaaaaaaaaaaaaaaaaaaaaaaaaacacacacacagaggaaagacgctctttaggttttgttttgttttttttttttggttttgttttttgttttttttactctagggaaaacactgacgaatggtcagagctcctatcctgatcttttcatcaaggcgcctttcctaataatatggttcaactgtgaatgtagaagtgggggggaggggggagaaaaagaaaactctggcgttagaggatatagaaaaatataagtacaattgttacaaataacgcagacttcaaaaacaaaaaaatcacaacccaaacaaaccaaaatttaaatgatcagaattggcagcacaaagaaaacgccctctcctgacttgtattgtggcagtctgaacgcccccagaaaattgtgccaaagagtttagaaaaataaatatacaataaaagtaaacacatacacacaaaacagcaaacttcaggtaactattttggattgcaaacaggataattaaatgttcaaacaatctgataaaataaccatttggaaactgcttggccttctgttcttttatttgattgactacaatgcggtattggtctcttgctgcacttcaaaagcaaccaacaaaacaaaaacaaaaaaaagtgtgtgtgtgtgaatacacacacacactaactagaagtcttgtgatgaaaatggcacttggaaaaggttttatttttccactgaagttgaaggttaataaaatggtgtcaaacgtcccctggtcacacacttgaatatttttttagaagtgtgatgtggtatgattaccataaatcagacttaattattttcccttttacaagggaacagggcatcctgaattttagagcctttcagcaataagaagggatgttggtgagctttgatcctcttttggttttgcagttgttaggagtttttgctggcattttgaatatgctgctttcagaaaaaccaaggaagttttaaaattgcttcctggtccttagaggactaaaaacaagaccctcattcccactttcatttccactctagcaaaaactgggcttgcgtttttctccaactcctcgtttatatcctcccttccatgtccaagccttccattcctaagtgggattggctcagttttgcccatccatatggcagcatctctaatagctcttgtacagggtatcagatattgtgccttttggtgccaggttcaaagtcaagtgccgatctatgaaccagtgtacaaaaaaaaaaaaatccaggtatttgaaggagagacgctccattgtgaataaagagctcataccagctcctaagccctattaagaagaggcctggtcctctaatgccttgtttccatttcagttgttctttgagagacagaatgatgtactaaccattcgtgattattaagatagggttgggtcagggcttagggagggggcagaaatattggggatagaaaaaaaatctgatcattcctcagtgctacccatttctgtcctgtgtgggctgcttagctagacagcaggagaataaagtacaccgagaaccataatgaaaaaaccttccgtgtgttttgtcatgttttgttccagggaagcagttgatgagtgctgttactaatgctttctcccagatccattcagtggtggagaggaggaaaatgggctggttggatgtggtcttggtgccttgcagttactctgcactggttatgcatttaattctcctcttttctagttaaccttttgccagtgggttttccatagtctgggtatttgtccttatatcagttataccacctaaggcaactgggtgcaaaatgcattctgttcactcactgtctgggccttccccaccctagtcttggcacattccttcaagaatgtagttaccgtctgcttgggaagatgtcagtgcaaatgtgaagataatgggcatcggactaggctttggtttgccacaagtggcagctgcctgtatcaattacatttattaattttgcttttcatttttcccagttctcctcaccccccctttgttgaaatgttggacttgctgtcagaggcaactgtaatattgccttagggacttgtggagaaggggaattgctcagtgtagtgttttaactttcagaaccaagcaatctatttactcttacaaatatttaagaagtgtgttagtccaactttaagaaaaatccaaactcatcagcttttgatagcatcttggtttttgaaacaacttcaatctgtaattggcattcagaatgcccttggcatgccagtctgtgatggcatttaagacctgtaaaacacttgagcccaactcgattaaccaaaaccgataaccaccacctttatcttctaaataaagtccgctttattttta

SEQ ID NO: 101715 - DNA, 3128 bp, Homo sapiens
  misc_feature (2)..(2): n is a, c, g, or t
anccacttcctctcctcccacctccaagcttgatctgttaccattgggatgataacctgaggacccccactggaaatctcccatcttttgaaaaacctggaagtgaggagtgtgcacggatgctgaatgtttgggaatgagaggatgagtgagtgaggcttgaaaacacaccacattgaaaatcctgccacagcagcagccgcagccgccaacagcagcgctgttagtgagctaagtaagcactgacttcgtagaaaaccataacatcggccatcttggaaaagagaaaaacaatggagttacttatttaaaaaaaaagaaagaaagttatctcttcccaggagaggctagaagtagcttttctgtcttttggccagtgccgagtggaatgcctggtttgggggaggaggagggactgggttcagctgtggtgctttgttgtaaaaggcagcctggcctttgctactgaggagaaagatggagcctgggtctcaagcccaccttcgctgtacctttgccacatggtactgtatgcttgccagctagaaggagggtcagggattttttacagtctgagaatgagtgtgtgtgagtgaggcggtatccacattctcaacttcaagtcattgcagtttctttttcccagaaaacaaggggttagatgttgcatttcataaaactaaccgaagttctgtctactgatgcagcacaagagatgtaaaaaaaaaaaaaaaaaaaaaaaaaaaaaaaacacacacacagaggaaagacgctctttaggttttgttttgttttttttttttggttttgttttttgttttttttactctagggaaaacactgacgaatggtcagagctcctatcctgatcttttcatcaaggcgcctttcctaataatatggttcaactgtgaatgtagaagtgggggggaggggggagaaaaagaaaactctggcgttagaggatatagaaaaatataagtacaattgttacaaataacgcagacttcaaaaacaaaaaaatcacaacccaaacaaaccaaaatttaaatgatcagaattggcagcacaaagaaaacgccctctcctgacttgtattgtggcagtctgaacgcccccagaaaattgtgccaaagagtttagaaaaataaatatacaataaaagtaaacacatacacacaaaacagcaaacttcaggtaactattttggattgcaaacaggataattaaatgttcaaacaatctgataaaataaccatttggaaactgcttggccttctgttcttttatttgattgactacaatgcggtattggtctcttgctgcacttcaaaagcaaccaacaaaacaaaaacaaaaaaaagtgtgtgtgtgtgaatacacacacacactaactagaagtcttgtgatgaaaatggcacttggaaaaggttttatttttccactgaagttgaaggttaataaaatggtgtcaaacgtcccctggtcacacacttgaatatttttttagaagtgtgatgtggtatgattaccataaatcagacttaattattttcccttttacaagggaacagggcatcctgaattttagagcctttcagcaataagaagggatgttggtgagctttgatcctcttttggttttgcagttgttaggagtttttgctggcattttgaatatgctgctttcagaaaaaccaaggaagttttaaaattgcttcctggtccttagaggactaaaaacaagaccctcattcccactttcatttccactctagcaaaaactgggcttgcgtttttctccaactcctcgtttatatcctcccttccatgtccaagccttccattcctaagtgggattggctcagttttgcccatccatatggcagcatctctaatagctcttgtacagggtatcagatattgtgccttttggtgccaggttcaaagtcaagtgccgatctatgaaccagtgtacaaaaaaaaaaaaatccaggtatttgaaggagagacgctccattgtgaataaagagctcataccagctcctaagccctattaagaagaggcctggtcctctaatgccttgtttccatttcagttgttctttgagagacagaatgatgtactaaccattcgtgattattaagatagggttgggtcagggcttagggagggggcagaaatattggggatagaaaaaaaatctgatcattcctcagtgctacccatttctgtcctgtgtgggctgcttagctagacagcaggagaataaagtacaccgagaaccataatgaaaaaaccttccgtgtgttttgtcatgttttgttccagggaagcagttgatgagtgctgttactaatgctttctcccagatccattcagtggtggagaggaggaaaatgggctggttggatgtggtcttggtgccttgcagttactctgcactggttatgcatttaattctcctcttttctagttaaccttttgccagtgggttttccatagtctgggtatttgtccttatatcagttataccacctaaggcaactgggtgcaaaatgcattctgttcactcactgtctgggccttccccaccctagtcttggcacattccttcaagaatgtagttaccgtctgcttgggaagatgtcagtgcaaatgtgaagataatgggcatcggactaggctttggtttgccacaagtggcagctgcctgtatcaattacatttattaattttgcttttcatttttcccagttctcctcaccccccctttgttgaaatgttggacttgctgtcagaggcaactgtaatattgccttagggacttgtggagaaggggaattgctcagtgtagtgttttaactttcagaaccaagcaatctatttactcttacaaatatttaagaagtgtgttagtccaactttaagaaaaatccaaactcatcagcttttgatagcatcttggtttttgaaacaacttcaatctgtaattggcattcagaatgcccttggcatgccagtctgtgatggcatttaagacctgtaaaacacttgagcccaactcgattaaccaaaaccgataaccaccacctttatcttctaaataaagtccgctttattttta

SEQ ID NO: 101716 - DNA, 3141 bp, Homo sapiens
tgcggccgccccaacatcagaatggtaacagatcaagcttggttcatctgttaccattgggatgataacctgaggacccccactggaaatctcccatcttttgaaaaacctggaagtgaggagtgtgcacggatgctgaatgtttgggaatgagaggatgagtgagtgaggcttgaaaacacaccacattgaaaatcctgccacagcagcagccgcagccgccaacagcagcgctgttagtgagctaagtaagcactgacttcgtagaaaaccataacatcggccatcttggaaaagagaaaaacaatggagttacttatttaaaaaaaaagaaagaaagttatctcttcccaggagaggctagaagtagcttttctgtcttttggccagtgccgagtggaatgcctggtttgggggaggaggagggactgggttcagctgtggtgctttgttgtaaaaggcagcctggcctttgctactgaggagaaagatggagcctgggtctcaagcccaccttcgctgtacctttgccacatggtactgtatgcttgccagctagaaggagggtcagggattttttacagtctgagaatgagtgtgtgtgagtgaggcggtatccacattctcaacttcaagtcattgcagtttctttttcccagaaaacaaggggttagatgttgcatttcataaaactaaccgaagttctgtctactgatgcagcacaagagatgtaaaaaaaaaaaaaaaaaaaaaaaaaaaaaaaacacacacacagaggaaagacgctctttaggttttgttttgttttttttttttggttttgttttttgttttttttactctagggaaaacactgacgaatggtcagagctcctatcctgatcttttcatcaaggcgcctttcctaataatatggttcaactgtgaatgtagaagtgggggggaggggggagaaaaagaaaactctggcgttagaggatatagaaaaatataagtacaattgttacaaataacgcagacttcaaaaacaaaaaaatcacaacccaaacaaaccaaaatttaaatgatcagaattggcagcacaaagaaaacgccctctcctgacttgtattgtggcagtctgaacgcccccagaaaattgtgccaaagagtttagaaaaataaatatacaataaaagtaaacacatacacacaaaacagcaaacttcaggtaactattttggattgcaaacaggataattaaatgttcaaacaatctgataaaataaccatttggaaactgcttggccttctgttcttttatttgattgactacaatgcggtattggtctcttgctgcacttcaaaagcaaccaacaaaacaaaaacaaaaaaaagtgtgtgtgtgtgaatacacacacacactaactagaagtcttgtgatgaaaatggcacttggaaaaggttttatttttccactgaagttgaaggttaataaaatggtgtcaaacgtcccctggtcacacacttgaatatttttttagaagtgtgatgtggtatgattaccataaatcagacttaattattttcccttttacaagggaacagggcatcctgaattttagagcctttcagcaataagaagggatgttggtgagctttgatcctcttttggttttgcagttgttaggagtttttgctggcattttgaatatgctgctttcagaaaaaccaaggaagttttaaaattgcttcctggtccttagaggactaaaaacaagaccctcattcccactttcatttccactctagcaaaaactgggcttgcgtttttctccaactcctcgtttatatcctcccttccatgtccaagccttccattcctaagtgggattggctcagttttgcccatccatatggcagcatctctaatagctcttgtacagggtatcagatattgtgccttttggtgccaggttcaaagtcaagtgccgatctatgaaccagtgtacaaaaaaaaaaaaatccaggtatttgaaggagagacgctccattgtgaataaagagctcataccagctcctaagccctattaagaagaggcctggtcctctaatgccttgtttccatttcagttgttctttgagagacagaatgatgtactaaccattcgtgattattaagatagggttgggtcagggcttagggagggggcagaaatattggggatagaaaaaaaatctgatcattcctcagtgctacccatttctgtcctgtgtgggctgcttagctagacagcaggagaataaagtacaccgagaaccataatgaaaaaaccttccgtgtgttttgtcatgttttgttccagggaagcagttgatgagtgctgttactaatgctttctcccagatccattcagtggtggagaggaggaaaatgggctggttggatgtggtcttggtgccttgcagttactctgcactggttatgcatttaattctcctcttttctagttaaccttttgccagtgggttttccatagtctgggtatttgtccttatatcagttataccacctaaggcaactgggtgcaaaatgcattctgttcactcactgtctgggccttccccaccctagtcttggcacattccttcaagaatgtagttaccgtctgcttgggaagatgtcagtgcaaatgtgaagataatgggcatcggactaggctttggtttgccacaagtggcagctgcctgtatcaattacatttattaattttgcttttcatttttcccagttctcctcaccccccctttgttgaaatgttggacttgctgtcagaggcaactgtaatattgccttagggacttgtggagaaggggaattgctcagtgtagtgttttaactttcagaaccaagcaatctatttactcttacaaatatttaagaagtgtgttagtccaactttaagaaaaatccaaactcatcagcttttgatagcatcttggtttttgaaacaacttcaatctgtaattggcattcagaatgcccttggcatgccagtctgtgatggcatttaagacctgtaaaacacttgagcccaactcgattaaccaaaaccgataaccaccacctttatcttctaaataaagtccgctttattttta

SEQ ID NO: 101717 - DNA, 3222 bp, Homo sapiens
gatcatctgaatttatactgaatgagttactgtaagtacgtattgacagaattacacggtactttcctctaggtgatctgtgaaaatgttcgctaattcacgtgacccggagtaccccacgaaatcatgcaaaagtggtccccgggttaacccgggacccccactggaaatctcccatcttttgaaaaacctggaagtgaggagtgtgcacggatgctgaatgtttgggaatgagaggatgagtgagtgaggcttgaaaacacaccacattgaaaatcctgccacagcagcagccgcagccgccaacagcagcgctgttagtgagctaagtaagcactgacttcgtagaaaaccataacatcggccatcttggaaaagagaaaaacaatggagttacttatttaaaaaaaaagaaagaaagttatctcttcccaggagaggctagaagtagcttttctgtcttttggccagtgccgagtggaatgcctggtttgggggaggaggagggactgggttcagctgtggtgctttgttgtaaaaggcagcctggcctttgctactgaggagaaagatggagcctgggtctcaagcccaccttcgctgtacctttgccacatggtactgtatgcttgccagctagaaggagggtcagggattttttacagtctgagaatgagtgtgtgtgagtgaggcggtatccacattctcaacttcaagtcattgcagtttctttttcccagaaaacaaggggttagatgttgcatttcataaaactaaccgaagttctgtctactgatgcagcacaagagatgtaaaaaaaaaaaaaaaaaaaaaaaaaaaaaaaacacacacacagaggaaagacgctctttaggttttgttttgttttttttttttggttttgttttttgttttttttactctagggaaaacactgacgaatggtcagagctcctatcctgatcttttcatcaaggcgcctttcctaataatatggttcaactgtgaatgtagaagtgggggggaggggggagaaaaagaaaactctggcgttagaggatatagaaaaatataagtacaattgttacaaataacgcagacttcaaaaacaaaaaaatcacaacccaaacaaaccaaaatttaaatgatcagaattggcagcacaaagaaaacgccctctcctgacttgtattgtggcagtctgaacgcccccagaaaattgtgccaaagagtttagaaaaataaatatacaataaaagtaaacacatacacacaaaacagcaaacttcaggtaactattttggattgcaaacaggataattaaatgttcaaacaatctgataaaataaccatttggaaactgcttggccttctgttcttttatttgattgactacaatgcggtattggtctcttgctgcacttcaaaagcaaccaacaaaacaaaaacaaaaaaaagtgtgtgtgtgtgaatacacacacacactaactagaagtcttgtgatgaaaatggcacttggaaaaggttttatttttccactgaagttgaaggttaataaaatggtgtcaaacgtcccctggtcacacacttgaatatttttttagaagtgtgatgtggtatgattaccataaatcagacttaattattttcccttttacaagggaacagggcatcctgaattttagagcctttcagcaataagaagggatgttggtgagctttgatcctcttttggttttgcagttgttaggagtttttgctggcattttgaatatgctgctttcagaaaaaccaaggaagttttaaaattgcttcctggtccttagaggactaaaaacaagaccctcattcccactttcatttccactctagcaaaaactgggcttgcgtttttctccaactcctcgtttatatcctcccttccatgtccaagccttccattcctaagtgggattggctcagttttgcccatccatatggcagcatctctaatagctcttgtacagggtatcagatattgtgccttttggtgccaggttcaaagtcaagtgccgatctatgaaccagtgtacaaaaaaaaaaaaatccaggtatttgaaggagagacgctccattgtgaataaagagctcataccagctcctaagccctattaagaagaggcctggtcctctaatgccttgtttccatttcagttgttctttgagagacagaatgatgtactaaccattcgtgattattaagatagggttgggtcagggcttagggagggggcagaaatattggggatagaaaaaaaatctgatcattcctcagtgctacccatttctgtcctgtgtgggctgcttagctagacagcaggagaataaagtacaccgagaaccataatgaaaaaaccttccgtgtgttttgtcatgttttgttccagggaagcagttgatgagtgctgttactaatgctttctcccagatccattcagtggtggagaggaggaaaatgggctggttggatgtggtcttggtgccttgcagttactctgcactggttatgcatttaattctcctcttttctagttaaccttttgccagtgggttttccatagtctgggtatttgtccttatatcagttataccacctaaggcaactgggtgcaaaatgcattctgttcactcactgtctgggccttccccaccctagtcttggcacattccttcaagaatgtagttaccgtctgcttgggaagatgtcagtgcaaatgtgaagataatgggcatcggactaggctttggtttgccacaagtggcagctgcctgtatcaattacatttattaattttgcttttcatttttcccagttctcctcaccccccctttgttgaaatgttggacttgctgtcagaggcaactgtaatattgccttagggacttgtggagaaggggaattgctcagtgtagtgttttaactttcagaaccaagcaatctatttactcttacaaatatttaagaagtgtgttagtccaactttaagaaaaatccaaactcatcagcttttgatagcatcttggtttttgaaacaacttcaatctgtaattggcattcagaatgcccttggcatgccagtctgtgatggcatttaagacctgtaaaacacttgagcccaactcgattaaccaaaaccgataaccaccacctttatcttctaaataaagtccgctttattttta

SEQ ID NO: 101718 - DNA, 2160 bp, Homo sapiens
ctccctcgctccctccctgcgcgccgcctctcactcacagcctcccttccttctttctccctccgcctcccgagcaccagcgcgctctgagctgcccccagggtccctcccccgccgccagcagcccatttggagggaggaagtaagggaagaggagaggaaggggagccggaccgactacccagacagagccggtgaatgggtttgtggtgacccccgccccccaccccaccctcccttcccacccgacccccaacccccatccccagttcgagccgccgcccgaaaggccgggccgtcgtcttaggaggagtcgccgccgccgccacctccgccatggagctgatcaccattctcgagaagaccgtgtctcccgatcggctggagctggaagcggcgcagaagttcctggagcgtgcggccgtggagaacctgcccactttccttgtggaactgtccagagtgctggcaaatccaggaaacagtcaggttgccagagttgcagctggtctacaaatcaagaactctttgacatctaaagatccagatatcaaggcacaatatcagcagaggtggcttgctattgatgctaatgctcgacgagaagtcaagaactatgttttgcagacattgggtacagaaacttaccggcctagttctgcctcacagtgtgtggctggtattgcttgtgcagagatcccagtaaaccagtggccagaactcattcctcagctggtggccaatgtcacaaaccccaacagcacagagcacatgaaggagtcgacattggaagccatcggttatatttgccaagatatagacccagagcagctacaagataaatccaatgagattctgactgccataatccaggggatgaggaaagaagagcctagtaataatgtgaagctagctgctacgaatgcactcctgaactcattggagttcaccaaagcaaactttgataaagagtctgaaaggcactttattatgcaggtggtctgtgaagccacacagtgtccagatacgagggtacgagtggctgctttacagaatctggtgaagataatgtccttatattatcagtacatggagacatatatgggtcctgctctttttgcaatcacaatcgaagcaatgaaaagtgacattgatgaggtggctttacaagggatagaattctggtccaatgtctgtgatgaggaaatggatttggccattgaagcttcagaggcagcagaacaaggacggccccctgagcacaccagcaagttttatgcgaagggagcactacagtatctggttccaatcctcacacagacactaactaaacaggacgaaaatgatgatgacgatgactggaacccctgcaaagcagcaggggtgtgcctcatgcttctggccacctgctgtgaagatgacattgtcccacatgtcctccccttcattaaagaacacatcaagaacccagattggcggtaccgggatgcagcagtgatggcttttggttgtatcttggaaggaccagagcccagtcagctcaaaccactagttatacaggctatgcccaccctaatagaattaatgaaagaccccagtgtagttgttcgagatacagctgcatggactgtaggcagaatttgtgagctgcttcctgaagctgccatcaatgatgtctacttggctcccctgctacagtgtctgattgagggtctcagtgctgaacccagagtggcttcaaatgtgtgctgggtaagggattttcttgctggtgagaaaaggagcttgcctgcgccactggcaagaaagtagaaggtgtgggagagaaatcaatctgcctcactggaatgctttttctgattttctttctaatttattcaattaaaatgtgggggagattccaactgcaagagccagtgggaacacttgacttatggttactggttcctgaaccacttagaacagtcatggtaacccagtggggaaactatctggacttgggttgctttcttgaattgcttggggacaagaagttttgattaaggtagagagtttttggctgtaagaagtatcattgctgagtagagggcaagagggaaggaaggtaggcagcctaaatgctgagtcagtataggctaatgtaattggttaaggggagga

SEQ ID NO: 101719 - DNA, 2908 bp, Homo sapiens
  misc_feature (2)..(2): n is a, c, g, or t
  misc_feature (36)..(36): n is a, c, g, or t
  misc_feature (59)..(59): n is a, c, g, or t
  misc_feature (64)..(64): n is a, c, g, or t
tnactccccttttttcccttcctccctcccctcccntcccctccccttccttccctttngtttncttccttcctttcctttccttccctttccctttcccttccttctttaccttcctttccttcctttccttctgtcttttctgtcttttggccagtgccgagtggaatgcctggtttgggggaggaggagggactgggttcagctgtggtgctttgttgtaaaaggcagcctggcctttgctactgaggagaaagatggagcctgggtctcaagcccaccttcgctgtacctttgccacatggtactgtatgcttgccagctagaaggagggtcagggattttttacagtctgagaatgagtgtgtgtgagtgaggcggtatccacattctcaacttcaagtcattgcagtttctttttcccagaaaacaaggggttagatgttgcatttcataaaactaaccgaagttctgtctactgatgcagcacaagagatgtaaaaaaaaaaaaaaaaaaaaaaaaaaaaaaaacacacacacagaggaaagacgctctttaggttttgttttgttttttttttttggttttgttttttgttttttttactctagggaaaacactgacgaatggtcagagctcctatcctgatcttttcatcaaggcgcctttcctaataatatggttcaactgtgaatgtagaagtgggggggaggggggagaaaaagaaaactctggcgttagaggatatagaaaaatataagtacaattgttacaaataacgcagacttcaaaaacaaaaaaatcacaacccaaacaaaccaaaatttaaatgatcagaattggcagcacaaagaaaacgccctctcctgacttgtattgtggcagtctgaacgcccccagaaaattgtgccaaagagtttagaaaaataaatatacaataaaagtaaacacatacacacaaaacagcaaacttcaggtaactattttggattgcaaacaggataattaaatgttcaaacaatctgataaaataaccatttggaaactgcttggccttctgttcttttatttgattgactacaatgcggtattggtctcttgctgcacttcaaaagcaaccaacaaaacaaaaacaaaaaaaagtgtgtgtgtgtgaatacacacacacactaactagaagtcttgtgatgaaaatggcacttggaaaaggttttatttttccactgaagttgaaggttaataaaatggtgtcaaacgtcccctggtcacacacttgaatatttttttagaagtgtgatgtggtatgattaccataaatcagacttaattattttcccttttacaagggaacagggcatcctgaattttagagcctttcagcaataagaagggatgttggtgagctttgatcctcttttggttttgcagttgttaggagtttttgctggcattttgaatatgctgctttcagaaaaaccaaggaagttttaaaattgcttcctggtccttagaggactaaaaacaagaccctcattcccactttcatttccactctagcaaaaactgggcttgcgtttttctccaactcctcgtttatatcctcccttccatgtccaagccttccattcctaagtgggattggctcagttttgcccatccatatggcagcatctctaatagctcttgtacagggtatcagatattgtgccttttggtgccaggttcaaagtcaagtgccgatctatgaaccagtgtacaaaaaaaaaaaaatccaggtatttgaaggagagacgctccattgtgaataaagagctcataccagctcctaagccctattaagaagaggcctggtcctctaatgccttgtttccatttcagttgttctttgagagacagaatgatgtactaaccattcgtgattattaagatagggttgggtcagggcttagggagggggcagaaatattggggatagaaaaaaaatctgatcattcctcagtgctacccatttctgtcctgtgtgggctgcttagctagacagcaggagaataaagtacaccgagaaccataatgaaaaaaccttccgtgtgttttgtcatgttttgttccagggaagcagttgatgagtgctgttactaatgctttctcccagatccattcagtggtggagaggaggaaaatgggctggttggatgtggtcttggtgccttgcagttactctgcactggttatgcatttaattctcctcttttctagttaaccttttgccagtgggttttccatagtctgggtatttgtccttatatcagttataccacctaaggcaactgggtgcaaaatgcattctgttcactcactgtctgggccttccccaccctagtcttggcacattccttcaagaatgtagttaccgtctgcttgggaagatgtcagtgcaaatgtgaagataatgggcatcggactaggctttggtttgccacaagtggcagctgcctgtatcaattacatttattaattttgcttttcatttttcccagttctcctcaccccccctttgttgaaatgttggacttgctgtcagaggcaactgtaatattgccttagggacttgtggagaaggggaattgctcagtgtagtgttttaactttcagaaccaagcaatctatttactcttacaaatatttaagaagtgtgttagtccaactttaagaaaaatccaaactcatcagcttttgatagcatcttggtttttgaaacaacttcaatctgtaattggcattcagaatgcccttggcatgccagtctgtgatggcatttaagacctgtaaaacacttgagcccaactcgattaaccaaaaccgataaccaccacctttatcttctaaataaagtccgctttattttta

SEQ ID NO: 101720 - DNA, 2124 bp, Homo sapiens
ctccctcgctccctccctgcgcgccgcctctcactcacagcctcccttccttctttctccctccgcctcccgagcaccagcgcgctctgagctgcccccagggtccctcccccgccgccagcagcccatttggagggaggaagtaagggaagaggagaggaaggggagccggaccgactacccagacagagccggtgaatgggtttgtggtgacccccgccccccaccccaccctcccttcccacccgacccccaacccccatccccagttcgagccgccgcccgaaaggccgggccgtcgtcttaggaggagtcgccgccgccgccacctccgccatggagctgatcaccattctcgagaagaccgtgtctcccgatcggctggagctggaagcggcgcagaagttcctggagcgtgcggccgtggagaacctgcccactttccttgtggaactgtccagagtgctggcaaatccaggaaacagtcaggttgccagagttgcagctggtctacaaatcaagaactctttgacatctaaagatccagatatcaaggcacaatatcagcagaggtggcttgctattgatgctaatgctcgacgagaagtcaagaactatgttttgcagacattgggtacagaaacttaccggcctagttctgcctcacagtgtgtggctggtattgcttgtgcagagatcccagtaaaccagtggccagaactcattcctcagctggtggccaatgtcacaaaccccaacagcacagagcacatgaaggagtcgacattggaagccatcggttatatttgccaagatatagacccagagcagctacaagataaatccaatgagattctgactgccataatccaggggatgaggaaagaagagcctagtaataatgtgaagctagctgctacgaatgcactcctgaactcattggagttcaccaaagcaaactttgataaagagtctgaaaggcactttattatgcaggtggtctgtgaagccacacagtgtccagatacgagggtacgagtggctgctttacagaatctggtgaagataatgtccttatattatcagtacatggagacatatatgggtcctgctctttttgcaatcacaatcgaagcaatgaaaagtgacattgatgaggtggctttacaagggatagaattctggtccaatgtctgtgatgaggaaatggatttggccattgaagcttcagaggcagcagaacaaggacggccccctgagcacaccagcaagttttatgcgaagggagcactacagtatctggttccaatcctcacacagacactaactaaacaggacgaaaatgatgatgacgatgactggaacccctgcaaagcagcaggggtgtgcctcatgcttctggccacctgctgtgaagatgacattgtcccacatgtcctccccttcattaaagaacacatcaagaacccagattggcggtaccgggatgcagcagtgatggcttttggttgtatcttggaaggaccagagcccagtcagctcaaaccactagttatacaggtgaaactgagggatttttggagtagaaagtaggatatttattgtttaaacttaaagcatatctttatttttcaaaacaaaactgtaaattgtcatctacaaagattatctctagatacttgtttacttttaatgagggtaaaatatatttcttaggtttttaattacataagtcagcatgatccagagacatgtgaaagaagccaaaagagaaaagtcatctttaatttcattgcccagaaataccactcttaactctgtatttatccttgaagctttttcctatgtgcatgtgtgtgcaacaggctcttcctgtgcagattgttttataacttgtttcttcatttaatactatgttgtaaacatttcccaataatttttttttgcacctagcactgattccccataatttttaataatggcattattattctattctttggacaaaatgtcttttatgtaatgaaaatgttcttatggaaatgttgtgcttgttttgctattacaagtcgtgccattgcactccagcctgggcaacgagcgaaactctatctcaaaaaaaaa

SEQ ID NO: 101721 - DNA, 2742 bp, Homo sapiens
gttttagccagtctggacagagctatgatggcagttcagctgtggtgctttgttgtaaaaggcagcctggcctttgctactgaggagaaagatggagcctgggtctcaagcccaccttcgctgtacctttgccacatggtactgtatgcttgccagctagaaggagggtcagggattttttacagtctgagaatgagtgtgtgtgagtgaggcggtatccacattctcaacttcaagtcattgcagtttctttttcccagaaaacaaggggttagatgttgcatttcataaaactaaccgaagttctgtctactgatgcagcacaagagatgtaaaaaaaaaaaaaaaaaaaaaaaaaaaaaaaacacacacacagaggaaagacgctctttaggttttgttttgttttttttttttggttttgttttttgttttttttactctagggaaaacactgacgaatggtcagagctcctatcctgatcttttcatcaaggcgcctttcctaataatatggttcaactgtgaatgtagaagtgggggggaggggggagaaaaagaaaactctggcgttagaggatatagaaaaatataagtacaattgttacaaataacgcagacttcaaaaacaaaaaaatcacaacccaaacaaaccaaaatttaaatgatcagaattggcagcacaaagaaaacgccctctcctgacttgtattgtggcagtctgaacgcccccagaaaattgtgccaaagagtttagaaaaataaatatacaataaaagtaaacacatacacacaaaacagcaaacttcaggtaactattttggattgcaaacaggataattaaatgttcaaacaatctgataaaataaccatttggaaactgcttggccttctgttcttttatttgattgactacaatgcggtattggtctcttgctgcacttcaaaagcaaccaacaaaacaaaaacaaaaaaaagtgtgtgtgtgtgaatacacacacacactaactagaagtcttgtgatgaaaatggcacttggaaaaggttttatttttccactgaagttgaaggttaataaaatggtgtcaaacgtcccctggtcacacacttgaatatttttttagaagtgtgatgtggtatgattaccataaatcagacttaattattttcccttttacaagggaacagggcatcctgaattttagagcctttcagcaataagaagggatgttggtgagctttgatcctcttttggttttgcagttgttaggagtttttgctggcattttgaatatgctgctttcagaaaaaccaaggaagttttaaaattgcttcctggtccttagaggactaaaaacaagaccctcattcccactttcatttccactctagcaaaaactgggcttgcgtttttctccaactcctcgtttatatcctcccttccatgtccaagccttccattcctaagtgggattggctcagttttgcccatccatatggcagcatctctaatagctcttgtacagggtatcagatattgtgccttttggtgccaggttcaaagtcaagtgccgatctatgaaccagtgtacaaaaaaaaaaaaatccaggtatttgaaggagagacgctccattgtgaataaagagctcataccagctcctaagccctattaagaagaggcctggtcctctaatgccttgtttccatttcagttgttctttgagagacagaatgatgtactaaccattcgtgattattaagatagggttgggtcagggcttagggagggggcagaaatattggggatagaaaaaaaatctgatcattcctcagtgctacccatttctgtcctgtgtgggctgcttagctagacagcaggagaataaagtacaccgagaaccataatgaaaaaaccttccgtgtgttttgtcatgttttgttccagggaagcagttgatgagtgctgttactaatgctttctcccagatccattcagtggtggagaggaggaaaatgggctggttggatgtggtcttggtgccttgcagttactctgcactggttatgcatttaattctcctcttttctagttaaccttttgccagtgggttttccatagtctgggtatttgtccttatatcagttataccacctaaggcaactgggtgcaaaatgcattctgttcactcactgtctgggccttccccaccctagtcttggcacattccttcaagaatgtagttaccgtctgcttgggaagatgtcagtgcaaatgtgaagataatgggcatcggactaggctttggtttgccacaagtggcagctgcctgtatcaattacatttattaattttgcttttcatttttcccagttctcctcaccccccctttgttgaaatgttggacttgctgtcagaggcaactgtaatattgccttagggacttgtggagaaggggaattgctcagtgtagtgttttaactttcagaaccaagcaatctatttactcttacaaatatttaagaagtgtgttagtccaactttaagaaaaatccaaactcatcagcttttgatagcatcttggtttttgaaacaacttcaatctgtaattggcattcagaatgcccttggcatgccagtctgtgatggcatttaagacctgtaaaacacttgagcccaactcgattaaccaaaaccgataaccaccacctttatcttctaaataaagtccgctttattttta

SEQ ID NO: 101722 - DNA, 2368 bp, Homo sapiens
agtactctgacatccttataccttatgcgtgggatgtgctaggaaatgggcaagaggacagtcagtgggccaggatcggagccacacccaagtgctaaggcctaagcagacccccatgaggggtacaggcccagccaggggtgccagccatgtgcctctgcctaggcaatggcccagaggagctagcaaacttggtaaatatagaaaaataaaaaccttggatacaattgttacaaataacgcagacttcaaaaacaaaaaaatcacaacccaaacaaaccaaaatttaaatgatcagaattggcagcacaaagaaaacgccctctcctgacttgtattgtggcagtctgaacgcccccagaaaattgtgccaaagagtttagaaaaataaatatacaataaaagtaaacacatacacacaaaacagcaaacttcaggtaactattttggattgcaaacaggataattaaatgttcaaacaatctgataaaataaccatttggaaactgcttggccttctgttcttttatttgattgactacaatgcggtattggtctcttgctgcacttcaaaagcaaccaacaaaacaaaaacaaaaaaaagtgtgtgtgtgtgaatacacacacacactaactagaagtcttgtgatgaaaatggcacttggaaaaggttttatttttccactgaagttgaaggttaataaaatggtgtcaaacgtcccctggtcacacacttgaatatttttttagaagtgtgatgtggtatgattaccataaatcagacttaattattttcccttttacaagggaacagggcatcctgaattttagagcctttcagcaataagaagggatgttggtgagctttgatcctcttttggttttgcagttgttaggagtttttgctggcattttgaatatgctgctttcagaaaaaccaaggaagttttaaaattgcttcctggtccttagaggactaaaaacaagaccctcattcccactttcatttccactctagcaaaaactgggcttgcgtttttctccaactcctcgtttatatcctcccttccatgtccaagccttccattcctaagtgggattggctcagttttgcccatccatatggcagcatctctaatagctcttgtacagggtatcagatattgtgccttttggtgccaggttcaaagtcaagtgccgatctatgaaccagtgtacaaaaaaaaaaaaatccaggtatttgaaggagagacgctccattgtgaataaagagctcataccagctcctaagccctattaagaagaggcctggtcctctaatgccttgtttccatttcagttgttctttgagagacagaatgatgtactaaccattcgtgattattaagatagggttgggtcagggcttagggagggggcagaaatattggggatagaaaaaaaatctgatcattcctcagtgctacccatttctgtcctgtgtgggctgcttagctagacagcaggagaataaagtacaccgagaaccataatgaaaaaaccttccgtgtgttttgtcatgttttgttccagggaagcagttgatgagtgctgttactaatgctttctcccagatccattcagtggtggagaggaggaaaatgggctggttggatgtggtcttggtgccttgcagttactctgcactggttatgcatttaattctcctcttttctagttaaccttttgccagtgggttttccatagtctgggtatttgtccttatatcagttataccacctaaggcaactgggtgcaaaatgcattctgttcactcactgtctgggccttccccaccctagtcttggcacattccttcaagaatgtagttaccgtctgcttgggaagatgtcagtgcaaatgtgaagataatgggcatcggactaggctttggtttgccacaagtggcagctgcctgtatcaattacatttattaattttgcttttcatttttcccagttctcctcaccccccctttgttgaaatgttggacttgctgtcagaggcaactgtaatattgccttagggacttgtggagaaggggaattgctcagtgtagtgttttaactttcagaaccaagcaatctatttactcttacaaatatttaagaagtgtgttagtccaactttaagaaaaatccaaactcatcagcttttgatagcatcttggtttttgaaacaacttcaatctgtaattggcattcagaatgcccttggcatgccagtctgtgatggcatttaagacctgtaaaacacttgagcccaactcgattaaccaaaaccgataaccaccacctttatcttctaaataaagtccgctttattttta

SEQ ID NO: 101723 - DNA, 1512 bp, Homo sapiens
  misc_feature (28)..(28): n is a, c, g, or t
cccccaaaaaaagggaaaaaattttttnccggggggggcccaacgagggctggcattttgaatatgctgctttcagaaaaaccaaggaagttttaaaattgcttcctggtccttagaggactaaaaacaagaccctcattcccactttcatttccactctagcaaaaactgggcttgcgtttttctccaactcctcgtttatatcctcccttccatgtccaagccttccattcctaagtgggattggctcagttttgcccatccatatggcagcatctctaatagctcttgtacagggtatcagatattgtgccttttggtgccaggttcaaagtcaagtgccgatctatgaaccagtgtacaaaaaaaaaaaaatccaggtatttgaaggagagacgctccattgtgaataaagagctcataccagctcctaagccctattaagaagaggcctggtcctctaatgccttgtttccatttcagttgttctttgagagacagaatgatgtactaaccattcgtgattattaagatagggttgggtcagggcttagggagggggcagaaatattggggatagaaaaaaaatctgatcattcctcagtgctacccatttctgtcctgtgtgggctgcttagctagacagcaggagaataaagtacaccgagaaccataatgaaaaaaccttccgtgtgttttgtcatgttttgttccagggaagcagttgatgagtgctgttactaatgctttctcccagatccattcagtggtggagaggaggaaaatgggctggttggatgtggtcttggtgccttgcagttactctgcactggttatgcatttaattctcctcttttctagttaaccttttgccagtgggttttccatagtctgggtatttgtccttatatcagttataccacctaaggcaactgggtgcaaaatgcattctgttcactcactgtctgggccttccccaccctagtcttggcacattccttcaagaatgtagttaccgtctgcttgggaagatgtcagtgcaaatgtgaagataatgggcatcggactaggctttggtttgccacaagtggcagctgcctgtatcaattacatttattaattttgcttttcatttttcccagttctcctcaccccccctttgttgaaatgttggacttgctgtcagaggcaactgtaatattgccttagggacttgtggagaaggggaattgctcagtgtagtgttttaactttcagaaccaagcaatctatttactcttacaaatatttaagaagtgtgttagtccaactttaagaaaaatccaaactcatcagcttttgatagcatcttggtttttgaaacaacttcaatctgtaattggcattcagaatgcccttggcatgccagtctgtgatggcatttaagacctgtaaaacacttgagcccaactcgattaaccaaaaccgataaccaccacctttatcttctaaataaagtccgctttattttta

SEQ ID NO: 101724 - DNA, 1328 bp, Homo sapiens
agataccaagacagagcttctctcccttccatgtccaagccttccattcctaagtgggattggctcagttttgcccatccatatggcagcatctctaatagctcttgtacagggtatcagatattgtgccttttggtgccaggttcaaagtcaagtgccgatctatgaaccagtgtacaaaaaaaaaaaaatccaggtatttgaaggagagacgctccattgtgaataaagagctcataccagctcctaagccctattaagaagaggcctggtcctctaatgccttgtttccatttcagttgttctttgagagacagaatgatgtactaaccattcgtgattattaagatagggttgggtcagggcttagggagggggcagaaatattggggatagaaaaaaaatctgatcattcctcagtgctacccatttctgtcctgtgtgggctgcttagctagacagcaggagaataaagtacaccgagaaccataatgaaaaaaccttccgtgtgttttgtcatgttttgttccagggaagcagttgatgagtgctgttactaatgctttctcccagatccattcagtggtggagaggaggaaaatgggctggttggatgtggtcttggtgccttgcagttactctgcactggttatgcatttaattctcctcttttctagttaaccttttgccagtgggttttccatagtctgggtatttgtccttatatcagttataccacctaaggcaactgggtgcaaaatgcattctgttcactcactgtctgggccttccccaccctagtcttggcacattccttcaagaatgtagttaccgtctgcttgggaagatgtcagtgcaaatgtgaagataatgggcatcggactaggctttggtttgccacaagtggcagctgcctgtatcaattacatttattaattttgcttttcatttttcccagttctcctcaccccccctttgttgaaatgttggacttgctgtcagaggcaactgtaatattgccttagggacttgtggagaaggggaattgctcagtgtagtgttttaactttcagaaccaagcaatctatttactcttacaaatatttaagaagtgtgttagtccaactttaagaaaaatccaaactcatcagcttttgatagcatcttggtttttgaaacaacttcaatctgtaattggcattcagaatgcccttggcatgccagtctgtgatggcatttaagacctgtaaaacacttgagcccaactcgattaaccaaaaccgataaccaccacctttatcttctaaataaagtccgctttattttta

SEQ ID NO: 101725 - DNA, 974 bp, Homo sapiens
tccataatgtgtgcccacacggggcagaaatattggggatagaaaaaaaatctgatcattcctcagtgctacccatttctgtcctgtgtgggctgcttagctagacagcaggagaataaagtacaccgagaaccataatgaaaaaaccttccgtgtgttttgtcatgttttgttccagggaagcagttgatgagtgctgttactaatgctttctcccagatccattcagtggtggagaggaggaaaatgggctggttggatgtggtcttggtgccttgcagttactctgcactggttatgcatttaattctcctcttttctagttaaccttttgccagtgggttttccatagtctgggtatttgtccttatatcagttataccacctaaggcaactgggtgcaaaatgcattctgttcactcactgtctgggccttccccaccctagtcttggcacattccttcaagaatgtagttaccgtctgcttgggaagatgtcagtgcaaatgtgaagataatgggcatcggactaggctttggtttgccacaagtggcagctgcctgtatcaattacatttattaattttgcttttcatttttcccagttctcctcaccccccctttgttgaaatgttggacttgctgtcagaggcaactgtaatattgccttagggacttgtggagaaggggaattgctcagtgtagtgttttaactttcagaaccaagcaatctatttactcttacaaatatttaagaagtgtgttagtccaactttaagaaaaatccaaactcatcagcttttgatagcatcttggtttttgaaacaacttcaatctgtaattggcattcagaatgcccttggcatgccagtctgtgatggcatttaagacctgtaaaacacttgagcccaactcgattaaccaaaaccgataaccaccacctttatcttctaaataaagtccgctttattttta

SEQ ID NO: 101726 - DNA, 744 bp, Homo sapiens
gcattgtggtagtgcctgtgaatagccactgcactttagtctgggcaatacagaccctgtctcttaagaacagaagaaggactgcttctgtcgtgaagctccttatggcagtcttttggaggggattgattccagcaccctcctcaggtaccaaaatcctcagatgttcaagtctgttacataaaatggtgtagtatttgcatataacctatgcacatcctcccatatactttaaatcatctctagaatacttacaatacctaattcaatgtaaatgctatattaatagttggtatactgtattaagggaatgatgacaagaaaaaaaggtgtacatgcaccttttggtgcagtacagatgcaaccatccattttttttcctctaaatattttcaatccatagttgtttgaatccacagatgtggaacccatggctgcagagggctgactgtatattcattgcacttctctgcttgtacaggacccagagcagctacaagataaatccaatgagattctgactgccataatccaggggatgaggaaagaagagcctagtaataatgtgaagctagctgctacgaatgcactcctgaactcattggagttcaccaaagcaaactttgataaagaggtaagttttttgacaataaggtatagattcagacagtaagggatgaaagagttgaatgaaagttttttgttttgttttcttaagtttatggtttagaaagtaccacctac

SEQ ID NO: 101727 - DNA, 648 bp, Homo sapiens
tttttcctctaaatattttcaatccatagttgtttgaatccacagatgtggaacccatggctgcagagggctgactgtatattcattgcacttctctgcttgtacaggacccagagcagctacaagataaatccaatgagattctgactgccataatccaggggatgaggaaagaagagcctagtaataatgtgaagctagctgctacgaatgcactcctgaactcattggagttcaccaaagcaaactttgataaagaggtaagttttttgacaataaggtatagattcagacagtaagggatgaaagagttgaatgaaagttttttgttttgttttcttaagtttatggtttagaaagtaccacctacttaaaagtatttgtttccagtttagtcgagttcgtattgtgtgagatatccccatggagtgtttgccgtttctcatcatgcttttggaaataaagtgtttctaagcttaggtttttccttttgcagtccaaagtgtggaatgttgttgggtttttttaaattatagggcatggtggtgcatactggtactccagctacttcagaggctaaggcgggaggattgcttgagtccagttattcaaggccagcctgggcaacaaagtcagatatcgtccctt

SEQ ID NO: 101728 - DNA, 379 bp, Homo sapiens
gatcttgaactcttactcatttcacagaatgttcttcggaaagtgcaacatcaagatgctttgcagatctctgatgtggttatggcctccctgttaaggatgttccaaagcacagctgggtctgggggagtacaagaggatgccctgatggcagttagcacactggtggaaggtcggtgagaaatactgtctggtcagggaatgtctttggaatgtaggcatttcagtggccttaaataattgtcacccaggctggagtgcagtggcacgatcttggcgcactgcagccttgaaatcgtgggctcacatgatccttccacttcagtgcccccacagtagctgggactaacagatgcacaccaccatgcccagctaattt

SEQ ID NO: 101729 - DNA, 1134 bp, Homo sapiens
  misc_feature (220)..(220): n is a, c, g, or t
  misc_feature (1076)..(1076): n is a, c, g, or t
  misc_feature (1083)..(1083): n is a, c, g, or t
  misc_feature (1094)..(1094): n is a, c, g, or t
  misc_feature (1098)..(1098): n is a, c, g, or t
  misc_feature (1104)..(1104): n is a, c, g, or t
  misc_feature (1109)..(1109): n is a, c, g, or t
ggtcactgtcatatgtggggtatgtgtggggaatggggcacgtggaatgatcagttccttcgtatgtgaagtcaggaaaggcttctggaaccagggagttatagacgttatatggagttatagaaacacagtggaaggggtggcgttagatactgttcctgcctcaggtgagtctgactgggtctcagtcttttctcatagagaagaagaatggctaatnccaggtttgtttggcagctgtgggcttagtgggagacttgtgccgtgccctgcaatccaacatcatacctttctgtgacgaggtgatgcagctgcttctggaaaatttggggaatgagaacgtccacaggtctgtgaagccgcagattctgtcagtgtttggtgatattgcccttgctattggaggagagtttaaaaaatacttagaggttgtattgaatactcttcagcaggcctcccaagcccaggtggacaagtcagactatgacatggtggattatctgaatgagctaagggaaagctgcttggaagcctatactggaatcgtccagggattaaagggggatcaggagaacgtacacccggatgtgatgctggtacaacccagagtagaatttattctgtctttcattgaccacattgctggagatgaggatcacacagatggagtagtagcttgtgctgctggactaataggggacttatgtacagcatttgggaaggatgtactgaaattagtagaagctaggccaatgatccatgaattgttaactgaagggcggagatcgaagactaacaaagcaaaaacccttgctacatgggcaacaaaagaactgaggaaactgaagaaccaagcttgatctgttaccattgggatgataacctgaggacccccactggaaatctcccatcttttgaaaaacctggaagtgaggagtgtgcacggatgctgaatgtttgggaatgagaggatgagtgagtgaggcttgaaaacacaccacattgaaaatcctgccacagagagcggcgcgcaaaggaaggctggtatgagtaagtagcctgttcgtaaacacatnggcctgngaagaaaccgngttnttttanaaaanaaacgttctccggagagaaaacttt

SEQ ID NO: 101730 - DNA, 919 bp, Homo sapiens
caataagcgtaggagagctggattaaatcggcagagggaaacacccagtgtagttgttcgagatacagctgcatggactgtaggcagaatttgtgagctgcttcctgaagctgccatcaatgatgtctacttggctcccctgctacagtgtctgattgagggtctcagtgctgaacccagagtggcttcaaatgtgtgctgggctttctccagtctggctgaagctgcttatgaagctgcagacgttgctgatgatcaggaagaaccagctacttactgcttatcttcttcatttgaactcatagttcagaagctcctagagactacagacagacctgatggacaccagaacaacctgaggagttctgcatatgaatctctgatggaaattgtgaaaaacagtgccaaggattgttatcctgctgtccagaaaacgactttggtcatcatggaacgactgcaacaggttcttcagatggagtcacatatccagagcacatccgatagaatccagttcaatgaccttcagtctttactctgtgcaactcttcagaatgttcttcggaaagtgcaacatcaagatgctttgcagatctctgatgtggttatggcctccctgttaaggatgttccaaagcacagctgggtctgggggagtacaagaggatgccctgatggcagttagcacactggtggaagtgtggggtggttgaatttcttcaagtacattggagggcctttaaccctttctggggattggatttaaaacttatgatgaatacaggttcgttggcagctgtggggtaagtgggagaattgtgccggccctgtattcaaattataacttttgtgagaggtgagagtggttttggaacattggcatggaattcccgttgtgaacgagtttgcagatgggaatc

SEQ ID NO: 101731 - DNA, 837 bp, Homo sapiens
ctccctcgctccctccctgcgcgccgcctctcactcacagcctcccttccttctttctccctccgcctcccgagcaccagcgcgctctgagctgcccccagggtccctcccccgccgccagcagcccatttggagggaggaagtaagggaagaggagaggaaggggagccggaccgactacccagacagagccggtgaatgggtttgtggtgacccctcccacgtgaggacaagaagaacagtcatacctggaggagggcaaggagatcctggtgggcgaatgtgggccagactgtcgatgatccctacgccacctttgatcaagatgctgacagataagtgactgccgctatgccctctatgatgcaacctatgagacccaaggagagcaagaaggaggatctggctgtaatcttctggtgacccccgagatctgagccccttcaggagcataaatgaatttatgccagactccataggacgccgatcaagacagaagctgacagggatcaagcatgtacattgcaagcaacactgactacgaaggaggtcagaagagaaccaggctgaaaccgtggcagaagaatgctgggtgggcatgcgccgccaatctcccttggaggtgcacagccttttgtcatgccccatactagaaaccccttgacgtgggagcattttggtaagtcccaaaaccttggcccttggggagttgcaaagatgcaccttactgcacagaacagaggagctcgagtatccacgaatgtgagggaacgctatacccatgtgcctaaaaacccaagcttggatacatccatcaaacttcaagataggatacac

SEQ ID NO: 101732 - DNA, 664 bp, Homo sapiens
  misc_feature (589)..(589): n is a, c, g, or t
  misc_feature (616)..(616): n is a, c, g, or t
tatgcggtgctgccaaggagaacctgcccactttccttgtggaactgtccagagtgctggcaaatccaggaaacagtcaggttgccagagttgcagctggtctacaaatcaagaactctttgacatctaaagatccagatatcaaggcacaatatcagcagaggtggcttgctattgatgctaatgctcgacgagaagtcaagaactatgttttgcagacattgggtacagaaacttaccggcctagttctgcctcacagtgtgtggctggtattgcttgtgcagagatccatatctgctgccaagaatactgtattagtgaactagttaagatagaacatttaaaaaatattcagactttgcaagattctaggctgtaaaaaatacaaaggctaaaaacacaaaaaagtttacaaaattttgcaaacccaataaattgaaatgagtaagaaataaagcaaaactactactgcaggagaggtcaaagagtatcagtaagttttaaaataataacactaaaatgtaataaattctacttggagacgcatcatgtctgccaagggggtgccacggacaggtcagcattcanttcttcaaatcggcacgggtaatgganggtttagaagtcgattccttcatagaaagaatcgatctcaatacttgg

SEQ ID NO: 101733 - DNA, 6009 bp, Homo sapiens
ctccctcgctccctccctgcgcgccgcctctcactcacagcctcccttccttctttctccctccgcctcccgagcaccagcgcgctctgagctgcccccagggtccctcccccgccgccagcagcccatttggagggaggaagtaagggaagaggagaggaaggggagccggaccgactacccagacagagccggtgaatgggtttgtggtgacccccgccccccaccccaccctcccttcccacccgacccccaacccccatccccagttcgagccgccgcccgaaaggccgggccgtcgtcttaggaggagtcgccgccgccgccacctccgccatggagctgatcaccattctcgagaagaccgtgtctcccgatcggctggagctggaagcggcgcagaagttcctggagcgtgcggccgtggagaacctgcccactttccttgtggaactgtccagagtgctggcaaatccaggaaacagtcaggttgccagagttgcagctggtctacaaatcaagaactctttgacatctaaagatccagatatcaaggcacaatatcagcagaggtggcttgctattgatgctaatgctcgacgagaagtcaagaactatgttttgcagacattgggtacagaaacttaccggcctagttctgcctcacagtgtgtggctggtattgcttgtgcagagatcccagtaaaccagtggccagaactcattcctcagctggtggccaatgtcacaaaccccaacagcacagagcacatgaaggagtcgacattggaagccatcggttatatttgccaagatatagacccagagcagctacaagataaatccaatgagattctgactgccataatccaggggatgaggaaagaagagcctagtaataatgtgaagctagctgctacgaatgcactcctgaactcattggagttcaccaaagcaaactttgataaagagtctgaaaggcactttattatgcaggtggtctgtgaagccacacagtgtccagatacgagggtacgagtggctgctttacagaatctggtgaagataatgtccttatattatcagtacatggagacatatatgggtcctgctctttttgcaatcacaatcgaagcaatgaaaagtgacattgatgaggtggctttacaagggatagaattctggtccaatgtctgtgatgaggaaatggatttggccattgaagcttcagaggcagcagaacaaggacggccccctgagcacaccagcaagttttatgcgaagggagcactacagtatctggttccaatcctcacacagacactaactaaacaggacgaaaatgatgatgacgatgactggaacccctgcaaagcagcaggggtgtgcctcatgcttctggccacctgctgtgaagatgacattgtcccacatgtcctccccttcattaaagaacacatcaagaacccagattggcggtaccgggatgcagcagtgatggcttttggttgtatcttggaaggaccagagcccagtcagctcaaaccactagttatacaggctatgcccaccctaatagaattaatgaaagaccccagtgtagttgttcgagatacagctgcatggactgtaggcagaatttgtgagctgcttcctgaagctgccatcaatgatgtctacttggctcccctgctacagtgtctgattgagggtctcagtgctgaacccagagtggcttcaaatgtgtgctgggctttctccagtctggctgaagctgcttatgaagctgcagacgttgctgatgatcaggaagaaccagctacttactgcttatcttcttcatttgaactcatagttcagaagctcctagagactacagacagacctgatggacaccagaacaacctgaggagttctgcatatgaatctctgatggaaattgtgaaaaacagtgccaaggattgttatcctgctgtccagaaaacgactttggtcatcatggaacgactgcaacaggttcttcagatggagtcacatatccagagcacatccgatagaatccagttcaatgaccttcagtctttactctgtgcaactcttcagaatgttcttcggaaagtgcaacatcaagatgctttgcagatctctgatgtggttatggcctccctgttaaggatgttccaaagcacagctgggtctgggggagtacaagaggatgccctgatggcagttagcacactggtggaagtgttgggtggtgaattcctcaagtacatggaggcctttaaacccttcctgggcattggattaaaaaattatgctgaataccaggtttgtttggcagctgtgggcttagtgggagacttgtgccgtgccctgcaatccaacatcatacctttctgtgacgaggtgatgcagctgcttctggaaaatttggggaatgagaacgtccacaggtctgtgaagccgcagattctgtcagtgtttggtgatattgcccttgctattggaggagagtttaaaaaatacttagaggttgtattgaatactcttcagcaggcctcccaagcccaggtggacaagtcagactatgacatggtggattatctgaatgagctaagggaaagctgcttggaagcctatactggaatcgtccagggattaaagggggatcaggagaacgtacacccggatgtgatgctggtacaacccagagtagaatttattctgtctttcattgaccacattgctggagatgaggatcacacagatggagtagtagcttgtgctgctggactaataggggacttatgtacagcatttgggaaggatgtactgaaattagtagaagctaggccaatgatccatgaattgttaactgaagggcggagatcgaagactaacaaagcaaaaacccttgctacatgggcaacaaaagaactgaggaaactgaagaaccaagcttgatctgttaccattgggatgataacctgaggacccccactggaaatctcccatcttttgaaaaacctggaagtgaggagtgtgcacggatgctgaatgtttgggaatgagaggatgagtgagtgaggcttgaaaacacaccacattgaaaatcctgccacagcagcagccgcagccgccaacagcagcgctgttagtgagctaagtaagcactgacttcgtagaaaaccataacatcggccatcttggaaaagagaaaaacaatggagttacttatttaaaaaaaaagaaagaaagttatctcttcccaggagaggctagaagtagcttttctgtcttttggccagtgccgagtggaatgcctggtttgggggaggaggagggactgggttcagctgtggtgctttgttgtaaaaggcagcctggcctttgctactgaggagaaagatggagcctgggtctcaagcccaccttcgctgtacctttgccacatggtactgtatgcttgccagctagaaggagggtcagggattttttacagtctgagaatgagtgtgtgtgagtgaggcggtatccacattctcaacttcaagtcattgcagtttctttttcccagaaaacaaggggttagatgttgcatttcataaaactaaccgaagttctgtctactgatgcagcacaagagatgtaaaaaaaaaaaaaaaaaaaaaaaaaaaaaaaacacacacacagaggaaagacgctctttaggttttgttttgttttttttttttggttttgttttttgttttttttactctagggaaaacactgacgaatggtcagagctcctatcctgatcttttcatcaaggcgcctttcctaataatatggttcaactgtgaatgtagaagtgggggggaggggggagaaaaagaaaactctggcgttagaggatatagaaaaatataagtacaattgttacaaataacgcagacttcaaaaacaaaaaaatcacaacccaaacaaaccaaaatttaaatgatcagaattggcagcacaaagaaaacgccctctcctgacttgtattgtggcagtctgaacgcccccagaaaattgtgccaaagagtttagaaaaataaatatacaataaaagtaaacacatacacacaaaacagcaaacttcaggtaactattttggattgcaaacaggataattaaatgttcaaacaatctgataaaataaccatttggaaactgcttggccttctgttcttttatttgattgactacaatgcggtattggtctcttgctgcacttcaaaagcaaccaacaaaacaaaaacaaaaaaaagtgtgtgtgtgtgaatacacacacacactaactagaagtcttgtgatgaaaatggcacttggaaaaggttttatttttccactgaagttgaaggttaataaaatggtgtcaaacgtcccctggtcacacacttgaatatttttttagaagtgtgatgtggtatgattaccataaatcagacttaattattttcccttttacaagggaacagggcatcctgaattttagagcctttcagcaataagaagggatgttggtgagctttgatcctcttttggttttgcagttgttaggagtttttgctggcattttgaatatgctgctttcagaaaaaccaaggaagttttaaaattgcttcctggtccttagaggactaaaaacaagaccctcattcccactttcatttccactctagcaaaaactgggcttgcgtttttctccaactcctcgtttatatcctcccttccatgtccaagccttccattcctaagtgggattggctcagttttgcccatccatatggcagcatctctaatagctcttgtacagggtatcagatattgtgccttttggtgccaggttcaaagtcaagtgccgatctatgaaccagtgtacaaaaaaaaaaaaatccaggtatttgaaggagagacgctccattgtgaataaagagctcataccagctcctaagccctattaagaagaggcctggtcctctaatgccttgtttccatttcagttgttctttgagagacagaatgatgtactaaccattcgtgattattaagatagggttgggtcagggcttagggagggggcagaaatattggggatagaaaaaaaatctgatcattcctcagtgctacccatttctgtcctgtgtgggctgcttagctagacagcaggagaataaagtacaccgagaaccataatgaaaaaaccttccgtgtgttttgtcatgttttgttccagggaagcagttgatgagtgctgttactaatgctttctcccagatccattcagtggtggagaggaggtatgcatttaattctcctcttttctagttaaccttttgccagtgggttttccatagtctgggtatttgtccttatatcagttataccacctaaggcaactgggtgcaaaatgcattctgttcactcactgtctgggccttccccaccctagtcttggcacattccttcaagaatgtagttaccgtctgcttgggaagatgtcagtgcaaatgtgaagataatgggcatcggactaggctttggtttgccacaagtggcagctgcctgtatcaattacatttattaattttgcttttcatttttcccagttctcctcaccccccctttgttgaaatgttggacttgctgtcagaggcaactgtaatattgccttagggacttgtggagaaggggaattgctcagtgtagtgttttaactttcagaaccaagcaatctatttactcttacaaatatttaagaagtgtgttagtccaactttaagaaaaatccaaactcatcagcttttgatagcatcttggtttttgaaacaacttcaatctgtaattggcattcagaatgcccttggcatgccagtctgtgatggcatttaagacctgtaaaacacttgagcccaactcgattaaccaaaaccgataaccaccacctttatcttctaaataaagtccgctttattttta

SEQ ID NO: 101734 - DNA, 6010 bp, Homo sapiens
ctccctcgctccctccctgcgcgccgcctctcactcacagcctcccttccttctttctccctccgcctcccgagcaccagcgcgctctgagctgcccccagggtccctcccccgccgccagcagcccatttggagggaggaagtaagggaagaggagaggaaggggagccggaccgactacccagacagagccggtgaatgggtttgtggtgacccccgccccccaccccaccctcccttcccacccgacccccaacccccatccccagttcgagccgccgcccgaaaggccgggccgtcgtcttaggaggagtcgccgccgccgccacctccgccatggagctgatcaccattctcgagaagaccgtgtctcccgatcggctggagctggaagcggcgcagaagttcctggagcgtgcggccgtggagaacctgcccactttccttgtggaactgtccagagtgctggcaaatccaggaaacagtcaggttgccagagttgcagctggtctacaaatcaagaactctttgacatctaaagatccagatatcaaggcacaatatcagcagaggtggcttgctattgatgctaatgctcgacgagaagtcaagaactatgttttgcagacattgggtacagaaacttaccggcctagttctgcctcacagtgtgtggctggtattgcttgtgcagagatcccagtaaaccagtggccagaactcattcctcagctggtggccaatgtcacaaaccccaacagcacagagcacatgaaggagtcgacattggaagccatcggttatatttgccaagatatagacccagagcagctacaagataaatccaatgagattctgactgccataatccaggggatgaggaaagaagagcctagtaataatgtgaagctagctgctacgaatgcactcctgaactcattggagttcaccaaagcaaactttgataaagagtctgaaaggcactttattatgcaggtggtctgtgaagccacacagtgtccagatacgagggtacgagtggctgctttacagaatctggtgaagataatgtccttatattatcagtacatggagacatatatgggtcctgctctttttgcaatcacaatcgaagcaatgaaaagtgacattgatgaggtggctttacaagggatagaattctggtccaatgtctgtgatgaggaaatggatttggccattgaagcttcagaggcagcagaacaaggacggccccctgagcacaccagcaagttttatgcgaagggagcactacagtatctggttccaatcctcacacagacactaactaaacaggacgaaaatgatgatgacgatgactggaacccctgcaaagcagcaggggtgtgcctcatgcttctggccacctgctgtgaagatgacattgtcccacatgtcctccccttcattaaagaacacatcaagaacccagattggcggtaccgggatgcagcagtgatggcttttggttgtatcttggaaggaccagagcccagtcagctcaaaccactagttatacaggctatgcccaccctaatagaattaatgaaagaccccagtgtagttgttcgagatacagctgcatggactgtaggcagaatttgtgagctgcttcctgaagctgccatcaatgatgtctacttggctcccctgctacagtgtctgattgagggtctcagtgctgaacccagagtggcttcaaatgtgtgctgggctttctccagtctggctgaagctgcttatgaagctgcagacgttgctgatgatcaggaagaaccagctacttactgcttatcttcttcatttgaactcatagttcagaagctcctagagactacagacagacctgatggacaccagaacaacctgaggagttctgcatatgaatctctgatggaaattgtgaaaaacagtgccaaggattgttatcctgctgtccagaaaacgactttggtcatcatggaacgactgcaacaggttcttcagatggagtcacatatccagagcacatccgatagaatccagttcaatgaccttcagtctttactctgtgcaactcttcagaatgttcttcggaaagtgcaacatcaagatgctttgcagatctctgatgtggttatggcctccctgttaaggatgttccaaagcacagctgggtctgggggagtacaagaggatgccctgatggcagttagcacactggtggaagtgttgggtggtgaattcctcaagtacatggaggcctttaaacccttcctgggcattggattaaaaaattatgctgaataccaggtttgtttggcagctgtgggcttagtgggagacttgtgccgtgccctgcaatccaacatcatacctttctgtgacgaggtgatgcagctgcttctggaaaatttggggaatgagaacgtccacaggtctgtgaagccgcagattctgtcagtgtttggtgatattgcccttgctattggaggagagtttaaaaaatacttagaggttgtattgaatactcttcagcaggcctcccaagcccaggtggacaagtcagactatgacatggtggattatctgaatgagctaagggaaagctgcttggaagcctatactggaatcgtccagggattaaagggggatcaggagaacgtacacccggatgtgatgctggtacaacccagagtagaatttattctgtctttcattgaccacattgctggagatgaggatcacacagatggagtagtagcttgtgctgctggactaataggggacttatgtacagcatttgggaaggatgtactgaaattagtagaagctaggccaatgatccatgaattgttaactgaagggcggagatcgaagactaacaaagcaaaaacccttgctacatgggcaacaaaagaactgaggaaactgaagaaccaagcttgatctgttaccattgggatgataacctgaggacccccactggaaatctcccatcttttgaaaaacctggaagtgaggagtgtgcacggatgctgaatgtttgggaatgagaggatgagtgagtgaggcttgaaaacacaccacattgaaaatcctgccacagcagcagccgcagccgccaacagcagcgctgttagtgagctaagtaagcactgacttcgtagaaaaccataacatcggccatcttggaaaagagaaaaacaatggagttacttatttaaaaaaaaagaaagaaagttatctcttcccaggagaggctagaagtagcttttctgtcttttggccagtgccgagtggaatgcctggtttgggggaggaggagggactgggttcagctgtggtgctttgttgtaaaaggcagcctggcctttgctactgaggagaaagatggagcctgggtctcaagcccaccttcgctgtacctttgccacatggtactgtatgcttgccagctagaaggagggtcagggattttttacagtctgagaatgagtgtgtgtgagtgaggcggtatccacattctcaacttcaagtcattgcagtttctttttcccagaaaacaaggggttagatgttgcatttcataaaactaaccgaagttctgtctactgatgcagcacaagagatgtaaaaaaaaaaaaaaaaaaaaaaaaaaaaaaaacacacacacagaggaaagacgctctttaggttttgttttgttttttttttttggttttgttttttgttttttttactctagggaaaacactgacgaatggtcagagctcctatcctgatcttttcatcaaggcgcctttcctaataatatggttcaactgtgaatgtagaagtgggggggaggggggagaaaaagaaaactctggcgttagaggatatagaaaaatataagtacaattgttacaaataacgcagacttcaaaaacaaaaaaatcacaacccaaacaaaccaaaatttaaatgatcagaattggcagcacaaagaaaacgccctctcctgacttgtattgtggcagtctgaacgcccccagaaaattgtgccaaagagtttagaaaaataaatatacaataaaagtaaacacatacacacaaaacagcaaacttcaggtaactattttggattgcaaacaggataattaaatgttcaaacaatctgataaaataaccatttggaaactgcttggccttctgttcttttatttgattgactacaatgcggtattggtctcttgctgcacttcaaaagcaaccaacaaaacaaaaacaaaaaaaagtgtgtgtgtgtgaatacacacacacactaactagaagtcttgtgatgaaaatggcacttggaaaaggttttatttttccactgaagttgaaggttaataaaatggtgtcaaacgtcccctggtcacacacttgaatatttttttagaagtgtgatgtggtatgattaccataaatcagacttaattattttcccttttacaagggaacagggcatcctgaattttagagcctttcagcaataagaagggatgttggtgagctttgatcctcttttggttttgcagttgttaggagtttttgctggcattttgaatatgctgctttcagaaaaaccaaggaagttttaaaattgcttcctggtccttagaggactaaaaacaagaccctcattcccactttcatttccactctagcaaaaactgggcttgcgtttttctccaactcctcgtttatatcctcccttccatgtccaagccttccattcctaagtgggattggctcagttttgcccatccatatggcagcatctctaatagctcttgtacagggtatcagatattgtgccttttggtgccaggttcaaagtcaagtgccgatctatgaaccagtgtacaaaaaaaaaaaaactcctaagccctattaagaagaggcctggtcctctaatgccttgtttccatttcagttgttctttgagagacagaatgatgtactaaccattcgtgattattaagatagggttgggtcagggcttagggagggggcagaaatattggggatagaaaaaaaatctgatcattcctcagtgctacccatttctgtcctgtgtgggctgcttagctagacagcaggagaataaagtacaccgagaaccataatgaaaaaaccttccgtgtgttttgtcatgttttgttccagggaagcagttgatgagtgctgttactaatgctttctcccagatccattcagtggtggagaggaggaaaatgggctggttggatgtggtcttggtgccttgcagttactctgcactggttatgcatttaattctcctcttttctagttaaccttttgccagtgggttttccatagtctgggtatttgtccttatatcagttataccacctaaggcaactgggtgcaaaatgcattctgttcactcactgtctgggccttccccaccctagtcttggcacattccttcaagaatgtagttaccgtctgcttgggaagatgtcagtgcaaatgtgaagataatgggcatcggactaggctttggtttgccacaagtggcagctgcctgtatcaattacatttattaattttgcttttcatttttcccagttctcctcaccccccctttgttgaaatgttggacttgctgtcagaggcaactgtaatattgccttagggacttgtggagaaggggaattgctcagtgtagtgttttaactttcagaaccaagcaatctatttactcttacaaatatttaagaagtgtgttagtccaactttaagaaaaatccaaactcatcagcttttgatagcatcttggtttttgaaacaacttcaatctgtaattggcattcagaatgcccttggcatgccagtctgtgatggcatttaagacctgtaaaacacttgagcccaactcgattaaccaaaaccgataaccaccacctttatcttctaaataaagtccgctttattttta

SEQ ID NO: 101735 - DNA, 6039 bp, Homo sapiens
agccaagtaacatatgccagttcaaggctggtttaatcgccagaggtcctcgctctgagcactctgagctgcccccagggtccctcccccgccgccagcagcccatttggagggaggaagtaagggaagaggagaggaaggggagccggaccgactacccagacagagccggtgaatgggtttgtggtgacccccgccccccaccccaccctcccttcccacccgacccccaacccccatccccagttcgagccgccgcccgaaaggccgggccgtcgtcttaggaggagtcgccgccgccgccacctccgccatggagctgatcaccattctcgagaagaccgtgtctcccgatcggctggagctggaagcggcgcagaagttcctggagcgtgcggccgtggagaacctgcccactttccttgtggaactgtccagagtgctggcaaatccaggaaacagtcaggttgccagagttgcagctggtctacaaatcaagaactctttgacatctaaagatccagatatcaaggcacaatatcagcagaggtggcttgctattgatgctaatgctcgacgagaagtcaagaactatgttttgcagacattgggtacagaaacttaccggcctagttctgcctcacagtgtgtggctggtattgcttgtgcagagatcccagtaaaccagtggccagaactcattcctcagctggtggccaatgtcacaaaccccaacagcacagagcacatgaaggagtcgacattggaagccatcggttatatttgccaagatatagacccagagcagctacaagataaatccaatgagattctgactgccataatccaggggatgaggaaagaagagcctagtaataatgtgaagctagctgctacgaatgcactcctgaactcattggagttcaccaaagcaaactttgataaagagtctgaaaggcactttattatgcaggtggtctgtgaagccacacagtgtccagatacgagggtacgagtggctgctttacagaatctggtgaagataatgtccttatattatcagtacatggagacatatatgggtcctgctctttttgcaatcacaatcgaagcaatgaaaagtgacattgatgaggtggctttacaagggatagaattctggtccaatgtctgtgatgaggaaatggatttggccattgaagcttcagaggcagcagaacaaggacggccccctgagcacaccagcaagttttatgcgaagggagcactacagtatctggttccaatcctcacacagacactaactaaacaggacgaaaatgatgatgacgatgactggaacccctgcaaagcagcaggggtgtgcctcatgcttctggccacctgctgtgaagatgacattgtcccacatgtcctccccttcattaaagaacacatcaagaacccagattggcggtaccgggatgcagcagtgatggcttttggttgtatcttggaaggaccagagcccagtcagctcaaaccactagttatacaggctatgcccaccctaatagaattaatgaaagaccccagtgtagttgttcgagatacagctgcatggactgtaggcagaatttgtgagctgcttcctgaagctgccatcaatgatgtctacttggctcccctgctacagtgtctgattgagggtctcagtgctgaacccagagtggcttcaaatgtgtgctgggctttctccagtctggctgaagctgcttatgaagctgcagacgttgctgatgatcaggaagaaccagctacttactgcttatcttcttcatttgaactcatagttcagaagctcctagagactacagacagacctgatggacaccagaacaacctgaggagttctgcatatgaatctctgatggaaattgtgaaaaacagtgccaaggattgttatcctgctgtccagaaaacgactttggtcatcatggaacgactgcaacaggttcttcagatggagtcacatatccagagcacatccgatagaatccagttcaatgaccttcagtctttactctgtgcaactcttcagaatgttcttcggaaagtgcaacatcaagatgctttgcagatctctgatgtggttatggcctccctgttaaggatgttccaaagcacagctgggtctgggggagtacaagaggatgccctgatggcagttagcacactggtggaagtgttgggtggtgaattcctcaagtacatggaggcctttaaacccttcctgggcattggattaaaaaattatgctgaataccaggtttgtttggcagctgtgggcttagtgggagacttgtgccgtgccctgcaatccaacatcatacctttctgtgacgaggtgatgcagctgcttctggaaaatttggggaatgagaacgtccacaggtctgtgaagccgcagattctgtcagtgtttggtgatattgcccttgctattggaggagagtttaaaaaatacttagaggttgtattgaatactcttcagcaggcctcccaagcccaggtggacaagtcagactatgacatggtggattatctgaatgagctaagggaaagctgcttggaagcctatactggaatcgtccagggattaaagggggatcaggagaacgtacacccggatgtgatgctggtacaacccagagtagaatttattctgtctttcattgaccacattgctggagatgaggatcacacagatggagtagtagcttgtgctgctggactaataggggacttatgtacagcatttgggaaggatgtactgaaattagtagaagctaggccaatgatccatgaattgttaactgaagggcggagatcgaagactaacaaagcaaaaacccttgctacatgggcaacaaaagaactgaggaaactgaagaaccaagcttgatctgttaccattgggatgataacctgaggacccccactggaaatctcccatcttttgaaaaacctggaagtgaggagtgtgcacggatgctgaatgtttgggaatgagaggatgagtgagtgaggcttgaaaacacaccacattgaaaatcctgccacagcagcagccgcagccgccaacagcagcgctgttagtgagctaagtaagcactgacttcgtagaaaaccataacatcggccatcttggaaaagagaaaaacaatggagttacttatttaaaaaaaaagaaagaaagttatctcttcccaggagaggctagaagtagcttttctgtcttttggccagtgccgagtggaatgcctggtttgggggaggaggagggactgggttcagctgtggtgctttgttgtaaaaggcagcctggcctttgctactgaggagaaagatggagcctgggtctcaagcccaccttcgctgtacctttgccacatggtactgtatgcttgccagctagaaggagggtcagggattttttacagtctgagaatgagtgtgtgtgagtgaggcggtatccacattctcaacttcaagtcattgcagtttctttttcccagaaaacaaggggttagatgttgcatttcataaaactaaccgaagttctgtctactgatgcagcacaagagatgtaaaaaaaaaaaaaaaaaaaaaaaaaaaaaaaacacacacacagaggaaagacgctctttaggttttgttttgttttttttttttggttttgttttttgttttttttactctagggaaaacactgacgaatggtcagagctcctatcctgatcttttcatcaaggcgcctttcctaataatatggttcaactgtgaatgtagaagtgggggggaggggggagaaaaagaaaactctggcgttagaggatatagaaaaatataagtacaattgttacaaataacgcagacttcaaaaacaaaaaaatcacaacccaaacaaaccaaaatttaaatgatcagaattggcagcacaaagaaaacgccctctcctgacttgtattgtggcagtctgaacgcccccagaaaattgtgccaaagagtttagaaaaataaatatacaataaaagtaaacacatacacacaaaacagcaaacttcaggtaactattttggattgcaaacaggataattaaatgttcaaacaatctgataaaataaccatttggaaactgcttggccttctgttcttttatttgattgactacaatgcggtattggtctcttgctgcacttcaaaagcaaccaacaaaacaaaaacaaaaaaaagtgtgtgtgtgtgaatacacacacacactaactagaagtcttgtgatgaaaatggcacttggaaaaggttttatttttccactgaagttgaaggttaataaaatggtgtcaaacgtcccctggtcacacacttgaatatttttttagaagtgtgatgtggtatgattaccataaatcagacttaattattttcccttttacaagggaacagggcatcctgaattttagagcctttcagcaataagaagggatgttggtgagctttgatcctcttttggttttgcagttgttaggagtttttgctggcattttgaatatgctgctttcagaaaaaccaaggaagttttaaaattgcttcctggtccttagaggactaaaaacaagaccctcattcccactttcatttccactctagcaaaaactgggcttgcgtttttctccaactcctcgtttatatcctcccttccatgtccaagccttccattcctaagtgggattggctcagttttgcccatccatatggcagcatctctaatagctcttgtacagggtatcagatattgtgccttttggtgccaggttcaaagtcaagtgccgatctatgaaccagtgtacaaaaaaaaaaaaatccaggtatttgaaggagagacgctccattgtgaataaagagctcataccagctcctaagccctattaagaagaggcctggtcctctaatgccttgtttccatttcagttgttctttgagagacagaatgatgtactaaccattcgtgattattaagatagggttgggtcagggcttagggagggggcagaaatattggggatagaaaaaaaatctgatcattcctcagtgctacccatttctgtcctgtgtgggctgcttagctagacagcaggagaataaagtacaccgagaaccataatgaaaaaaccttccgtgtgttttgtcatgttttgttccagggaagcagttgatgagtgctgttactaatgctttctcccagatccattcagtggtggagaggaggaaaatgggctggttggatgtggtcttggtgccttgcagttactctgcactggttatgcatttaattctcctcttttctagttaaccttttgccagtgggttttccatagtctgggtatttgtccttatatcagttataccacctaaggcaactgggtgcaaaatgcattctgttcactcactgtctgggccttccccaccctagtcttggcacattccttcaagaatgtagttaccgtctgcttgggaagatgtcagtgcaaatgtgaagataatgggcatcggactaggctttggtttgccacaagtggcagctgcctgtatcaattacatttattaattttgcttttcatttttcccagttctcctcaccccccctttgttgaaatgttggacttgctgtcagaggcaactgtaatattgccttagggacttgtggagaaggggaattgctcagtgtagtgttttaactttcagaaccaagcaatctatttactcttacaaatatttaagaagtgtgttagtccaactttaagaaaaatccaaactcatcagcttttgatagcatcttggtttttgaaacaacttcaatctgtaattggcattcagaatgcccttggcatgccagtctgtgatggcatttaagacctgtaaaacacttgagcccaactcgattaaccaaaaccgataaccaccacctttatcttctaaataaagtccgctttattttta

SEQ ID NO: 101736 - DNA, 5798 bp, Homo sapiens
agccaagtaacatatgccagttcaaggctggtttaatcgccagaggtcctcgctctgagcactctgagctgcccccagggtccctcccccgccgccagcagcccatttggagggaggaagtaagggaagaggagaggaaggggagccggaccgactacccagacagagccgcccactttccttgtggaactgtccagagtgctggcaaatccaggaaacagtcaggttgccagagttgcagctggtctacaaatcaagaactctttgacatctaaagatccagatatcaaggcacaatatcagcagaggtggcttgctattgatgctaatgctcgacgagaagtcaagaactatgttttgcagacattgggtacagaaacttaccggcctagttctgcctcacagtgtgtggctggtattgcttgtgcagagatcccagtaaaccagtggccagaactcattcctcagctggtggccaatgtcacaaaccccaacagcacagagcacatgaaggagtcgacattggaagccatcggttatatttgccaagatatagacccagagcagctacaagataaatccaatgagattctgactgccataatccaggggatgaggaaagaagagcctagtaataatgtgaagctagctgctacgaatgcactcctgaactcattggagttcaccaaagcaaactttgataaagagtctgaaaggcactttattatgcaggtggtctgtgaagccacacagtgtccagatacgagggtacgagtggctgctttacagaatctggtgaagataatgtccttatattatcagtacatggagacatatatgggtcctgctctttttgcaatcacaatcgaagcaatgaaaagtgacattgatgaggtggctttacaagggatagaattctggtccaatgtctgtgatgaggaaatggatttggccattgaagcttcagaggcagcagaacaaggacggccccctgagcacaccagcaagttttatgcgaagggagcactacagtatctggttccaatcctcacacagacactaactaaacaggacgaaaatgatgatgacgatgactggaacccctgcaaagcagcaggggtgtgcctcatgcttctggccacctgctgtgaagatgacattgtcccacatgtcctccccttcattaaagaacacatcaagaacccagattggcggtaccgggatgcagcagtgatggcttttggttgtatcttggaaggaccagagcccagtcagctcaaaccactagttatacaggctatgcccaccctaatagaattaatgaaagaccccagtgtagttgttcgagatacagctgcatggactgtaggcagaatttgtgagctgcttcctgaagctgccatcaatgatgtctacttggctcccctgctacagtgtctgattgagggtctcagtgctgaacccagagtggcttcaaatgtgtgctgggctttctccagtctggctgaagctgcttatgaagctgcagacgttgctgatgatcaggaagaaccagctacttactgcttatcttcttcatttgaactcatagttcagaagctcctagagactacagacagacctgatggacaccagaacaacctgaggagttctgcatatgaatctctgatggaaattgtgaaaaacagtgccaaggattgttatcctgctgtccagaaaacgactttggtcatcatggaacgactgcaacaggttcttcagatggagtcacatatccagagcacatccgatagaatccagttcaatgaccttcagtctttactctgtgcaactcttcagaatgttcttcggaaagtgcaacatcaagatgctttgcagatctctgatgtggttatggcctccctgttaaggatgttccaaagcacagctgggtctgggggagtacaagaggatgccctgatggcagttagcacactggtggaagtgttgggtggtgaattcctcaagtacatggaggcctttaaacccttcctgggcattggattaaaaaattatgctgaataccaggtttgtttggcagctgtgggcttagtgggagacttgtgccgtgccctgcaatccaacatcatacctttctgtgacgaggtgatgcagctgcttctggaaaatttggggaatgagaacgtccacaggtctgtgaagccgcagattctgtcagtgtttggtgatattgcccttgctattggaggagagtttaaaaaatacttagaggttgtattgaatactcttcagcaggcctcccaagcccaggtggacaagtcagactatgacatggtggattatctgaatgagctaagggaaagctgcttggaagcctatactggaatcgtccagggattaaagggggatcaggagaacgtacacccggatgtgatgctggtacaacccagagtagaatttattctgtctttcattgaccacattgctggagatgaggatcacacagatggagtagtagcttgtgctgctggactaataggggacttatgtacagcatttgggaaggatgtactgaaattagtagaagctaggccaatgatccatgaattgttaactgaagggcggagatcgaagactaacaaagcaaaaacccttgctacatgggcaacaaaagaactgaggaaactgaagaaccaagcttgatctgttaccattgggatgataacctgaggacccccactggaaatctcccatcttttgaaaaacctggaagtgaggagtgtgcacggatgctgaatgtttgggaatgagaggatgagtgagtgaggcttgaaaacacaccacattgaaaatcctgccacagcagcagccgcagccgccaacagcagcgctgttagtgagctaagtaagcactgacttcgtagaaaaccataacatcggccatcttggaaaagagaaaaacaatggagttacttatttaaaaaaaaagaaagaaagttatctcttcccaggagaggctagaagtagcttttctgtcttttggccagtgccgagtggaatgcctggtttgggggaggaggagggactgggttcagctgtggtgctttgttgtaaaaggcagcctggcctttgctactgaggagaaagatggagcctgggtctcaagcccaccttcgctgtacctttgccacatggtactgtatgcttgccagctagaaggagggtcagggattttttacagtctgagaatgagtgtgtgtgagtgaggcggtatccacattctcaacttcaagtcattgcagtttctttttcccagaaaacaaggggttagatgttgcatttcataaaactaaccgaagttctgtctactgatgcagcacaagagatgtaaaaaaaaaaaaaaaaaaaaaaaaaaaaaaaacacacacacagaggaaagacgctctttaggttttgttttgttttttttttttggttttgttttttgttttttttactctagggaaaacactgacgaatggtcagagctcctatcctgatcttttcatcaaggcgcctttcctaataatatggttcaactgtgaatgtagaagtgggggggaggggggagaaaaagaaaactctggcgttagaggatatagaaaaatataagtacaattgttacaaataacgcagacttcaaaaacaaaaaaatcacaacccaaacaaaccaaaatttaaatgatcagaattggcagcacaaagaaaacgccctctcctgacttgtattgtggcagtctgaacgcccccagaaaattgtgccaaagagtttagaaaaataaatatacaataaaagtaaacacatacacacaaaacagcaaacttcaggtaactattttggattgcaaacaggataattaaatgttcaaacaatctgataaaataaccatttggaaactgcttggccttctgttcttttatttgattgactacaatgcggtattggtctcttgctgcacttcaaaagcaaccaacaaaacaaaaacaaaaaaaagtgtgtgtgtgtgaatacacacacacactaactagaagtcttgtgatgaaaatggcacttggaaaaggttttatttttccactgaagttgaaggttaataaaatggtgtcaaacgtcccctggtcacacacttgaatatttttttagaagtgtgatgtggtatgattaccataaatcagacttaattattttcccttttacaagggaacagggcatcctgaattttagagcctttcagcaataagaagggatgttggtgagctttgatcctcttttggttttgcagttgttaggagtttttgctggcattttgaatatgctgctttcagaaaaaccaaggaagttttaaaattgcttcctggtccttagaggactaaaaacaagaccctcattcccactttcatttccactctagcaaaaactgggcttgcgtttttctccaactcctcgtttatatcctcccttccatgtccaagccttccattcctaagtgggattggctcagttttgcccatccatatggcagcatctctaatagctcttgtacagggtatcagatattgtgccttttggtgccaggttcaaagtcaagtgccgatctatgaaccagtgtacaaaaaaaaaaaaatccaggtatttgaaggagagacgctccattgtgaataaagagctcataccagctcctaagccctattaagaagaggcctggtcctctaatgccttgtttccatttcagttgttctttgagagacagaatgatgtactaaccattcgtgattattaagatagggttgggtcagggcttagggagggggcagaaatattggggatagaaaaaaaatctgatcattcctcagtgctacccatttctgtcctgtgtgggctgcttagctagacagcaggagaataaagtacaccgagaaccataatgaaaaaaccttccgtgtgttttgtcatgttttgttccagggaagcagttgatgagtgctgttactaatgctttctcccagatccattcagtggtggagaggaggaaaatgggctggttggatgtggtcttggtgccttgcagttactctgcactggttatgcatttaattctcctcttttctagttaaccttttgccagtgggttttccatagtctgggtatttgtccttatatcagttataccacctaaggcaactgggtgcaaaatgcattctgttcactcactgtctgggccttccccaccctagtcttggcacattccttcaagaatgtagttaccgtctgcttgggaagatgtcagtgcaaatgtgaagataatgggcatcggactaggctttggtttgccacaagtggcagctgcctgtatcaattacatttattaattttgcttttcatttttcccagttctcctcaccccccctttgttgaaatgttggacttgctgtcagaggcaactgtaatattgccttagggacttgtggagaaggggaattgctcagtgtagtgttttaactttcagaaccaagcaatctatttactcttacaaatatttaagaagtgtgttagtccaactttaagaaaaatccaaactcatcagcttttgatagcatcttggtttttgaaacaacttcaatctgtaattggcattcagaatgcccttggcatgccagtctgtgatggcatttaagacctgtaaaacacttgagcccaactcgattaaccaaaaccgataaccaccacctttatcttctaaataaagtccgctttattttta

SEQ ID NO: 101737 - DNA, 5289 bp, Homo sapiens
aactaggctagtacgaggccgggtgtgattatattgccaagatatagacccagagcagctacaagataaatccaatgagattctgactgccataatccaggggatgaggaaagaagagcctagtaataatgtgaagctagctgctacgaatgcactcctgaactcattggagttcaccaaagcaaactttgataaagagtctgaaaggcactttattatgcaggtggtctgtgaagccacacagtgtccagatacgagggtacgagtggctgctttacagaatctggtgaagataatgtccttatattatcagtacatggagacatatatgggtcctgctctttttgcaatcacaatcgaagcaatgaaaagtgacattgatgaggtggctttacaagggatagaattctggtccaatgtctgtgatgaggaaatggatttggccattgaagcttcagaggcagcagaacaaggacggccccctgagcacaccagcaagttttatgcgaagggagcactacagtatctggttccaatcctcacacagacactaactaaacaggacgaaaatgatgatgacgatgactggaacccctgcaaagcagcaggggtgtgcctcatgcttctggccacctgctgtgaagatgacattgtcccacatgtcctccccttcattaaagaacacatcaagaacccagattggcggtaccgggatgcagcagtgatggcttttggttgtatcttggaaggaccagagcccagtcagctcaaaccactagttatacaggctatgcccaccctaatagaattaatgaaagaccccagtgtagttgttcgagatacagctgcatggactgtaggcagaatttgtgagctgcttcctgaagctgccatcaatgatgtctacttggctcccctgctacagtgtctgattgagggtctcagtgctgaacccagagtggcttcaaatgtgtgctgggctttctccagtctggctgaagctgcttatgaagctgcagacgttgctgatgatcaggaagaaccagctacttactgcttatcttcttcatttgaactcatagttcagaagctcctagagactacagacagacctgatggacaccagaacaacctgaggagttctgcatatgaatctctgatggaaattgtgaaaaacagtgccaaggattgttatcctgctgtccagaaaacgactttggtcatcatggaacgactgcaacaggttcttcagatggagtcacatatccagagcacatccgatagaatccagttcaatgaccttcagtctttactctgtgcaactcttcagaatgttcttcggaaagtgcaacatcaagatgctttgcagatctctgatgtggttatggcctccctgttaaggatgttccaaagcacagctgggtctgggggagtacaagaggatgccctgatggcagttagcacactggtggaagtgttgggtggtgaattcctcaagtacatggaggcctttaaacccttcctgggcattggattaaaaaattatgctgaataccaggtttgtttggcagctgtgggcttagtgggagacttgtgccgtgccctgcaatccaacatcatacctttctgtgacgaggtgatgcagctgcttctggaaaatttggggaatgagaacgtccacaggtctgtgaagccgcagattctgtcagtgtttggtgatattgcccttgctattggaggagagtttaaaaaatacttagaggttgtattgaatactcttcagcaggcctcccaagcccaggtggacaagtcagactatgacatggtggattatctgaatgagctaagggaaagctgcttggaagcctatactggaatcgtccagggattaaagggggatcaggagaacgtacacccggatgtgatgctggtacaacccagagtagaatttattctgtctttcattgaccacattgctggagatgaggatcacacagatggagtagtagcttgtgctgctggactaataggggacttatgtacagcatttgggaaggatgtactgaaattagtagaagctaggccaatgatccatgaattgttaactgaagggcggagatcgaagactaacaaagcaaaaacccttgctacatgggcaacaaaagaactgaggaaactgaagaaccaagcttgatctgttaccattgggatgataacctgaggacccccactggaaatctcccatcttttgaaaaacctggaagtgaggagtgtgcacggatgctgaatgtttgggaatgagaggatgagtgagtgaggcttgaaaacacaccacattgaaaatcctgccacagcagcagccgcagccgccaacagcagcgctgttagtgagctaagtaagcactgacttcgtagaaaaccataacatcggccatcttggaaaagagaaaaacaatggagttacttatttaaaaaaaaagaaagaaagttatctcttcccaggagaggctagaagtagcttttctgtcttttggccagtgccgagtggaatgcctggtttgggggaggaggagggactgggttcagctgtggtgctttgttgtaaaaggcagcctggcctttgctactgaggagaaagatggagcctgggtctcaagcccaccttcgctgtacctttgccacatggtactgtatgcttgccagctagaaggagggtcagggattttttacagtctgagaatgagtgtgtgtgagtgaggcggtatccacattctcaacttcaagtcattgcagtttctttttcccagaaaacaaggggttagatgttgcatttcataaaactaaccgaagttctgtctactgatgcagcacaagagatgtaaaaaaaaaaaaaaaaaaaaaaaaaaaaaaaacacacacacagaggaaagacgctctttaggttttgttttgttttttttttttggttttgttttttgttttttttactctagggaaaacactgacgaatggtcagagctcctatcctgatcttttcatcaaggcgcctttcctaataatatggttcaactgtgaatgtagaagtgggggggaggggggagaaaaagaaaactctggcgttagaggatatagaaaaatataagtacaattgttacaaataacgcagacttcaaaaacaaaaaaatcacaacccaaacaaaccaaaatttaaatgatcagaattggcagcacaaagaaaacgccctctcctgacttgtattgtggcagtctgaacgcccccagaaaattgtgccaaagagtttagaaaaataaatatacaataaaagtaaacacatacacacaaaacagcaaacttcaggtaactattttggattgcaaacaggataattaaatgttcaaacaatctgataaaataaccatttggaaactgcttggccttctgttcttttatttgattgactacaatgcggtattggtctcttgctgcacttcaaaagcaaccaacaaaacaaaaacaaaaaaaagtgtgtgtgtgtgaatacacacacacactaactagaagtcttgtgatgaaaatggcacttggaaaaggttttatttttccactgaagttgaaggttaataaaatggtgtcaaacgtcccctggtcacacacttgaatatttttttagaagtgtgatgtggtatgattaccataaatcagacttaattattttcccttttacaagggaacagggcatcctgaattttagagcctttcagcaataagaagggatgttggtgagctttgatcctcttttggttttgcagttgttaggagtttttgctggcattttgaatatgctgctttcagaaaaaccaaggaagttttaaaattgcttcctggtccttagaggactaaaaacaagaccctcattcccactttcatttccactctagcaaaaactgggcttgcgtttttctccaactcctcgtttatatcctcccttccatgtccaagccttccattcctaagtgggattggctcagttttgcccatccatatggcagcatctctaatagctcttgtacagggtatcagatattgtgccttttggtgccaggttcaaagtcaagtgccgatctatgaaccagtgtacaaaaaaaaaaaaatccaggtatttgaaggagagacgctccattgtgaataaagagctcataccagctcctaagccctattaagaagaggcctggtcctctaatgccttgtttccatttcagttgttctttgagagacagaatgatgtactaaccattcgtgattattaagatagggttgggtcagggcttagggagggggcagaaatattggggatagaaaaaaaatctgatcattcctcagtgctacccatttctgtcctgtgtgggctgcttagctagacagcaggagaataaagtacaccgagaaccataatgaaaaaaccttccgtgtgttttgtcatgttttgttccagggaagcagttgatgagtgctgttactaatgctttctcccagatccattcagtggtggagaggaggaaaatgggctggttggatgtggtcttggtgccttgcagttactctgcactggttatgcatttaattctcctcttttctagttaaccttttgccagtgggttttccatagtctgggtatttgtccttatatcagttataccacctaaggcaactgggtgcaaaatgcattctgttcactcactgtctgggccttccccaccctagtcttggcacattccttcaagaatgtagttaccgtctgcttgggaagatgtcagtgcaaatgtgaagataatgggcatcggactaggctttggtttgccacaagtggcagctgcctgtatcaattacatttattaattttgcttttcatttttcccagttctcctcaccccccctttgttgaaatgttggacttgctgtcagaggcaactgtaatattgccttagggacttgtggagaaggggaattgctcagtgtagtgttttaactttcagaaccaagcaatctatttactcttacaaatatttaagaagtgtgttagtccaactttaagaaaaatccaaactcatcagcttttgatagcatcttggtttttgaaacaacttcaatctgtaattggcattcagaatgcccttggcatgccagtctgtgatggcatttaagacctgtaaaacacttgagcccaactcgattaaccaaaaccgataaccaccacctttatcttctaaataaagtccgctttattttta

SEQ ID NO: 101738 - DNA, 3486 bp, Homo sapiens
ctccctcgctccctccctgcgcgccgcctctcactcacagcctcccttccttctttctccctccgcctcccgagcaccagcgcgctctgagctgcccccagggtccctcccccgccgccagcagcccatttggagggaggaagtaagggaagaggagaggaaggggagccggaccgactacccagacagagccggtgaatgggtttgtggtgacccccgccccccaccccaccctcccttcccacccgacccccaacccccatccccagttcgagccgccgcccgaaaggccgggccgtcgtcttaggaggagtcgccgccgccgccacctccgccatggagctgatcaccattctcgagaagaccgtgtctcccgatcggctggagctggaagcggcgcagaagttcctggagcgtgcggccgtggagaacctgcccactttccttgtggaactgtccagagtgctggcaaatccaggaaacagtcaggttgccagagttgcagctggtctacaaatcaagaactctttgacatctaaagatccagatatcaaggcacaatatcagcagaggtggcttgctattgatgctaatgctcgacgagaagtcaagaactatgttttgcagacattgggtacagaaacttaccggcctagttctgcctcacagtgtgtggctggtattgcttgtgcagagatcccagtaaaccagtggccagaactcattcctcagctggtggccaatgtcacaaaccccaacagcacagagcacatgaaggagtcgacattggaagccatcggttatatttgccaagatatagacccagagcagctacaagataaatccaatgagattctgactgccataatccaggggatgaggaaagaagagcctagtaataatgtgaagctagctgctacgaatgcactcctgaactcattggagttcaccaaagcaaactttgataaagagtctgaaaggcactttattatgcaggtggtctgtgaagccacacagtgtccagatacgagggtacgagtggctgctttacagaatctggtgaagataatgtccttatattatcagtacatggagacatatatgggtcctgctctttttgcaatcacaatcgaagcaatgaaaagtgacattgatgaggtggctttacaagggatagaattctggtccaatgtctgtgatgaggaaatggatttggccattgaagcttcagaggcagcagaacaaggacggccccctgagcacaccagcaagttttatgcgaagggagcactacagtatctggttccaatcctcacacagacactaactaaacaggacgaaaatgatgatgacgatgactggaacccctgcaaagcagcaggggtgtgcctcatgcttctggccacctgctgtgaagatgacattgtcccacatgtcctccccttcattaaagaacacatcaagaacccagattggcggtaccgggatgcagcagtgatggcttttggttgtatcttggaaggaccagagcccagtcagctcaaaccactagttatacaggctatgcccaccctaatagaattaatgaaagaccccagtgtagttgttcgagatacagctgcatggactgtaggcagaatttgtgagctgcttcctgaagctgccatcaatgatgtctacttggctcccctgctacagtgtctgattgagggtctcagtgctgaacccagagtggcttcaaatgtgtgctgggctttctccagtctggctgaagctgcttatgaagctgcagacgttgctgatgatcaggaagaaccagctacttactgcttatcttcttcatttgaactcatagttcagaagctcctagagactacagacagacctgatggacaccagaacaacctgaggagttctgcatatgaatctctgatggaaattgtgaaaaacagtgccaaggattgttatcctgctgtccagaaaacgactttggtcatcatggaacgactgcaacaggttcttcagatggagtcacatatccagagcacatccgatagaatccagttcaatgaccttcagtctttactctgtgcaactcttcagaatgttcttcggaaagtgcaacatcaagatgctttgcagatctctgatgtggttatggcctccctgttaaggatgttccaaagcacagctgggtctgggggagtacaagaggatgccctgatggcagttagcacactggtggaagtgttgggtggtgaattcctcaagtacatggaggcctttaaacccttcctgggcattggattaaaaaattatgctgaataccaggtttgtttggcagctgtgggcttagtgggagacttgtgccgtgccctgcaatccaacatcatacctttctgtgacgaggtgatgcagctgcttctggaaaatttggggaatgagaacgtccacaggtctgtgaagccgcagattctgtcagtgtttggtgatattgcccttgctattggaggagagtttaaaaaatacttagaggttgtattgaatactcttcagcaggcctcccaagcccaggtggacaagtcagactatgacatggtggattatctgaatgagctaagggaaagctgcttggaagcctatactggaatcgtccagggattaaagggggatcaggagaacgtacacccggatgtgatgctggtacaacccagagtagaatttattctgtctttcattgaccacattgctggagatgaggatcacacagatggagtagtagcttgtgctgctggactaataggggacttatgtacagcatttgggaaggatgtactgaaattagtagaagctaggccaatgatccatgaattgttaactgaagggcggagatcgaagactaacaaagcaaaaacccttgctacatgggcaacaaaagaactgaggaaactgaagaaccaagcttgatctgttaccattgggatgataacctgaggacccccactggaaatctcccatcttttgaaaaacctggaagtgaggagtgtgcacggatgctgaatgtttgggaatgagaggatgagtgagtgaggcttgaaaacacaccacattgaaaatcctgccacagcagcagccgcagccgccaacagcagcgctgttagtgagctaagtaagcactgacttcgtagaaaaccataacatcggccatcttggaaaagagaaaaacaatggagttacttatttaaaaaaaaaggttctcttccaggaaagttagaataggtgtttgtcttggcagtgcaatggatgctggtgggaaggaaggaggtcagtgggggtgttgaagagtgcttggatgaggaatgggtggttaacccttgcgtcttgcttgtgtgtgcgaaagggggttaggaaagggggggggaatagaggttcaagggggttaaggtgtggggaaaaaaagttgggggtgtgctgtgtttgggttga

SEQ ID NO: 101739 - DNA, 5990 bp, Homo sapiens
ctccctcgctccctccctgcgcgccgcctctcactcacagcctcccttccttctttctccctccgcctcccgagcaccagcgcgctctgagctgcccccagggtccctcccccgccgccagcagcccatttggagggaggaagtaagggaagaggagaggaaggggagccggaccgactacccagacagagccggtgaatgggtttgtggtgacccccgccccccaccccaccctcccttcccacccgacccccaacccccatccccagttcgagccgccgcccgaaaggccgggccgtcgtcttaggaggagtcgccgccgccgccacctccgccatggagctgatcaccattctcgagaagaccgtgtctcccgatcggctggagctggaagcggcgcagaagttcctggagcgtgcggccgtggagaacctgcccactttccttgtggaactgtccagagtgctggcaaatccaggaaacagtcaggttgccagagttgcagctggtctacaaatcaagaactctttgacatctaaagatccagatatcaaggcacaatatcagcagaggtggcttgctattgatgctaatgctcgacgagaagtcaagaactatgttttgcagacattgggtacagaaacttaccggcctagttctgcctcacagtgtgtggctggtattgcttgtgcagagatcccagtaaaccagtggccagaactcattcctcagctggtggccaatgtcacaaaccccaacagcacagagcacatgaaggagtcgacattggaagccatcggttatatttgccaagatatagacccagagcagctacaagataaatccaatgagattctgactgccataatccaggggatgaggaaagaagagcctagtaataatgtgaagctagctgctacgaatgcactcctgaactcattggagttcaccaaagcaaactttgataaagagtctgaaaggcactttattatgcaggtggtctgtgaagccacacagtgtccagatacgagggtacgagtggctgctttacagaatctggtgaagataatgtccttatattatcagtacatggagacatatatgggtcctgctctttttgcaatcacaatcgaagcaatgaaaagtgacattgatgaggtggctttacaagggatagaattctggtccaatgtctgtgatgaggaaatggatttggccattgaagcttcagaggcagcagaacaaggacggccccctgagcacaccagcaagttttatgcgaagggagcactacagtatctggttccaatcctcacacagacactaactaaacaggacgaaaatgatgatgacgatgactggaacccctgcaaagcagcaggggtgtgcctcatgcttctggccacctgctgtgaagatgacattgtcccacatgtcctccccttcattaaagaacacatcaagaacccagattggcggtaccgggatgcagcagtgatggcttttggttgtatcttggaaggaccagagcccagtcagctcaaaccactagttatacaggctatgcccaccctaatagaattaatgaaagaccccagtgtagttgttcgagatacagctgcatggactgtaggcagaatttgtgagctgcttcctgaagctgccatcaatgatgtctacttggctcccctgctacagtgtctgattgagggtctcagtgctgaacccagagtggcttcaaatgtgtgctgggctttctccagtctggctgaagctgcttatgaagctgcagacgttgctgatgatcaggaagaaccagctacttactgcttatcttcttcatttgaactcatagttcagaagctcctagagactacagacagacctgatggacaccagaacaacctgaggagttctgcatatgaatctctgatggaaattgtgaaaaacagtgccaaggattgttatcctgctgtccagaaaacgactttggtcatcatggaacgactgcaacaggttcttcagatggagaatgttcttcggaaagtgcaacatcaagatgctttgcagatctctgatgtggttatggcctccctgttaaggatgttccaaagcacagctgggtctgggggagtacaagaggatgccctgatggcagttagcacactggtggaagtgttgggtggtgaattcctcaagtacatggaggcctttaaacccttcctgggcattggattaaaaaattatgctgaataccaggtttgtttggcagctgtgggcttagtgggagacttgtgccgtgccctgcaatccaacatcatacctttctgtgacgaggtgatgcagctgcttctggaaaatttggggaatgagaacgtccacaggtctgtgaagccgcagattctgtcagtgtttggtgatattgcccttgctattggaggagagtttaaaaaatacttagaggttgtattgaatactcttcagcaggcctcccaagcccaggtggacaagtcagactatgacatggtggattatctgaatgagctaagggaaagctgcttggaagcctatactggaatcgtccagggattaaagggggatcaggagaacgtacacccggatgtgatgctggtacaacccagagtagaatttattctgtctttcattgaccacattgctggagatgaggatcacacagatggagtagtagcttgtgctgctggactaataggggacttatgtacagcatttgggaaggatgtactgaaattagtagaagctaggccaatgatccatgaattgttaactgaagggcggagatcgaagactaacaaagcaaaaacccttgctacatgggcaacaaaagaactgaggaaactgaagaaccaagcttgatctgttaccattgggatgataacctgaggacccccactggaaatctcccatcttttgaaaaacctggaagtgaggagtgtgcacggatgctgaatgtttgggaatgagaggatgagtgagtgaggcttgaaaacacaccacattgaaaatcctgccacagcagcagccgcagccgccaacagcagcgctgttagtgagctaagtaagcactgacttcgtagaaaaccataacatcggccatcttggaaaagagaaaaacaatggagttacttatttaaaaaaaaagaaagaaagttatctcttcccaggagaggctagaagtagcttttctgtcttttggccagtgccgagtggaatgcctggtttgggggaggaggagggactgggttcagctgtggtgctttgttgtaaaaggcagcctggcctttgctactgaggagaaagatggagcctgggtctcaagcccaccttcgctgtacctttgccacatggtactgtatgcttgccagctagaaggagggtcagggattttttacagtctgagaatgagtgtgtgtgagtgaggcggtatccacattctcaacttcaagtcattgcagtttctttttcccagaaaacaaggggttagatgttgcatttcataaaactaaccgaagttctgtctactgatgcagcacaagagatgtaaaaaaaaaaaaaaaaaaaaaaaaaaaaaaaacacacacacagaggaaagacgctctttaggttttgttttgttttttttttttggttttgttttttgttttttttactctagggaaaacactgacgaatggtcagagctcctatcctgatcttttcatcaaggcgcctttcctaataatatggttcaactgtgaatgtagaagtgggggggaggggggagaaaaagaaaactctggcgttagaggatatagaaaaatataagtacaattgttacaaataacgcagacttcaaaaacaaaaaaatcacaacccaaacaaaccaaaatttaaatgatcagaattggcagcacaaagaaaacgccctctcctgacttgtattgtggcagtctgaacgcccccagaaaattgtgccaaagagtttagaaaaataaatatacaataaaagtaaacacatacacacaaaacagcaaacttcaggtaactattttggattgcaaacaggataattaaatgttcaaacaatctgataaaataaccatttggaaactgcttggccttctgttcttttatttgattgactacaatgcggtattggtctcttgctgcacttcaaaagcaaccaacaaaacaaaaacaaaaaaaagtgtgtgtgtgtgaatacacacacacactaactagaagtcttgtgatgaaaatggcacttggaaaaggttttatttttccactgaagttgaaggttaataaaatggtgtcaaacgtcccctggtcacacacttgaatatttttttagaagtgtgatgtggtatgattaccataaatcagacttaattattttcccttttacaagggaacagggcatcctgaattttagagcctttcagcaataagaagggatgttggtgagctttgatcctcttttggttttgcagttgttaggagtttttgctggcattttgaatatgctgctttcagaaaaaccaaggaagttttaaaattgcttcctggtccttagaggactaaaaacaagaccctcattcccactttcatttccactctagcaaaaactgggcttgcgtttttctccaactcctcgtttatatcctcccttccatgtccaagccttccattcctaagtgggattggctcagttttgcccatccatatggcagcatctctaatagctcttgtacagggtatcagatattgtgccttttggtgccaggttcaaagtcaagtgccgatctatgaaccagtgtacaaaaaaaaaaaaatccaggtatttgaaggagagacgctccattgtgaataaagagctcataccagctcctaagccctattaagaagaggcctggtcctctaatgccttgtttccatttcagttgttctttgagagacagaatgatgtactaaccattcgtgattattaagatagggttgggtcagggcttagggagggggcagaaatattggggatagaaaaaaaatctgatcattcctcagtgctacccatttctgtcctgtgtgggctgcttagctagacagcaggagaataaagtacaccgagaaccataatgaaaaaaccttccgtgtgttttgtcatgttttgttccagggaagcagttgatgagtgctgttactaatgctttctcccagatccattcagtggtggagaggaggaaaatgggctggttggatgtggtcttggtgccttgcagttactctgcactggttatgcatttaattctcctcttttctagttaaccttttgccagtgggttttccatagtctgggtatttgtccttatatcagttataccacctaaggcaactgggtgcaaaatgcattctgttcactcactgtctgggccttccccaccctagtcttggcacattccttcaagaatgtagttaccgtctgcttgggaagatgtcagtgcaaatgtgaagataatgggcatcggactaggctttggtttgccacaagtggcagctgcctgtatcaattacatttattaattttgcttttcatttttcccagttctcctcaccccccctttgttgaaatgttggacttgctgtcagaggcaactgtaatattgccttagggacttgtggagaaggggaattgctcagtgtagtgttttaactttcagaaccaagcaatctatttactcttacaaatatttaagaagtgtgttagtccaactttaagaaaaatccaaactcatcagcttttgatagcatcttggtttttgaaacaacttcaatctgtaattggcattcagaatgcccttggcatgccagtctgtgatggcatttaagacctgtaaaacacttgagcccaactcgattaaccaaaaccgataaccaccacctttatcttctaaataaagtccgctttattttta

SEQ ID NO: 101740 - DNA, 4852 bp, Homo sapiens
aggccgggaggtgaatcggacgagcagcagaacaaggacggccccctgagcacaccagcaagttttatgcgaagggagcactacagtatctggttccaatcctcacacagacactaactaaacaggacgaaaatgatgatgacgatgactggaacccctgcaaagcagcaggggtgtgcctcatgcttctggccacctgctgtgaagatgacattgtcccacatgtcctccccttcattaaagaacacatcaagaacccagattggcggtaccgggatgcagcagtgatggcttttggttgtatcttggaaggaccagagcccagtcagctcaaaccactagttatacaggctatgcccaccctaatagaattaatgaaagaccccagtgtagttgttcgagatacagctgcatggactgtaggcagaatttgtgagctgcttcctgaagctgccatcaatgatgtctacttggctcccctgctacagtgtctgattgagggtctcagtgctgaacccagagtggcttcaaatgtgtgctgggctttctccagtctggctgaagctgcttatgaagctgcagacgttgctgatgatcaggaagaaccagctacttactgcttatcttcttcatttgaactcatagttcagaagctcctagagactacagacagacctgatggacaccagaacaacctgaggagttctgcatatgaatctctgatggaaattgtgaaaaacagtgccaaggattgttatcctgctgtccagaaaacgactttggtcatcatggaacgactgcaacaggttcttcagatggagtcacatatccagagcacatccgatagaatccagttcaatgaccttcagtctttactctgtgcaactcttcagaatgttcttcggaaagtgcaacatcaagatgctttgcagatctctgatgtggttatggcctccctgttaaggatgttccaaagcacagctgggtctgggggagtacaagaggatgccctgatggcagttagcacactggtggaagtgttgggtggtgaattcctcaagtacatggaggcctttaaacccttcctgggcattggattaaaaaattatgctgaataccaggtttgtttggcagctgtgggcttagtgggagacttgtgccgtgccctgcaatccaacatcatacctttctgtgacgaggtgatgcagctgcttctggaaaatttggggaatgagaacgtccacaggtctgtgaagccgcagattctgtcagtgtttggtgatattgcccttgctattggaggagagtttaaaaaatacttagaggttgtattgaatactcttcagcaggcctcccaagcccaggtggacaagtcagactatgacatggtggattatctgaatgagctaagggaaagctgcttggaagcctatactggaatcgtccagggattaaagggggatcaggagaacgtacacccggatgtgatgctggtacaacccagagtagaatttattctgtctttcattgaccacattgctggagatgaggatcacacagatggagtagtagcttgtgctgctggactaataggggacttatgtacagcatttgggaaggatgtactgaaattagtagaagctaggccaatgatccatgaattgttaactgaagggcggagatcgaagactaacaaagcaaaaacccttgctacatgggcaacaaaagaactgaggaaactgaagaaccaagcttgatctgttaccattgggatgataacctgaggacccccactggaaatctcccatcttttgaaaaacctggaagtgaggagtgtgcacggatgctgaatgtttgggaatgagaggatgagtgagtgaggcttgaaaacacaccacattgaaaatcctgccacagcagcagccgcagccgccaacagcagcgctgttagtgagctaagtaagcactgacttcgtagaaaaccataacatcggccatcttggaaaagagaaaaacaatggagttacttatttaaaaaaaaagaaagaaagttatctcttcccaggagaggctagaagtagcttttctgtcttttggccagtgccgagtggaatgcctggtttgggggaggaggagggactgggttcagctgtggtgctttgttgtaaaaggcagcctggcctttgctactgaggagaaagatggagcctgggtctcaagcccaccttcgctgtacctttgccacatggtactgtatgcttgccagctagaaggagggtcagggattttttacagtctgagaatgagtgtgtgtgagtgaggcggtatccacattctcaacttcaagtcattgcagtttctttttcccagaaaacaaggggttagatgttgcatttcataaaactaaccgaagttctgtctactgatgcagcacaagagatgtaaaaaaaaaaaaaaaaaaaaaaaaaaaaaaaacacacacacagaggaaagacgctctttaggttttgttttgttttttttttttggttttgttttttgttttttttactctagggaaaacactgacgaatggtcagagctcctatcctgatcttttcatcaaggcgcctttcctaataatatggttcaactgtgaatgtagaagtgggggggaggggggagaaaaagaaaactctggcgttagaggatatagaaaaatataagtacaattgttacaaataacgcagacttcaaaaacaaaaaaatcacaacccaaacaaaccaaaatttaaatgatcagaattggcagcacaaagaaaacgccctctcctgacttgtattgtggcagtctgaacgcccccagaaaattgtgccaaagagtttagaaaaataaatatacaataaaagtaaacacatacacacaaaacagcaaacttcaggtaactattttggattgcaaacaggataattaaatgttcaaacaatctgataaaataaccatttggaaactgcttggccttctgttcttttatttgattgactacaatgcggtattggtctcttgctgcacttcaaaagcaaccaacaaaacaaaaacaaaaaaaagtgtgtgtgtgtgaatacacacacacactaactagaagtcttgtgatgaaaatggcacttggaaaaggttttatttttccactgaagttgaaggttaataaaatggtgtcaaacgtcccctggtcacacacttgaatatttttttagaagtgtgatgtggtatgattaccataaatcagacttaattattttcccttttacaagggaacagggcatcctgaattttagagcctttcagcaataagaagggatgttggtgagctttgatcctcttttggttttgcagttgttaggagtttttgctggcattttgaatatgctgctttcagaaaaaccaaggaagttttaaaattgcttcctggtccttagaggactaaaaacaagaccctcattcccactttcatttccactctagcaaaaactgggcttgcgtttttctccaactcctcgtttatatcctcccttccatgtccaagccttccattcctaagtgggattggctcagttttgcccatccatatggcagcatctctaatagctcttgtacagggtatcagatattgtgccttttggtgccaggttcaaagtcaagtgccgatctatgaaccagtgtacaaaaaaaaaaaaatccaggtatttgaaggagagacgctccattgtgaataaagagctcataccagctcctaagccctattaagaagaggcctggtcctctaatgccttgtttccatttcagttgttctttgagagacagaatgatgtactaaccattcgtgattattaagatagggttgggtcagggcttagggagggggcagaaatattggggatagaaaaaaaatctgatcattcctcagtgctacccatttctgtcctgtgtgggctgcttagctagacagcaggagaataaagtacaccgagaaccataatgaaaaaaccttccgtgtgttttgtcatgttttgttccagggaagcagttgatgagtgctgttactaatgctttctcccagatccattcagtggtggagaggaggaaaatgggctggttggatgtggtcttggtgccttgcagttactctgcactggttatgcatttaattctcctcttttctagttaaccttttgccagtgggttttccatagtctgggtatttgtccttatatcagttataccacctaaggcaactgggtgcaaaatgcattctgttcactcactgtctgggccttccccaccctagtcttggcacattccttcaagaatgtagttaccgtctgcttgggaagatgtcagtgcaaatgtgaagataatgggcatcggactaggctttggtttgccacaagtggcagctgcctgtatcaattacatttattaattttgcttttcatttttcccagttctcctcaccccccctttgttgaaatgttggacttgctgtcagaggcaactgtaatattgccttagggacttgtggagaaggggaattgctcagtgtagtgttttaactttcagaaccaagcaatctatttactcttacaaatatttaagaagtgtgttagtccaactttaagaaaaatccaaactcatcagcttttgatagcatcttggtttttgaaacaacttcaatctgtaattggcattcagaatgcccttggcatgccagtctgtgatggcatttaagacctgtaaaacacttgagcccaactcgattaaccaaaaccgataaccaccacctttatcttctaaataaagtccgctttattttta

SEQ ID NO: 101741 - DNA, 5001 bp, Homo sapiens
ctccctcgctccctccctgcgcgccgcctctcactcacagcctcccttccttctttctccctccgcctcccgagcaccagcgcgctctgagctgcccccagggtccctcccccgccgccagcagcccatttggagggaggaagtaagggaagaggagaggaaggggagccggaccgactacccagacagagccggtgaatgggtttgtggtgacccccgccccccaccccaccctcccttcccacccgacccccaacccccatccccagttcgagccgccgcccgaaaggccgggccgtcgtcttaggaggagtcgccgccgccgccacctccgccatggagctgatcaccattctcgagaagaccgtgtctcccgctccccttcattaaagaacacatcaagaacccagattggcggtaccgggatgcagcagtgatggcttttggttgtatcttggaaggaccagagcccagtcagctcaaaccactagttatacaggctatgcccaccctaatagaattaatgaaagaccccagtgtagttgttcgagatacagctgcatggactgtaggcagaatttgtgagctgcttcctgaagctgccatcaatgatgtctacttggctcccctgctacagtgtctgattgagggtctcagtgctgaacccagagtggcttcaaatgtgtgctgggctttctccagtctggctgaagctgcttatgaagctgcagacgttgctgatgatcaggaagaaccagctacttactgcttatcttcttcatttgaactcatagttcagaagctcctagagactacagacagacctgatggacaccagaacaacctgaggagttctgcatatgaatctctgatggaaattgtgaaaaacagtgccaaggattgttatcctgctgtccagaaaacgactttggtcatcatggaacgactgcaacaggttcttcagatggagtcacatatccagagcacatccgatagaatccagttcaatgaccttcagtctttactctgtgcaactcttcagaatgttcttcggaaagtgcaacatcaagatgctttgcagatctctgatgtggttatggcctccctgttaaggatgttccaaagcacagctgggtctgggggagtacaagaggatgccctgatggcagttagcacactggtggaagtgttgggtggtgaattcctcaagtacatggaggcctttaaacccttcctgggcattggattaaaaaattatgctgaataccaggtttgtttggcagctgtgggcttagtgggagacttgtgccgtgccctgcaatccaacatcatacctttctgtgacgaggtgatgcagctgcttctggaaaatttggggaatgagaacgtccacaggtctgtgaagccgcagattctgtcagtgtttggtgatattgcccttgctattggaggagagtttaaaaaatacttagaggttgtattgaatactcttcagcaggcctcccaagcccaggtggacaagtcagactatgacatggtggattatctgaatgagctaagggaaagctgcttggaagcctatactggaatcgtccagggattaaagggggatcaggagaacgtacacccggatgtgatgctggtacaacccagagtagaatttattctgtctttcattgaccacattgctggagatgaggatcacacagatggagtagtagcttgtgctgctggactaataggggacttatgtacagcatttgggaaggatgtactgaaattagtagaagctaggccaatgatccatgaattgttaactgaagggcggagatcgaagactaacaaagcaaaaacccttgctacatgggcaacaaaagaactgaggaaactgaagaaccaagcttgatctgttaccattgggatgataacctgaggacccccactggaaatctcccatcttttgaaaaacctggaagtgaggagtgtgcacggatgctgaatgtttgggaatgagaggatgagtgagtgaggcttgaaaacacaccacattgaaaatcctgccacagcagcagccgcagccgccaacagcagcgctgttagtgagctaagtaagcactgacttcgtagaaaaccataacatcggccatcttggaaaagagaaaaacaatggagttacttatttaaaaaaaaagaaagaaagttatctcttcccaggagaggctagaagtagcttttctgtcttttggccagtgccgagtggaatgcctggtttgggggaggaggagggactgggttcagctgtggtgctttgttgtaaaaggcagcctggcctttgctactgaggagaaagatggagcctgggtctcaagcccaccttcgctgtacctttgccacatggtactgtatgcttgccagctagaaggagggtcagggattttttacagtctgagaatgagtgtgtgtgagtgaggcggtatccacattctcaacttcaagtcattgcagtttctttttcccagaaaacaaggggttagatgttgcatttcataaaactaaccgaagttctgtctactgatgcagcacaagagatgtaaaaaaaaaaaaaaaaaaaaaaaaaaaaaaaacacacacacagaggaaagacgctctttaggttttgttttgttttttttttttggttttgttttttgttttttttactctagggaaaacactgacgaatggtcagagctcctatcctgatcttttcatcaaggcgcctttcctaataatatggttcaactgtgaatgtagaagtgggggggaggggggagaaaaagaaaactctggcgttagaggatatagaaaaatataagtacaattgttacaaataacgcagacttcaaaaacaaaaaaatcacaacccaaacaaaccaaaatttaaatgatcagaattggcagcacaaagaaaacgccctctcctgacttgtattgtggcagtctgaacgcccccagaaaattgtgccaaagagtttagaaaaataaatatacaataaaagtaaacacatacacacaaaacagcaaacttcaggtaactattttggattgcaaacaggataattaaatgttcaaacaatctgataaaataaccatttggaaactgcttggccttctgttcttttatttgattgactacaatgcggtattggtctcttgctgcacttcaaaagcaaccaacaaaacaaaaacaaaaaaaagtgtgtgtgtgtgaatacacacacacactaactagaagtcttgtgatgaaaatggcacttggaaaaggttttatttttccactgaagttgaaggttaataaaatggtgtcaaacgtcccctggtcacacacttgaatatttttttagaagtgtgatgtggtatgattaccataaatcagacttaattattttcccttttacaagggaacagggcatcctgaattttagagcctttcagcaataagaagggatgttggtgagctttgatcctcttttggttttgcagttgttaggagtttttgctggcattttgaatatgctgctttcagaaaaaccaaggaagttttaaaattgcttcctggtccttagaggactaaaaacaagaccctcattcccactttcatttccactctagcaaaaactgggcttgcgtttttctccaactcctcgtttatatcctcccttccatgtccaagccttccattcctaagtgggattggctcagttttgcccatccatatggcagcatctctaatagctcttgtacagggtatcagatattgtgccttttggtgccaggttcaaagtcaagtgccgatctatgaaccagtgtacaaaaaaaaaaaaatccaggtatttgaaggagagacgctccattgtgaataaagagctcataccagctcctaagccctattaagaagaggcctggtcctctaatgccttgtttccatttcagttgttctttgagagacagaatgatgtactaaccattcgtgattattaagatagggttgggtcagggcttagggagggggcagaaatattggggatagaaaaaaaatctgatcattcctcagtgctacccatttctgtcctgtgtgggctgcttagctagacagcaggagaataaagtacaccgagaaccataatgaaaaaaccttccgtgtgttttgtcatgttttgttccagggaagcagttgatgagtgctgttactaatgctttctcccagatccattcagtggtggagaggaggaaaatgggctggttggatgtggtcttggtgccttgcagttactctgcactggttatgcatttaattctcctcttttctagttaaccttttgccagtgggttttccatagtctgggtatttgtccttatatcagttataccacctaaggcaactgggtgcaaaatgcattctgttcactcactgtctgggccttccccaccctagtcttggcacattccttcaagaatgtagttaccgtctgcttgggaagatgtcagtgcaaatgtgaagataatgggcatcggactaggctttggtttgccacaagtggcagctgcctgtatcaattacatttattaattttgcttttcatttttcccagttctcctcaccccccctttgttgaaatgttggacttgctgtcagaggcaactgtaatattgccttagggacttgtggagaaggggaattgctcagtgtagtgttttaactttcagaaccaagcaatctatttactcttacaaatatttaagaagtgtgttagtccaactttaagaaaaatccaaactcatcagcttttgatagcatcttggtttttgaaacaacttcaatctgtaattggcattcagaatgcccttggcatgccagtctgtgatggcatttaagacctgtaaaacacttgagcccaactcgattaaccaaaaccgataaccaccacctttatcttctaaataaagtccgctttattttta

SEQ ID NO: 101742 - DNA, 4614 bp, Homo sapiens
tcgcaggtggaggccgggcgtaaatcggacgaggcgggatgcagcagtgatggcttttggttgtatcttggaaggaccagagcccagtcagctcaaaccactagttatacaggctatgcccaccctaatagaattaatgaaagaccccagtgtagttgttcgagatacagctgcatggactgtaggcagaatttgtgagctgcttcctgaagctgccatcaatgatgtctacttggctcccctgctacagtgtctgattgagggtctcagtgctgaacccagagtggcttcaaatgtgtgctgggctttctccagtctggctgaagctgcttatgaagctgcagacgttgctgatgatcaggaagaaccagctacttactgcttatcttcttcatttgaactcatagttcagaagctcctagagactacagacagacctgatggacaccagaacaacctgaggagttctgcatatgaatctctgatggaaattgtgaaaaacagtgccaaggattgttatcctgctgtccagaaaacgactttggtcatcatggaacgactgcaacaggttcttcagatggagtcacatatccagagcacatccgatagaatccagttcaatgaccttcagtctttactctgtgcaactcttcagaatgttcttcggaaagtgcaacatcaagatgctttgcagatctctgatgtggttatggcctccctgttaaggatgttccaaagcacagctgggtctgggggagtacaagaggatgccctgatggcagttagcacactggtggaagtgttgggtggtgaattcctcaagtacatggaggcctttaaacccttcctgggcattggattaaaaaattatgctgaataccaggtttgtttggcagctgtgggcttagtgggagacttgtgccgtgccctgcaatccaacatcatacctttctgtgacgaggtgatgcagctgcttctggaaaatttggggaatgagaacgtccacaggtctgtgaagccgcagattctgtcagtgtttggtgatattgcccttgctattggaggagagtttaaaaaatacttagaggttgtattgaatactcttcagcaggcctcccaagcccaggtggacaagtcagactatgacatggtggattatctgaatgagctaagggaaagctgcttggaagcctatactggaatcgtccagggattaaagggggatcaggagaacgtacacccggatgtgatgctggtacaacccagagtagaatttattctgtctttcattgaccacattgctggagatgaggatcacacagatggagtagtagcttgtgctgctggactaataggggacttatgtacagcatttgggaaggatgtactgaaattagtagaagctaggccaatgatccatgaattgttaactgaagggcggagatcgaagactaacaaagcaaaaacccttgctacatgggcaacaaaagaactgaggaaactgaagaaccaagcttgatctgttaccattgggatgataacctgaggacccccactggaaatctcccatcttttgaaaaacctggaagtgaggagtgtgcacggatgctgaatgtttgggaatgagaggatgagtgagtgaggcttgaaaacacaccacattgaaaatcctgccacagcagcagccgcagccgccaacagcagcgctgttagtgagctaagtaagcactgacttcgtagaaaaccataacatcggccatcttggaaaagagaaaaacaatggagttacttatttaaaaaaaaagaaagaaagttatctcttcccaggagaggctagaagtagcttttctgtcttttggccagtgccgagtggaatgcctggtttgggggaggaggagggactgggttcagctgtggtgctttgttgtaaaaggcagcctggcctttgctactgaggagaaagatggagcctgggtctcaagcccaccttcgctgtacctttgccacatggtactgtatgcttgccagctagaaggagggtcagggattttttacagtctgagaatgagtgtgtgtgagtgaggcggtatccacattctcaacttcaagtcattgcagtttctttttcccagaaaacaaggggttagatgttgcatttcataaaactaaccgaagttctgtctactgatgcagcacaagagatgtaaaaaaaaaaaaaaaaaaaaaaaaaaaaaaaacacacacacagaggaaagacgctctttaggttttgttttgttttttttttttggttttgttttttgttttttttactctagggaaaacactgacgaatggtcagagctcctatcctgatcttttcatcaaggcgcctttcctaataatatggttcaactgtgaatgtagaagtgggggggaggggggagaaaaagaaaactctggcgttagaggatatagaaaaatataagtacaattgttacaaataacgcagacttcaaaaacaaaaaaatcacaacccaaacaaaccaaaatttaaatgatcagaattggcagcacaaagaaaacgccctctcctgacttgtattgtggcagtctgaacgcccccagaaaattgtgccaaagagtttagaaaaataaatatacaataaaagtaaacacatacacacaaaacagcaaacttcaggtaactattttggattgcaaacaggataattaaatgttcaaacaatctgataaaataaccatttggaaactgcttggccttctgttcttttatttgattgactacaatgcggtattggtctcttgctgcacttcaaaagcaaccaacaaaacaaaaacaaaaaaaagtgtgtgtgtgtgaatacacacacacactaactagaagtcttgtgatgaaaatggcacttggaaaaggttttatttttccactgaagttgaaggttaataaaatggtgtcaaacgtcccctggtcacacacttgaatatttttttagaagtgtgatgtggtatgattaccataaatcagacttaattattttcccttttacaagggaacagggcatcctgaattttagagcctttcagcaataagaagggatgttggtgagctttgatcctcttttggttttgcagttgttaggagtttttgctggcattttgaatatgctgctttcagaaaaaccaaggaagttttaaaattgcttcctggtccttagaggactaaaaacaagaccctcattcccactttcatttccactctagcaaaaactgggcttgcgtttttctccaactcctcgtttatatcctcccttccatgtccaagccttccattcctaagtgggattggctcagttttgcccatccatatggcagcatctctaatagctcttgtacagggtatcagatattgtgccttttggtgccaggttcaaagtcaagtgccgatctatgaaccagtgtacaaaaaaaaaaaaatccaggtatttgaaggagagacgctccattgtgaataaagagctcataccagctcctaagccctattaagaagaggcctggtcctctaatgccttgtttccatttcagttgttctttgagagacagaatgatgtactaaccattcgtgattattaagatagggttgggtcagggcttagggagggggcagaaatattggggatagaaaaaaaatctgatcattcctcagtgctacccatttctgtcctgtgtgggctgcttagctagacagcaggagaataaagtacaccgagaaccataatgaaaaaaccttccgtgtgttttgtcatgttttgttccagggaagcagttgatgagtgctgttactaatgctttctcccagatccattcagtggtggagaggaggaaaatgggctggttggatgtggtcttggtgccttgcagttactctgcactggttatgcatttaattctcctcttttctagttaaccttttgccagtgggttttccatagtctgggtatttgtccttatatcagttataccacctaaggcaactgggtgcaaaatgcattctgttcactcactgtctgggccttccccaccctagtcttggcacattccttcaagaatgtagttaccgtctgcttgggaagatgtcagtgcaaatgtgaagataatgggcatcggactaggctttggtttgccacaagtggcagctgcctgtatcaattacatttattaattttgcttttcatttttcccagttctcctcaccccccctttgttgaaatgttggacttgctgtcagaggcaactgtaatattgccttagggacttgtggagaaggggaattgctcagtgtagtgttttaactttcagaaccaagcaatctatttactcttacaaatatttaagaagtgtgttagtccaactttaagaaaaatccaaactcatcagcttttgatagcatcttggtttttgaaacaacttcaatctgtaattggcattcagaatgcccttggcatgccagtctgtgatggcatttaagacctgtaaaacacttgagcccaactcgattaaccaaaaccgataaccaccacctttatcttctaaataaagtccgctttattttta

SEQ ID NO: 101743 - DNA, 3241 bp, Homo sapiens
  misc_feature (3183)..(3183): n is a, c, g, or t
  misc_feature (3190)..(3190): n is a, c, g, or t
  misc_feature (3201)..(3201): n is a, c, g, or t
  misc_feature (3205)..(3205): n is a, c, g, or t
  misc_feature (3211)..(3211): n is a, c, g, or t
  misc_feature (3216)..(3216): n is a, c, g, or t
ctccctcgctccctccctgcgcgccgcctctcactcacagcctcccttccttctttctccctccgcctcccgagcaccagcgcgctctgagctgcccccagggtccctcccccgccgccagcagcccatttggagggaggaagtaagggaagaggagaggaaggggagccggaccgactacccagacagagccggtgaatgggtttgtggtgacccccgccccccaccccaccctcccttcccacccgacccccaacccccatccccagttcgagccgccgcccgaaaggccgggccgtcgtcttaggaggagtcgccgccgccgccacctccgccatggagctgatcaccattctcgagaagaccgtgtctcccgatcggctggagctggaagcggcgcagaagttcctggagcgtgcggccgtggagaacctgcccactttccttgtggaactgtccagagtgctggcaaatccaggaaacagtcaggttgccagagttgcagctggtctacaaatcaagaactctttgacatctaaagatccagatatcaaggcacaatatcagcagaggtggcttgctattgatgctaatgctcgacgagaagtcaagaactatgttttgcagacattgggtacagaaacttaccggcctagttctgcctcacagtgtgtggctggtattgcttgtgcagagatcccagtaaaccagtggccagaactcattcctcagctggtggccaatgtcacaaaccccaacagcacagagcacatgaaggagtcgacattggaagccatcggttatatttgccaagatatagacccagagcagctacaagataaatccaatgagattctgactgccataatccaggggatgaggaaagaagagcctagtaataatgtgaagctagctgctacgaatgcactcctgaactcattggagttcaccaaagcaaactttgataaagagtctgaaaggcactttattatgcaggtggtctgtgaagccacacagtgtccagatacgagggtacgagtggctgctttacagaatctggtgaagataatgtccttatattatcagtacatggagacatatatgggtcctgctctttttgcaatcacaatcgaagcaatgaaaagtgacattgatgaggtggctttacaagggatagaattctggtccaatgtctgtgatgaggaaatggatttggccattgaagcttcagaggcagcagaacaaggacggccccctgagcacaccagcaagttttatgcgaagggagcactacagtatctggttccaatcctcacacagacactaactaaacaggacgaaaatgatgatgacgatgactggaacccctgcaaagcagcaggggtgtgcctcatgcttctggccacctgctgtgaagatgacattgtcccacatgtcctccccttcattaaagaacacatcaagaacccagattggcggtaccgggatgcagcagtgatggcttttggttgtatcttggaaggaccagagcccagtcagctcaaaccactagttatacaggctatgcccaccctaatagaattaatgaaagaccccagtgtagttgttcgagatacagctgcatggactgtaggcagaatttgtgagctgcttcctgaagctgccatcaatgatgtctacttggctcccctgctacagtgtctgattgagggtctcagtgctgaacccagagtggcttcaaatgtgtgctgggctttctccagtctggctgaagctgcttatgaagctgcagacgttgctgatgatcaggaagaaccagctacttactgcttatcttcttcatttgaactcatagttcagaagctcctagagactacagacagacctgatggacaccagaacaacctgaggagttctgcatatgaatctctgatggaaattgtgaaaaacagtgccaaggattgttatcctgctgtccagaaaacgactttggtcatcatggaacgactgcaacaggttcttcagatggagtcacatatccagagcacatccgatagaatccagttcaatgaccttcagtctttactctgtgcaactcttcagaatgttcttcggaaagtgcaacatcaagatgctttgcagatctctgatgtggttatggcctccctgttaaggatgttccaaagcacagctgggtctgggggagtacaagaggatgccctgatggcagttagcacactggtggaagtgttgggtggtgaattcctcaagtacatggaggcctttaaacccttcctgggcattggattaaaaaattatgctgaataccaggtttgtttggcagctgtgggcttagtgggagacttgtgccgtgccctgcaatccaacatcatacctttctgtgacgaggtgatgcagctgcttctggaaaatttggggaatgagaacgtccacaggtctgtgaagccgcagattctgtcagtgtttggtgatattgcccttgctattggaggagagtttaaaaaatacttagaggttgtattgaatactcttcagcaggcctcccaagcccaggtggacaagtcagactatgacatggtggattatctgaatgagctaagggaaagctgcttggaagcctatactggaatcgtccagggattaaagggggatcaggagaacgtacacccggatgtgatgctggtacaacccagagtagaatttattctgtctttcattgaccacattgctggagatgaggatcacacagatggagtagtagcttgtgctgctggactaataggggacttatgtacagcatttgggaaggatgtactgaaattagtagaagctaggccaatgatccatgaattgttaactgaagggcggagatcgaagactaacaaagcaaaaacccttgctacatgggcaacaaaagaactgaggaaactgaagaaccaagcttgatctgttaccattgggatgataacctgaggacccccactggaaatctcccatcttttgaaaaacctggaagtgaggagtgtgcacggatgctgaatgtttgggaatgagaggatgagtgagtgaggcttgaaaacacaccacattgaaaatcctgccacagagagcggcgcgcaaaggaaggctggtatgagtaagtagcctgttcgtaaacacatnggcctgngaagaaaccgngttnttttanaaaanaaacgttctccggagagaaaacttt

SEQ ID NO: 101744 - DNA, 4391 bp, Homo sapiens
tgtcagattatcaaacaggatgatgagagatgtcagattatcagacaggatttctgtgattggaaacagaagaaatggcaggctttctccagtctggctgaagctgcttatgaagctgcagacgttgctgatgatcaggaagaaccagctacttactgcttatcttcttcatttgaactcatagttcagaagctcctagagactacagacagacctgatggacaccagaacaacctgaggagttctgcatatgaatctctgatggaaattgtgaaaaacagtgccaaggattgttatcctgctgtccagaaaacgactttggtcatcatggaacgactgcaacaggttcttcagatggagtcacatatccagagcacatccgatagaatccagttcaatgaccttcagtctttactctgtgcaactcttcagaatgttcttcggaaagtgcaacatcaagatgctttgcagatctctgatgtggttatggcctccctgttaaggatgttccaaagcacagctgggtctgggggagtacaagaggatgccctgatggcagttagcacactggtggaagtgttgggtggtgaattcctcaagtacatggaggcctttaaacccttcctgggcattggattaaaaaattatgctgaataccaggtttgtttggcagctgtgggcttagtgggagacttgtgccgtgccctgcaatccaacatcatacctttctgtgacgaggtgatgcagctgcttctggaaaatttggggaatgagaacgtccacaggtctgtgaagccgcagattctgtcagtgtttggtgatattgcccttgctattggaggagagtttaaaaaatacttagaggttgtattgaatactcttcagcaggcctcccaagcccaggtggacaagtcagactatgacatggtggattatctgaatgagctaagggaaagctgcttggaagcctatactggaatcgtccagggattaaagggggatcaggagaacgtacacccggatgtgatgctggtacaacccagagtagaatttattctgtctttcattgaccacattgctggagatgaggatcacacagatggagtagtagcttgtgctgctggactaataggggacttatgtacagcatttgggaaggatgtactgaaattagtagaagctaggccaatgatccatgaattgttaactgaagggcggagatcgaagactaacaaagcaaaaacccttgctacatgggcaacaaaagaactgaggaaactgaagaaccaagcttgatctgttaccattgggatgataacctgaggacccccactggaaatctcccatcttttgaaaaacctggaagtgaggagtgtgcacggatgctgaatgtttgggaatgagaggatgagtgagtgaggcttgaaaacacaccacattgaaaatcctgccacagcagcagccgcagccgccaacagcagcgctgttagtgagctaagtaagcactgacttcgtagaaaaccataacatcggccatcttggaaaagagaaaaacaatggagttacttatttaaaaaaaaagaaagaaagttatctcttcccaggagaggctagaagtagcttttctgtcttttggccagtgccgagtggaatgcctggtttgggggaggaggagggactgggttcagctgtggtgctttgttgtaaaaggcagcctggcctttgctactgaggagaaagatggagcctgggtctcaagcccaccttcgctgtacctttgccacatggtactgtatgcttgccagctagaaggagggtcagggattttttacagtctgagaatgagtgtgtgtgagtgaggcggtatccacattctcaacttcaagtcattgcagtttctttttcccagaaaacaaggggttagatgttgcatttcataaaactaaccgaagttctgtctactgatgcagcacaagagatgtaaaaaaaaaaaaaaaaaaaaaaaaaaaaaaaacacacacacagaggaaagacgctctttaggttttgttttgttttttttttttggttttgttttttgttttttttactctagggaaaacactgacgaatggtcagagctcctatcctgatcttttcatcaaggcgcctttcctaataatatggttcaactgtgaatgtagaagtgggggggaggggggagaaaaagaaaactctggcgttagaggatatagaaaaatataagtacaattgttacaaataacgcagacttcaaaaacaaaaaaatcacaacccaaacaaaccaaaatttaaatgatcagaattggcagcacaaagaaaacgccctctcctgacttgtattgtggcagtctgaacgcccccagaaaattgtgccaaagagtttagaaaaataaatatacaataaaagtaaacacatacacacaaaacagcaaacttcaggtaactattttggattgcaaacaggataattaaatgttcaaacaatctgataaaataaccatttggaaactgcttggccttctgttcttttatttgattgactacaatgcggtattggtctcttgctgcacttcaaaagcaaccaacaaaacaaaaacaaaaaaaagtgtgtgtgtgtgaatacacacacacactaactagaagtcttgtgatgaaaatggcacttggaaaaggttttatttttccactgaagttgaaggttaataaaatggtgtcaaacgtcccctggtcacacacttgaatatttttttagaagtgtgatgtggtatgattaccataaatcagacttaattattttcccttttacaagggaacagggcatcctgaattttagagcctttcagcaataagaagggatgttggtgagctttgatcctcttttggttttgcagttgttaggagtttttgctggcattttgaatatgctgctttcagaaaaaccaaggaagttttaaaattgcttcctggtccttagaggactaaaaacaagaccctcattcccactttcatttccactctagcaaaaactgggcttgcgtttttctccaactcctcgtttatatcctcccttccatgtccaagccttccattcctaagtgggattggctcagttttgcccatccatatggcagcatctctaatagctcttgtacagggtatcagatattgtgccttttggtgccaggttcaaagtcaagtgccgatctatgaaccagtgtacaaaaaaaaaaaaatccaggtatttgaaggagagacgctccattgtgaataaagagctcataccagctcctaagccctattaagaagaggcctggtcctctaatgccttgtttccatttcagttgttctttgagagacagaatgatgtactaaccattcgtgattattaagatagggttgggtcagggcttagggagggggcagaaatattggggatagaaaaaaaatctgatcattcctcagtgctacccatttctgtcctgtgtgggctgcttagctagacagcaggagaataaagtacaccgagaaccataatgaaaaaaccttccgtgtgttttgtcatgttttgttccagggaagcagttgatgagtgctgttactaatgctttctcccagatccattcagtggtggagaggaggaaaatgggctggttggatgtggtcttggtgccttgcagttactctgcactggttatgcatttaattctcctcttttctagttaaccttttgccagtgggttttccatagtctgggtatttgtccttatatcagttataccacctaaggcaactgggtgcaaaatgcattctgttcactcactgtctgggccttccccaccctagtcttggcacattccttcaagaatgtagttaccgtctgcttgggaagatgtcagtgcaaatgtgaagataatgggcatcggactaggctttggtttgccacaagtggcagctgcctgtatcaattacatttattaattttgcttttcatttttcccagttctcctcaccccccctttgttgaaatgttggacttgctgtcagaggcaactgtaatattgccttagggacttgtggagaaggggaattgctcagtgtagtgttttaactttcagaaccaagcaatctatttactcttacaaatatttaagaagtgtgttagtccaactttaagaaaaatccaaactcatcagcttttgatagcatcttggtttttgaaacaacttcaatctgtaattggcattcagaatgcccttggcatgccagtctgtgatggcatttaagacctgtaaaacacttgagcccaactcgattaaccaaaaccgataaccaccacctttatcttctaaataaagtccgctttattttta

SEQ ID NO: 101745 - DNA, 4118 bp, Homo sapiens
ggttgggctctgagactaccttgctcatccctgctatactgcacatgtgcctatagtacgttcaggatgagattggtacataatctggaggccagatccggttaggaatccactccagtgaccatgacgtctttactcttggaccaatctatcacaccatgtgcttcttgactagtgcctactctgaatgctttgcagatctctgatgtggttatggcctccctgttaaggatgttccaaagcacagctgggtctgggggagtacaagaggatgccctgatggcagttagcacactggtggaagtgttgggtggtgaattcctcaagtacatggaggcctttaaacccttcctgggcattggattaaaaaattatgctgaataccaggtttgtttggcagctgtgggcttagtgggagacttgtgccgtgccctgcaatccaacatcatacctttctgtgacgaggtgatgcagctgcttctggaaaatttggggaatgagaacgtccacaggtctgtgaagccgcagattctgtcagtgtttggtgatattgcccttgctattggaggagagtttaaaaaatacttagaggttgtattgaatactcttcagcaggcctcccaagcccaggtggacaagtcagactatgacatggtggattatctgaatgagctaagggaaagctgcttggaagcctatactggaatcgtccagggattaaagggggatcaggagaacgtacacccggatgtgatgctggtacaacccagagtagaatttattctgtctttcattgaccacattgctggagatgaggatcacacagatggagtagtagcttgtgctgctggactaataggggacttatgtacagcatttgggaaggatgtactgaaattagtagaagctaggccaatgatccatgaattgttaactgaagggcggagatcgaagactaacaaagcaaaaacccttgctacatgggcaacaaaagaactgaggaaactgaagaaccaagcttgatctgttaccattgggatgataacctgaggacccccactggaaatctcccatcttttgaaaaacctggaagtgaggagtgtgcacggatgctgaatgtttgggaatgagaggatgagtgagtgaggcttgaaaacacaccacattgaaaatcctgccacagcagcagccgcagccgccaacagcagcgctgttagtgagctaagtaagcactgacttcgtagaaaaccataacatcggccatcttggaaaagagaaaaacaatggagttacttatttaaaaaaaaagaaagaaagttatctcttcccaggagaggctagaagtagcttttctgtcttttggccagtgccgagtggaatgcctggtttgggggaggaggagggactgggttcagctgtggtgctttgttgtaaaaggcagcctggcctttgctactgaggagaaagatggagcctgggtctcaagcccaccttcgctgtacctttgccacatggtactgtatgcttgccagctagaaggagggtcagggattttttacagtctgagaatgagtgtgtgtgagtgaggcggtatccacattctcaacttcaagtcattgcagtttctttttcccagaaaacaaggggttagatgttgcatttcataaaactaaccgaagttctgtctactgatgcagcacaagagatgtaaaaaaaaaaaaaaaaaaaaaaaaaaaaaaaacacacacacagaggaaagacgctctttaggttttgttttgttttttttttttggttttgttttttgttttttttactctagggaaaacactgacgaatggtcagagctcctatcctgatcttttcatcaaggcgcctttcctaataatatggttcaactgtgaatgtagaagtgggggggaggggggagaaaaagaaaactctggcgttagaggatatagaaaaatataagtacaattgttacaaataacgcagacttcaaaaacaaaaaaatcacaacccaaacaaaccaaaatttaaatgatcagaattggcagcacaaagaaaacgccctctcctgacttgtattgtggcagtctgaacgcccccagaaaattgtgccaaagagtttagaaaaataaatatacaataaaagtaaacacatacacacaaaacagcaaacttcaggtaactattttggattgcaaacaggataattaaatgttcaaacaatctgataaaataaccatttggaaactgcttggccttctgttcttttatttgattgactacaatgcggtattggtctcttgctgcacttcaaaagcaaccaacaaaacaaaaacaaaaaaaagtgtgtgtgtgtgaatacacacacacactaactagaagtcttgtgatgaaaatggcacttggaaaaggttttatttttccactgaagttgaaggttaataaaatggtgtcaaacgtcccctggtcacacacttgaatatttttttagaagtgtgatgtggtatgattaccataaatcagacttaattattttcccttttacaagggaacagggcatcctgaattttagagcctttcagcaataagaagggatgttggtgagctttgatcctcttttggttttgcagttgttaggagtttttgctggcattttgaatatgctgctttcagaaaaaccaaggaagttttaaaattgcttcctggtccttagaggactaaaaacaagaccctcattcccactttcatttccactctagcaaaaactgggcttgcgtttttctccaactcctcgtttatatcctcccttccatgtccaagccttccattcctaagtgggattggctcagttttgcccatccatatggcagcatctctaatagctcttgtacagggtatcagatattgtgccttttggtgccaggttcaaagtcaagtgccgatctatgaaccagtgtacaaaaaaaaaaaaatccaggtatttgaaggagagacgctccattgtgaataaagagctcataccagctcctaagccctattaagaagaggcctggtcctctaatgccttgtttccatttcagttgttctttgagagacagaatgatgtactaaccattcgtgattattaagatagggttgggtcagggcttagggagggggcagaaatattggggatagaaaaaaaatctgatcattcctcagtgctacccatttctgtcctgtgtgggctgcttagctagacagcaggagaataaagtacaccgagaaccataatgaaaaaaccttccgtgtgttttgtcatgttttgttccagggaagcagttgatgagtgctgttactaatgctttctcccagatccattcagtggtggagaggaggaaaatgggctggttggatgtggtcttggtgccttgcagttactctgcactggttatgcatttaattctcctcttttctagttaaccttttgccagtgggttttccatagtctgggtatttgtccttatatcagttataccacctaaggcaactgggtgcaaaatgcattctgttcactcactgtctgggccttccccaccctagtcttggcacattccttcaagaatgtagttaccgtctgcttgggaagatgtcagtgcaaatgtgaagataatgggcatcggactaggctttggtttgccacaagtggcagctgcctgtatcaattacatttattaattttgcttttcatttttcccagttctcctcaccccccctttgttgaaatgttggacttgctgtcagaggcaactgtaatattgccttagggacttgtggagaaggggaattgctcagtgtagtgttttaactttcagaaccaagcaatctatttactcttacaaatatttaagaagtgtgttagtccaactttaagaaaaatccaaactcatcagcttttgatagcatcttggtttttgaaacaacttcaatctgtaattggcattcagaatgcccttggcatgccagtctgtgatggcatttaagacctgtaaaacacttgagcccaactcgattaaccaaaaccgataaccaccacctttatcttctaaataaagtccgctttattttta

SEQ ID NO: 101746 - DNA, 2927 bp, Homo sapiens
ctccctcgctccctccctgcgcgccgcctctcactcacagcctcccttccttctttctccctccgcctcccgagcaccagcgcgctctgagctgcccccagggtccctcccccgccgccagcagcccatttggagggaggaagtaagggaagaggagaggaaggggagccggaccgactacccagacagagccggtgaatgggtttgtggtgacccccgccccccaccccaccctcccttcccacccgacccccaacccccatccccagttcgagccgccgcccgaaaggccgggccgtcgtcttaggaggagtcgccgccgccgccacctccgccatggagctgatcaccattctcgagaagaccgtgtctcccgatcggctggagctggaagcggcgcagaagttcctggagcgtgcggccgtggagaacctgcccactttccttgtggaactgtccagagtgctggcaaatccaggaaacagtcaggttgccagagttgcagctggtctacaaatcaagaactctttgacatctaaagatccagatatcaaggcacaatatcagcagaggtggcttgctattgatgctaatgctcgacgagaagtcaagaactatgttttgcagacattgggtacagaaacttaccggcctagttctgcctcacagtgtgtggctggtattgcttgtgcagagatcccagtaaaccagtggccagaactcattcctcagctggtggccaatgtcacaaaccccaacagcacagagcacatgaaggagtcgacattggaagccatcggttatatttgccaagatatagacccagagcagctacaagataaatccaatgagattctgactgccataatccaggggatgaggaaagaagagcctagtaataatgtgaagctagctgctacgaatgcactcctgaactcattggagttcaccaaagcaaactttgataaagagtctgaaaggcactttattatgcaggtggtctgtgaagccacacagtgtccagatacgagggtacgagtggctgctttacagaatctggtgaagataatgtccttatattatcagtacatggagacatatatgggtcctgctctttttgcaatcacaatcgaagcaatgaaaagtgacattgatgaggtggctttacaagggatagaattctggtccaatgtctgtgatgaggaaatggatttggccattgaagcttcagaggcagcagaacaaggacggccccctgagcacaccagcaagttttatgcgaagggagcactacagtatctggttccaatcctcacacagacactaactaaacaggacgaaaatgatgatgacgatgactggaacccctgcaaagcagcaggggtgtgcctcatgcttctggccacctgctgtgaagatgacattgtcccacatgtcctccccttcattaaagaacacatcaagaacccagattggcggtaccgggatgcagcagtgatggcttttggttgtatcttggaaggaccagagcccagtcagctcaaaccactagttatacaggctatgcccaccctaatagaattaatgaaagaccccagtgtagttgttcgagatacagctgcatggactgtaggcagaatttgtgagctgcttcctgaagctgccatcaatgatgtctacttggctcccctgctacagtgtctgattgagggtctcagtgctgaacccagagtggcttcaaatgtgtgctgggctttctccagtctggctgaagctgcttatgaagctgcagacgttgctgatgatcaggaagaaccagctacttactgcttatcttcttcatttgaactcatagttcagaagctcctagagactacagacagacctgatggacaccagaacaacctgaggagttctgcatatgaatctctgatggaaattgtgaaaaacagtgccaaggattgttatcctgctgtccagaaaacgactttggtcatcatggaacgactgcaacaggttcttcagatggagtcacatatccagagcacatccgatagaatccagttcaatgaccttcagtctttactctgtgcaactcttcagaatgttcttcggaaagtgcaacatcaagatgctttgcagatctctgatgtggttatggcctccctgttaaggatgttccaaagcacagctgggtctgggggagtacaagaggatgccctgatggcagttagcacactggtggaagtgttgggtggtgaattcctcaagtacatggaggcctttaaacccttcctgggcattggattaaaaaattatgctgaataccaggtttgtttggcagctgtgggcttagtgggagacttgtgccgtgccctgcaatccaacatcatacctttctgtgacgaggtgatgcagctgcttctggaaaatttggggaatgagaacgtccacaggtctgtgaagccgcagattctgtcagtgtttggtgatattgcccttgctattggaggagagtttaaaaaatacttagaggttgtattgaatactcttcagcaggcctcccaagcccaggtggacaagtcagactatgacatggtggattatctgaatgagctaagggaaagctgcttggaagcctatactggaatcgtccagggattaaagggggatcaggagaacgtacaccgttgagtatacaacccagttcccttcgtccgctcgccaatgtgcacttagccaagtgggctatgtctgtcattctgtagctcgcttgtgaacctagtgcctgttgcttaaaaggctgggagaagggggagcagtgccctaatgaagagagtggcttggggaaaactgtagactattgtttttgctctgcttcttctttcttttttttgttttgagaccttctctcaaaacaaaaaaaa

SEQ ID NO: 101747 - DNA, 3877 bp, Homo sapiens
caaccccggacaaggtgatgaaggagctagacgagaatggagacggggaggtggacttccaggtgttgggtggtgaattcctcaagtacatggaggcctttaaacccttcctgggcattggattaaaaaattatgctgaataccaggtttgtttggcagctgtgggcttagtgggagacttgtgccgtgccctgcaatccaacatcatacctttctgtgacgaggtgatgcagctgcttctggaaaatttggggaatgagaacgtccacaggtctgtgaagccgcagattctgtcagtgtttggtgatattgcccttgctattggaggagagtttaaaaaatacttagaggttgtattgaatactcttcagcaggcctcccaagcccaggtggacaagtcagactatgacatggtggattatctgaatgagctaagggaaagctgcttggaagcctatactggaatcgtccagggattaaagggggatcaggagaacgtacacccggatgtgatgctggtacaacccagagtagaatttattctgtctttcattgaccacattgctggagatgaggatcacacagatggagtagtagcttgtgctgctggactaataggggacttatgtacagcatttgggaaggatgtactgaaattagtagaagctaggccaatgatccatgaattgttaactgaagggcggagatcgaagactaacaaagcaaaaacccttgctacatgggcaacaaaagaactgaggaaactgaagaaccaagcttgatctgttaccattgggatgataacctgaggacccccactggaaatctcccatcttttgaaaaacctggaagtgaggagtgtgcacggatgctgaatgtttgggaatgagaggatgagtgagtgaggcttgaaaacacaccacattgaaaatcctgccacagcagcagccgcagccgccaacagcagcgctgttagtgagctaagtaagcactgacttcgtagaaaaccataacatcggccatcttggaaaagagaaaaacaatggagttacttatttaaaaaaaaagaaagaaagttatctcttcccaggagaggctagaagtagcttttctgtcttttggccagtgccgagtggaatgcctggtttgggggaggaggagggactgggttcagctgtggtgctttgttgtaaaaggcagcctggcctttgctactgaggagaaagatggagcctgggtctcaagcccaccttcgctgtacctttgccacatggtactgtatgcttgccagctagaaggagggtcagggattttttacagtctgagaatgagtgtgtgtgagtgaggcggtatccacattctcaacttcaagtcattgcagtttctttttcccagaaaacaaggggttagatgttgcatttcataaaactaaccgaagttctgtctactgatgcagcacaagagatgtaaaaaaaaaaaaaaaaaaaaaaaaaaaaaaaacacacacacagaggaaagacgctctttaggttttgttttgttttttttttttggttttgttttttgttttttttactctagggaaaacactgacgaatggtcagagctcctatcctgatcttttcatcaaggcgcctttcctaataatatggttcaactgtgaatgtagaagtgggggggaggggggagaaaaagaaaactctggcgttagaggatatagaaaaatataagtacaattgttacaaataacgcagacttcaaaaacaaaaaaatcacaacccaaacaaaccaaaatttaaatgatcagaattggcagcacaaagaaaacgccctctcctgacttgtattgtggcagtctgaacgcccccagaaaattgtgccaaagagtttagaaaaataaatatacaataaaagtaaacacatacacacaaaacagcaaacttcaggtaactattttggattgcaaacaggataattaaatgttcaaacaatctgataaaataaccatttggaaactgcttggccttctgttcttttatttgattgactacaatgcggtattggtctcttgctgcacttcaaaagcaaccaacaaaacaaaaacaaaaaaaagtgtgtgtgtgtgaatacacacacacactaactagaagtcttgtgatgaaaatggcacttggaaaaggttttatttttccactgaagttgaaggttaataaaatggtgtcaaacgtcccctggtcacacacttgaatatttttttagaagtgtgatgtggtatgattaccataaatcagacttaattattttcccttttacaagggaacagggcatcctgaattttagagcctttcagcaataagaagggatgttggtgagctttgatcctcttttggttttgcagttgttaggagtttttgctggcattttgaatatgctgctttcagaaaaaccaaggaagttttaaaattgcttcctggtccttagaggactaaaaacaagaccctcattcccactttcatttccactctagcaaaaactgggcttgcgtttttctccaactcctcgtttatatcctcccttccatgtccaagccttccattcctaagtgggattggctcagttttgcccatccatatggcagcatctctaatagctcttgtacagggtatcagatattgtgccttttggtgccaggttcaaagtcaagtgccgatctatgaaccagtgtacaaaaaaaaaaaaatccaggtatttgaaggagagacgctccattgtgaataaagagctcataccagctcctaagccctattaagaagaggcctggtcctctaatgccttgtttccatttcagttgttctttgagagacagaatgatgtactaaccattcgtgattattaagatagggttgggtcagggcttagggagggggcagaaatattggggatagaaaaaaaatctgatcattcctcagtgctacccatttctgtcctgtgtgggctgcttagctagacagcaggagaataaagtacaccgagaaccataatgaaaaaaccttccgtgtgttttgtcatgttttgttccagggaagcagttgatgagtgctgttactaatgctttctcccagatccattcagtggtggagaggaggaaaatgggctggttggatgtggtcttggtgccttgcagttactctgcactggttatgcatttaattctcctcttttctagttaaccttttgccagtgggttttccatagtctgggtatttgtccttatatcagttataccacctaaggcaactgggtgcaaaatgcattctgttcactcactgtctgggccttccccaccctagtcttggcacattccttcaagaatgtagttaccgtctgcttgggaagatgtcagtgcaaatgtgaagataatgggcatcggactaggctttggtttgccacaagtggcagctgcctgtatcaattacatttattaattttgcttttcatttttcccagttctcctcaccccccctttgttgaaatgttggacttgctgtcagaggcaactgtaatattgccttagggacttgtggagaaggggaattgctcagtgtagtgttttaactttcagaaccaagcaatctatttactcttacaaatatttaagaagtgtgttagtccaactttaagaaaaatccaaactcatcagcttttgatagcatcttggtttttgaaacaacttcaatctgtaattggcattcagaatgcccttggcatgccagtctgtgatggcatttaagacctgtaaaacacttgagcccaactcgattaaccaaaaccgataaccaccacctttatcttctaaataaagtccgctttattttta

SEQ ID NO: 101748 - DNA, 4323 bp, Homo sapiens
ctccctcgctccctccctgcgcgccgcctctcactcacagcctcccttccttctttctccctccgcctcccgagcaccagcgcgctctgagctgcccccagggtccctcccccgccgccagcagcccatttggagggaggaagtaagggaagaggagaggaaggggagccggaccgactacccagacagagccggtgaatgggtttgtggtgacccccgccccccaccccaccctcccttcccacccgacccccaacccccatccccagttcgagccgccgcccgaaaggccgggccgtcgtcttaggaggagtcgccgccgccgccacctccgccatggagctgatcaccattctcgagaagaccgtgtctcccgatcggctggagctggaagcggcgcagaagttcctggagcgtgcggccgtggagaacctgcccactttccttgtggaactgtccagagtgctggcaaatccaggaaacagtcaggttgccagagttgcagctggtctacaaatcaagaactctttgacatctaaagatccagatatcaaggcacaatatcagcagaggtggcttgctattgatgctaatgctcgacgagaagtcaagaactatgttttgcagacattgggtacagaaacttaccggcctagttctgcctcacagtgtgtggctggtattgcttgtgcagagatccaatgagaacgtccacaggtctgtgaagccgcagattctgtcagtgtttggtgatattgcccttgctattggaggagagtttaaaaaatacttagaggttgtattgaatactcttcagcaggcctcccaagcccaggtggacaagtcagactatgacatggtggattatctgaatgagctaagggaaagctgcttggaagcctatactggaatcgtccagggattaaagggggatcaggagaacgtacacccggatgtgatgctggtacaacccagagtagaatttattctgtctttcattgaccacattgctggagatgaggatcacacagatggagtagtagcttgtgctgctggactaataggggacttatgtacagcatttgggaaggatgtactgaaattagtagaagctaggccaatgatccatgaattgttaactgaagggcggagatcgaagactaacaaagcaaaaacccttgctacatgggcaacaaaagaactgaggaaactgaagaaccaagcttgatctgttaccattgggatgataacctgaggacccccactggaaatctcccatcttttgaaaaacctggaagtgaggagtgtgcacggatgctgaatgtttgggaatgagaggatgagtgagtgaggcttgaaaacacaccacattgaaaatcctgccacagcagcagccgcagccgccaacagcagcgctgttagtgagctaagtaagcactgacttcgtagaaaaccataacatcggccatcttggaaaagagaaaaacaatggagttacttatttaaaaaaaaagaaagaaagttatctcttcccaggagaggctagaagtagcttttctgtcttttggccagtgccgagtggaatgcctggtttgggggaggaggagggactgggttcagctgtggtgctttgttgtaaaaggcagcctggcctttgctactgaggagaaagatggagcctgggtctcaagcccaccttcgctgtacctttgccacatggtactgtatgcttgccagctagaaggagggtcagggattttttacagtctgagaatgagtgtgtgtgagtgaggcggtatccacattctcaacttcaagtcattgcagtttctttttcccagaaaacaaggggttagatgttgcatttcataaaactaaccgaagttctgtctactgatgcagcacaagagatgtaaaaaaaaaaaaaaaaaaaaaaaaaaaaaaaacacacacacagaggaaagacgctctttaggttttgttttgttttttttttttggttttgttttttgttttttttactctagggaaaacactgacgaatggtcagagctcctatcctgatcttttcatcaaggcgcctttcctaataatatggttcaactgtgaatgtagaagtgggggggaggggggagaaaaagaaaactctggcgttagaggatatagaaaaatataagtacaattgttacaaataacgcagacttcaaaaacaaaaaaatcacaacccaaacaaaccaaaatttaaatgatcagaattggcagcacaaagaaaacgccctctcctgacttgtattgtggcagtctgaacgcccccagaaaattgtgccaaagagtttagaaaaataaatatacaataaaagtaaacacatacacacaaaacagcaaacttcaggtaactattttggattgcaaacaggataattaaatgttcaaacaatctgataaaataaccatttggaaactgcttggccttctgttcttttatttgattgactacaatgcggtattggtctcttgctgcacttcaaaagcaaccaacaaaacaaaaacaaaaaaaagtgtgtgtgtgtgaatacacacacacactaactagaagtcttgtgatgaaaatggcacttggaaaaggttttatttttccactgaagttgaaggttaataaaatggtgtcaaacgtcccctggtcacacacttgaatatttttttagaagtgtgatgtggtatgattaccataaatcagacttaattattttcccttttacaagggaacagggcatcctgaattttagagcctttcagcaataagaagggatgttggtgagctttgatcctcttttggttttgcagttgttaggagtttttgctggcattttgaatatgctgctttcagaaaaaccaaggaagttttaaaattgcttcctggtccttagaggactaaaaacaagaccctcattcccactttcatttccactctagcaaaaactgggcttgcgtttttctccaactcctcgtttatatcctcccttccatgtccaagccttccattcctaagtgggattggctcagttttgcccatccatatggcagcatctctaatagctcttgtacagggtatcagatattgtgccttttggtgccaggttcaaagtcaagtgccgatctatgaaccagtgtacaaaaaaaaaaaaatccaggtatttgaaggagagacgctccattgtgaataaagagctcataccagctcctaagccctattaagaagaggcctggtcctctaatgccttgtttccatttcagttgttctttgagagacagaatgatgtactaaccattcgtgattattaagatagggttgggtcagggcttagggagggggcagaaatattggggatagaaaaaaaatctgatcattcctcagtgctacccatttctgtcctgtgtgggctgcttagctagacagcaggagaataaagtacaccgagaaccataatgaaaaaaccttccgtgtgttttgtcatgttttgttccagggaagcagttgatgagtgctgttactaatgctttctcccagatccattcagtggtggagaggaggaaaatgggctggttggatgtggtcttggtgccttgcagttactctgcactggttatgcatttaattctcctcttttctagttaaccttttgccagtgggttttccatagtctgggtatttgtccttatatcagttataccacctaaggcaactgggtgcaaaatgcattctgttcactcactgtctgggccttccccaccctagtcttggcacattccttcaagaatgtagttaccgtctgcttgggaagatgtcagtgcaaatgtgaagataatgggcatcggactaggctttggtttgccacaagtggcagctgcctgtatcaattacatttattaattttgcttttcatttttcccagttctcctcaccccccctttgttgaaatgttggacttgctgtcagaggcaactgtaatattgccttagggacttgtggagaaggggaattgctcagtgtagtgttttaactttcagaaccaagcaatctatttactcttacaaatatttaagaagtgtgttagtccaactttaagaaaaatccaaactcatcagcttttgatagcatcttggtttttgaaacaacttcaatctgtaattggcattcagaatgcccttggcatgccagtctgtgatggcatttaagacctgtaaaacacttgagcccaactcgattaaccaaaaccgataaccaccacctttatcttctaaataaagtccgctttattttta

SEQ ID NO: 101749 - DNA, 370 bp, Homo sapiens
tttgctggtagacgcacaccatcacatcctacataatatttagctctgaggcgtttccagatgggaagtgcgtttctgtattttcatagccgtgttctctacgtgaatggactggcgtgaagctgggggctgacggctggcagggcagaacaacttccagtaaaagaaggcactgaggtttaagtgctacgtgggagcagttgccgatttttgcaatgggaggctgcatagattcaagtgtgagaattcgaagagattcaaagactatatcaccaccatggtcttgccagaatctgccctctgagtcatttcttaatctactgattatctgtagaaccagccttatataaacaaggaagcatctagcagg

SEQ ID NO: 101750 - DNA, 198 bp, Homo sapiens
gctaaagggaccctcattgggcaggaccttgagaactacatgccagggagaattcagatctctgtcagccccagaacaccagcgggggtggctggaggccacggttgggaggtccctcactgggccagaccttgaggcctccatgccagggagaattcaaaactctgtcagccccagaacactggcaggggtggctgg

SEQ ID NO: 101751 - DNA, 296 bp, Homo sapiens
atagtccccgcctggctaccttaatcttaattgcaggaaaagacagtatagaaacacggatttaaaaacagcagcaacaataaaatgaaaaaacataggcagtgccaagatgcacaaagagagaacggtttcaaatatcacactgaacttagctttccttcagttgatccataaggcctgctataccacatcattccaagaaacaccaagactttgtagctttgctatggacactatcagaaaggtcagttggtttgatcaaaattgtggttgtgtagcttcagccattctcatag

SEQ ID NO: 101752 - DNA, 541 bp, Homo sapiens
atcataccttctcttacggagcctcttccacatttatggacccttgtgatcacattgggcccctccagatagtctctctgttttaaggtcagctgactggccaccttaaattccactgcaactttcattcccctttgccaggcaaaataatgtagtcacaggtgccggggatgaggacatggacactctttggggagtgtgaggggagggtgctttattctgccaacccaaataaccaagattaaaactggacaccaattaaaatctaaattttaggcgacttattttgaagcttaatagcccctccccagcccactcccattaatagcatccatggagaatggacagagtgaattgataatagcatccatggagaatggacagagtgaattgataatagcatccatggagaatggacagatgaattgattcatcattcattttaaactgttgtctcattctgacaggacattagagaaatagctcagcctcactcgtctattcacagagccagtttttccattctccattcagattcact

SEQ ID NO: 101753 - DNA, 274 bp, Homo sapiens
cctctggttcctaggtgttttctcttctcctaactttggctaggcacaggacacatctttccagctacttctgacactctcgaaaacaagaaacaagatttttttcttcatcaggactggagatttactggggacagggaaatcttcgaggattcagaagacctcctgcttccttagggtcattattcctgatcatcacccttttccagttctcaaccttcatggcatttctgcctcctcttctgtggctgaagtgggactcacaagctctctc

SEQ ID NO: 101754 - DNA, 363 bp, Homo sapiens
caattattggtagctaatctgaatttctttctgatttccttgctttcacagtattcattcatcaactttttgagtaccctccatgtatcaagcagtgtgctgagcccaggagaaaacattttgccagctttgccatacaagccagcagtttatagtatatggaaaagtcatgcaaatagacagaaaattataagagagaaagtagccccacttcccctgagggtggggactctgtgtacatcgtatttcttttcttgttgtagtcttcattacagctcacggacctttacttcatgcgcctcagttgcaccaaagtaaaattagaaatctattaggggacagtgaaatttgaaaatgaggaag

SEQ ID NO: 101755 - DNA, 769 bp, Homo sapiens
ttttttagatggagtcttgctctgttgttgcccaggctggagtgcagtggtgtgaacttggctcacagcaacctccacctcccaggttcaagtgattctcctgcctcagcttctggaggagctgggattacaggtgactgccaccatgcccaattaatttttgtaattttagtagagatggggtttcaccatgttggccagtctggtctcctcacctcatgtgatctgcccgccttggactccaaaagtgctgggattacaggcatgagccaccactccaggccttgaatgtgaatcttgtatgtgaatcagcggaagcgataagaggctcagttgacactatgagatcacaaggttcaaatactaagggatctagaatactctgattccttatctttaacaggagtattgcaatttttttgtcttgtcttttggctgtccattaaaaatggttgagaccccctaaagtataaatttctaagatcaagtccaagcttagactaaaaggatacgatccattgatagtttaccttattctgtgacttggaaatagtattatgaaactgatatcctccactactgaagaaactaatctcacagggattctgaatcacaaacgaattttgctaatttatttaaaagcaaatgatttggttttcataatttcatttagaaattcagagacaatgaaatggattaaattctactgacttgaatgcaattgttttttaaaagagactagcatctttccaagctatcttactcatct

SEQ ID NO: 101756 - DNA, 687 bp, Homo sapiens
ctagggatgctgctgtgtctgaaactggccagtgaaacccacaaatctattcaccagcaccacacctggctagggacgctccgagagccgggctccttgctggtctcctgaggctgaggttcccagagacatgctcagtacaacctggccgtgttccttcatctcccaagtggatgaatgaagctctcctcacaagcatgcacaacggctccacgccaaagcttcccacagaacacagaacctggctataaggctccatcaaacggcaggtttctctctctctccaactcacccactgaaagtttcagagacacgggagagcagaaccctagaacaatgaggcaatcttcaacatcacaactaacaactcctatttattaagcatttgtatgtgtaaaactgtgccatgagttttccattcattcccttgcagaatctccagcctcatttaagaggcactgagatccatggaagtcaaataaccaagaggtaacaacctcaaagttgcaagctcagatatgctgctaacttccttgtctgacactaggcagccccctcctctgtctgtaaccaaagaaattcataaagttcaggcccaaagacgaactagccatcaactaaatctaaggagtaacctattaagtacttttacagaaaccaacagaaataaattctgcttcaaatagc

SEQ ID NO: 101757 - DNA, 101 bp, Homo sapiens
gtggggaagatggccaggaggtccctccaggcagccagaggagtcaaagcaaagctgtaagggacatcacaaaagcaggtcttcaacacagcatggcaagg

SEQ ID NO: 101758 - DNA, 219 bp, Homo sapiens
agaccaagacggaggcaatgtttgaggagatcttgaaaatctgcgagttttccagaactgctgaaagacaccaatcctcagactaggaatctcacaaaataacaaacaggacaaaaagaaaagaaaagaaagtcatggccgggcgcggtggctcacgcctataatcccagcactttgggaggccgaggcgggcagatcacaaggtcaggagatcgagac

SEQ ID NO: 101759 - DNA, 170 bp, Homo sapiens
gggatatatttttatttatctatgtcttcaattttttagtcaatgttttataattttcaataaacacatctttcacctccttggctaaatttactcctaagtattttttatgttattgtaaatgggattgttattttccatttctttttaagatagctcattattaatgt

SEQ ID NO: 101760 - DNA, 217 bp, Homo sapiens
cacccggcggggactggccctggggccgaggcatgggctcagccgccgccctgcagggacgtagccagggacctcttcccagcagagggactcccccactcatccccagaatactgaggggcacgctgggtgccaggctggcagggaccctggggattctgctgtgagctggatggggaaggagttccttcctaaaatgtggagtctggaggccact

SEQ ID NO: 101761 - DNA, 630 bp, Homo sapiens
gtagagacggggtttcaccatgttggtcaggatggtctcgatctcttgacctcgtgatccgcctgcctcggcctcccaaagaattttgtcctgttttatacttgctttatgaagagaagatttctctgacctcatgctaccatagttggaagtttcccctagatctgaagatatattttcaatttataaatatgtgcttttaaagatgtgccttctactttccttcttctctttctgcatatgaatatttatttaagagtataaacatagttttttaaagatcatctacggtttatctactttgtgcatgatccacagtgactccgttcctgatattattgcctagttaggtctcttaactcagacaaaagaattctaacaaaagtgcattacagttaaagacagggagtttaatatgtataaatttatgtgtgtctataatttaagagcaagtaaaatttatttgatttgtgttatctgttatgtcataattcaccttttaactgtcagaaaacagctttttctgcttcacttctacctggaaaagcgttcttgggaaagtgcacttggtgagggtaccttaggaaaatttgatacccaaataaaatgttttttaagcactgtacaaaa

SEQ ID NO: 101762 - DNA, 687 bp, Homo sapiens
gcgggaaatgagctggctctgcacattcggcctcttccagcggctccctgttccccagagctgagatttctttacatcacagtggttcaaggagaaaaacacagccagatccttcctcatctcaacataaattaaacccagaggcagtcagcgccacagtccacactcgtaaccgttacactcacctggaaataaaagtatttttgtgcggggactgcaaggactaagcccggccgcactccgagtttctcctcctcacagttaattgttttcttggcactctctcccttctcacctgtgactacctgagtgtccccagaggcaaggaactatgtgagccactccagtgttcccagccccaaggccaggcacagtggacatttattgctgaatgaatgaatcaagagagaggatcagaaagctgcagaggatgatagatctgcaaaattctccctgggtgaggcccaggctcagcttccagaacagctccatctgtctcccactcactgagattgaactaatgtcccacagttggacagacctgaaattgagctctgtgattttggatacctgcccctctgctggagattctgcatgtctgaggtaccagccattgccagaaactgggctatgttctctcctttcattgtgccatttcattctcaccccaaaatgaaaacacacaaa

SEQ ID NO: 101763 - DNA, 855 bp, Homo sapiens
agcctcagggagctctagtggagagacaagattcgtgcatgaaataattacgactgttgtagaaaaaagaaaagcctgtaggtctcccttcctccctccttctctctgtctacctcagcatttctggggttcactctgctctgggtactgtgtaaaggactccacagccatcaacttcccttcatccttgccgtgtctttgaaagagctgagatttctttacatcacagtggttcaaggagaaaaacacagccagatccttcctcatctcaacataaattaaacccagaggcagtcagcgccacagtccacactcgtaaccgttacactcacctggaaataaaagtatttttgtgcggggactgcaaggactaagcccggccgcactccgagtttctcctcctcacagataggggctgaggctcagagagggcaagtgacctgcccaaagtcacacagccgtgactcattgctcaggtgaggaaactgaggctcagagagggtccgtggcatgtccaaggttactctgctgttaattgttttcttggcactctctcccttctcacctgtgactacctgagtgtccccagaggcaaggaactatgtgagccactccagtgttcccagccccaaggccaggcacagtggacatttattgctgaatgaatgaatcaagagagaggatcagaaagctgcagaggatgatagatctgcaaaattctccctgggtgaggcccaggctcagcttccagaacagctccatctgtctcccactcactgagattgaactaatgtcccacagttggacagacctgaaattgagctctgtgattttgggtaagtcacttaacttctg

SEQ ID NO: 101764 - DNA, 606 bp, Homo sapiens
gcgggaaatgagctggctctgcacattcggcctcttccagcggctccctgttccccagagctgagatttctttacatcacagtggttcaaggagaaaaacacagccagatccttcctcatctcaacataaattaaacccagaggcagtcagcgccacagtccacactcgtaaccgttacactcacctggaaataaaagtatttttgtgcggggactgcaaggactaagcccggccgcactccgagtttctcctcctcacagtgactcattgctcaggtgaggaaactgaggctcagagagggtccgtggcatgtccaaggttactctgctgtgtccccagaggcaaggaactatgtgagccactccagtgttcccagccccaaggccaggcacagtggacatttattgctgaatgaatgaatcaagagagaggatcagaaagctgcagaggatgatagatctgcaaaattctccctgggtgaggcccaggctcagcttccagaacagctccatctgtctcccactcactgagattgaactaatgtcccacagttggacagacctgaaattgagctctgtgattttgggtaagtcacttaacttctg

SEQ ID NO: 101765 - DNA, 476 bp, Homo sapiens
aggcctcagtcccctccgggaggcaggtgtctccagcgtggagatggcctcttcacagacgcctgcaccctggcctggttggtcctggtcactggtcgtatcccttgctcctccacatatggtgttaacggtttatcctgattttttttttttaaggagtctcgctttgtctcccaggctggagtacggtggcgcagtctaatctcactgtagcgtccgcctcctgggttcaagtgattctcctgcctcagcctgctgagtagctggcattacaggtgctcaccatcatgtctggctaatttttttgtatttttaaaagagatgaggtttcaccatgttggccaggttggtcttgaactcctgacctcaagcagtccacccgccttggcctcccaaagtgtggggattacgggtgtcagccaccacacctggcctatcctaatttctggatagctttattgcagttgaaaatcagg

SEQ ID NO: 101766 - DNA, 335 bp, Homo sapiens
acacaaatgcagaccccgtgagggtgggcagtgctagccccatttatgctactatttgctggattgagtctgttacgcaccttctctatgcctcagctttctcatctgtaatatgtggggtagattatatgaatctatctttaaaatactaagatttgaatgctctatagaaatactgtgagtttaaatttgacttacaggaaaaggcatgatgagcttgtgattcttgtaaaaatgaatggaagagaaaaacccagttgtcattctgtttttatatgttgcttcaatacagctttattcttccagaataaagaaaaatcatctagagttccaga

SEQ ID NO: 101767 - DNA, 492 bp, Homo sapiens
gagctctgcttactgtcatgatggattatatgcacgcagcagaagaggaaagaagtaccgctgacaggaagacctagggtcttttttagccagaggtctctatagacatgccatcaatagtaatggcaaccgcagtgtatcatcgtgacgatgtgcttaatcagggctcaggtgttgaggatgtagacttgggagagccccttgttggtgtgcttaaggcatcctggtttcagtcaggtcaggtcccctcacctaatactggcctgaggcccaagaccaagatacaaggactgaggctgactcttgctctgtcgcccaggctggagtgcagtggtgtgatctcagctcactccaacctcgacctccctggttcaagcaattcccctgcctcagccgcctgagtagctgggattacaggagcatgccaccatgcctggctaattatttatttatttatttatttatttatttttagtagagacggggtttcac

SEQ ID NO: 101768 - DNA, 425 bp, Homo sapiens
gaggtgggaaggacatgaatgtcatggctccaggaacctctgctctcaactggttccataacaggcagcaacagatagatctggcgcaactcacttcaaatctggagttggatcttaggcttttgaaggagtcagtggggaggcagcttttaatatgtagtctcatgatatcatctaagctgacgggatctatgatttctaagaagggtttgccagtgggtttgaggaggacctgggcttttttgagccttccttcttgatatgtcgtgcaagatgccttcagggtaccctctctttctggcctttctattttgtttcccgtcatttcctccctccttttcatcctctctccactcccgggagtggagagagaaaggaaggaaggaaggaagaaaggaagacagacaggaaggaagaaagaaagg

SEQ ID NO: 101769 - DNA, 145 bp, Homo sapiens
cactcaaaagctgaaagcactcattacaagcagacctgcagtggaaaagtgttcaaggaaatcctttaagaacgaggaaaatgatgccagatataaaaacataaatctacacaaagaagaacaagcagaaatggtaactgcacag

SEQ ID NO: 101770 - DNA, 222 bp, Homo sapiens
tcaggtgtctttctgcatttctgaagcggtccctgtaagactaaaatttgtattcctcaataattgaattgaacttggtgaggacacaatctaaatattatgtgctgattaaatagagatcacatttaggggtgtggaataagcatgtaatacaaaattgtttatacaacttaattaaaattttttaaaaagtataaattaaatatgagaaattatctccat

SEQ ID NO: 101771 - DNA, 179 bp, Homo sapiens
ctatagatcagaacttaaactatggggggtggcatttgtgttaggttgttttattataaagaaaagatctgatttttaaaatacagcaaaatgtgaatatatataatattaatgtcatgtatctgtttctatttccttggattatgttattcaaaattaattttgtatagctagaggcc

SEQ ID NO: 101772 - DNA, 397 bp, Homo sapiens
  misc_feature (32)..(32): n is a, c, g, or t
  misc_feature (37)..(37): n is a, c, g, or t
  misc_feature (39)..(39): n is a, c, g, or t
  misc_feature (45)..(46): n is a, c, g, or t
  misc_feature (70)..(71): n is a, c, g, or t
ttctagcataagcatgattactatcaaatganatagnantaggtnngaatgagggtagtgagcttgcttnngagatctgtagattctgatgtacctagaactaagggatataatgacaaaacaggaaaaatgctagtctggaactgtggatgtcgggctaccaatatatttggggaccataagcatgtaggaagaagcagttttttctgttttttttactgccagggtaatagtagaagattcagaagtgttgggaatgaagttgttcctacccaagaggtctccctgcccagtggatgggctggttaccacagggggcccttgcccggcccggccccctcagctcctccggagacctggctgagagccgtgcagatggcctggctcccacaggccc

SEQ ID NO: 101773 - DNA, 246 bp, Homo sapiens
gactctagaggttcccggtccgctcggaccaacctggagctctgtgcctcctacgtttacctgtccatgtcttactgctttgaccgtgatgatgtggctttgaagaactttgccaaatactttcttcaccaatctcatgaggagagggagcatgctgagaaactgatgaagctgcagaaccaacgaggtggccgaatcttccttcaggatatcaaaaaaccagactgtgatgactgggagagcggg

SEQ ID NO: 101774 - DNA, 427 bp, Homo sapiens
agaagaaaaaggaaagggactctctcttacttggaataatttcttttttccctccctccgtggcttcttcccttcctcccttgactatgtagtggcaaagagctaagtaaaattgagttcaaaatctttactctagcatcttactggctactttacttgggcaagttacttaatgttcctgatcctcagaaactctctatatagaattagaataacaagacttacctcatatagctgttactaggatttaaaatgagagcatatatgtaaactgcttggcctagagaggcactcaagcagtgtttgtccccttcccccattctaactggatctcctccctctcatttcacctcgattcaatcagtttttaaagtgcacatttctcagcactataggaaagggaaaaaaatttaaaaataaagtggac

SEQ ID NO: 101775 - DNA, 368 bp, Homo sapiens
atttatgaatacaacattgcataattaagtcaagctgattaacctgttcaccactggaaacaattgcaaataattatcattttttctggtgaaaacatctgaaatttactcagtgattttgaaatgtgcagtactttttgttgttgttgtagaaatgaggtctcactatgttggccaggctggtttcaaactcctaagctcaagtgatcctgttagatcagccatggcattagattctcaaaggagctcgaatcctgctgtgaaccgcacgtgcaagagatctaggttgcatgctccttatgagaatctaatgataaatgtaatgtacttgaatcatcctgaaaccatccccctgaaccccccccgca

SEQ ID NO: 101776 - DNA, 773 bp, Homo sapiens
atcagtagtcatttcctgttcacccctaacccagcccctaagcaaccactaatctacttcccatctctatagatctgcctattctgaatattttatataaatgaaattacacgatatgtggtcttttgtgactggattctttcacgcaccacaattctttgaggctcatccattttctatcctgtgtcagtgtttcattcatttttattgctgaataatacctcattgtatggatagaccacacttaatacgaacatttgaatattgatcaatataagagatttttgtttctttttcttttcttttttttttcagaaattgagtttcactatatagcccaggctagtctccaactcctgggctcagatgagcctcctgcctcagcctcccaagtatttgggactagaggtgggtgccactgctcctagctataagtttttatgccaatatatgttttatttctcttaggtatacatctaggccatatagtaactctgtgtttaacattgttagacattgtcgaatactgacagttttccaaagtgcacccttgcggcacccttttacatcctcaccagcgctatgtaaacaggtttcgaatttttccacattcttgtgaacacctgtcaatttcatcttttttattatagccactctagtgggtgtcaagtggtatctcattgtggttttgatttgaatttccctaatgcactttgtccatttgtcttctttgaaaaaaatgtctatttggatcttttgcccatcttaaattg

SEQ ID NO: 101777 - DNA, 241 bp, Homo sapiens
ttggctcactgcaacctccacctccctggttcaagcgattctcctgcctcagcctcccaaagtgctgggattacaggcatgcaacaccacacccagcctgaaacccagatttttaatatgaaatcaaagtcttcagaccttgtaggtgtcataaaaagcacgctgaggaccactagtttgcaactgccaatctaaaatatcatagacattatatcacttcaaccacgaaaaaaaaagtatg

SEQ ID NO: 101778 - DNA, 442 bp, Homo sapiens
gataaatattgagcacaactcctggtttatggttaaacgtatgtttactttgcaagaaattgccaaactgtcttccaaagcggctctaccgttttgcatttccacaagcaactagcttttggtttcattgatttttctctattgattttgattttcaattgtagtgatttctgctctaatttttaaaagtttattttcctctcctcatcttggatttaatattctcttctttttctagtttcctaagacagaagcttagattattgactttagatctttctttatctgggcgtggtggctcaagcctgcaatcccagcactttgggaggctgaggggggcagaggccaggagttcaagaccagcctggccaacatggtgaaactttgtctctactaaaaatagaaagattagctggcgtggtgatgcgcgcctgtaatccca

SEQ ID NO: 101779 - DNA, 166 bp, Homo sapiens
gtgccaccccccacccctgccgtctccttactccacttaggcagtctcagcaagacatcttcttttattcttctttatttatttatttttgaggcacagtctcattttgtcacccaggctggagtgcggtggcacaatcttggctcactgcaaactctacatctcg

SEQ ID NO: 101780 - DNA, 156 bp, Homo sapiens
taatatattgtcgtctgattggtattcctccaggcacccttttctaaatcacatttttagacctactttgtctgcctgcatgtggctaattctcttccatgcatttctacccagggtttggttatttttttttccttgggttcttacacccaagga

SEQ ID NO: 101781 - DNA, 616 bp, Homo sapiens
ttttttttgcagacaagctgtcacactgtgaattgtcctgtgattctaggtctcctccaagggtcaaaggagactgaggactgcttctagagttttccactaacaggccacgtaagtgtcccgaagattcatggcttctttctacctcccagatcttgaatctgcaccagtaacctctttcctgcagtagcctagatttctggatcacctgaccatcttatctccctgcacgcacacatttataagtcagagctgtcctgcctgggccagtatctgtagcactaaccagttctttcaccaattgtgcaccaaagctcacccatggattcttgatagcaccttttctattctgcatttttcccccacaaaccctctttcctgtgaagacagtatgcccaaggtctccctgcaggtgcctaaatccaggccatgctggaaatcagatgtccatgagttcgaagcagagtttttggatgtggttattgtaaatataagtgcaaaacagaaatgagagacttagtcctccaactggaaaataaaggaagagtattttctctcctcccttttctaaaaacctttcattagaattttttttttttttgagatggagtctcac

SEQ ID NO: 101782 - DNA, 561 bp, Homo sapiens
attatgtgggtattttcccttaaaatattcaaagggatttacatatgggattagctaatgagcctagccaagaccttccctggaggacaggctggtcattgcggaggtcccttctgtgcttcagtgggttcatatcctctagtccgtatgattttcctacgctaatatgtcaagggcaggagaggcagctctgttctcctagcctttgttgacttgtctgcaaagcaggaatctgcccatttgtttccaaggagcaaatgagctcatgagaatgaaagatgttaacttcatgcattctgtgccatctgagcatttcggtattatatgactggtgacccttggcccgtattataaatgcttcctatcctgggagacctcatggatgagtctgagaggaaatttggcaccaaaatcactctcactctggtttccagtagactatagaggcagagaggcatttgagaggctcctgagcaaagtgtccagtgtagcaggagcacttcattaatatttattgagttataattaaataaaaattaatttctgatttctcagtttgga

SEQ ID NO: 101783 - DNA, 362 bp, Homo sapiens
ttattctacaagaatgtatcttagtaagaacttttaaccaatgctattttttgctgatgtaaatttttttaacgaatagaaaatcatttcttttttcagtactgcccaggtcggcatagttctctttcccttatatcttaaagtgcatacacacatgcatgcctgcacacatatatctttttttctcatggctgagtttaaggaagtaaatgaatgcattctacttaactcttcacaatgtagttgggggtggtggctcatgcctgtaatcccagtgacttggaaggcaaaggtgggaggattgcttgaggccaagaattcaagaccagcctgggcaacacagcaagactttctctacagaa

SEQ ID NO: 101784 - DNA, 248 bp, Homo sapiens
atccttccctcctcacgctttgaaattctgtcatcctttgcttcccggccatcccactctcctagttttccatctccctagctgacaactcctttcagtctcccttgcacggttctcatctcttaacgttacaagtctctgagagctcaatcctcggaactcgtctcctatctgcttactcccttacaaatcggagtcaatctcacatcttccaataccagttagtcatatgcttacgaaaaccaaat

SEQ ID NO: 101785 - DNA, 421 bp, Homo sapiens
aattttagcagtattttatagtttcctgtgtataatttttttatttcttttgttaaatttctaaatgctttattctttttgatgctattgtgaatgaattcttttcttaattttattttcagattgttcattgcataaaaatacaattggtgagccaggtgccgtggctcatacctgtaatcccagcactttgggaggctgaggtgggtggatcaattgagctcagcagttcgagaccagcctgggcaacatggcaaaaccccatctctacagaaaatacaaaaattagccaggtgtgtggcatgcacctgtggtcccaactacttgggaggctgaggtgggaggatcgcttgagcctgggaggcaaagtttgcagtgagccaagatcgtgcctctgcactccagcctcctgtctcaaaaa

SEQ ID NO: 101786 - DNA, 1456 bp, Homo sapiens
tcttttccaaataattgctttgggaaattgtggggtttctgactgtttacattttaacaaaagagagaggacttgagtcccaactttcagagtttgttccggtccagacaaaagccattccttagtctgtttgcaaaatctgttccaaagtaatttagaatagaaaatatgaaagccgaccttcccagccatgacaaatcagaagatgaattgtaaaataaatctctgaagcagtgtttatatttctgaatcagagagcaaagtcactgaaaaggcaatctgttacaaactgcaggatgcacactagaacagctcaaggaaaagaggagagcaggaggagtgtctcttctgtgttagggccgacttgagatcctgggtattgaaactgatatttctagattcttgtccttccctgagagggaagtttggtcaacagaaactgatatttctggacaatattcctatcaggaaacttgtacctcaaaatatgcccccttgtgcagatatttttgtatttatttgtcaaaaataaattgtggaggaaattaataatccaattaataatcactttgaatgagccacccaatatacatttacctttttgggaaacggtaaatcaagaaaatattgcaggaagacaccccaactctctgagcagtttgatggacgggtgtcggtggtgtggattttcttggacactaatgatgtgatgtttggttgtcccaagggacactgggcctggtcacttgctggggctactcattttgttagtagtttgttaagttacttggtacgaatccatccgtttctctctgacctatattgacaagtggaattattaaaggtctcagccttgccagagattctgtttcccttaaaggcagtcagtggtccattgcgatggagtcagtgactagaaaagagggactggaaacgtgaatggcttcactgagaagagtgggtggggggagggtacctgtttgctttgctaagggcgtgtcttgaaggttttaatgagtgaaatgagcaggtttcctaatatttctcaattccagacacaccagcatttccgtttccaggtacttaaatttcattttctcatttgttttattgatcgtttccaaatgaatccagagagacgatgttacctgtgtatccaagaatactaacgcagtaataattggcaaaaagagattacctactccatcagatttgagtggctcccagatttctctccagtcatgattgttagcagtaaacttgattttaataaccgtagatgagatggagaggcagggaggaaggcagaaaaaaaaaaaaagttgtgatggttagccaatagtgatccgtctccccactgattctttatttagttggatttaaaaacattatgatgtatgtgggccaccattcggtgcatctaattaaaatggtcacatccagtgtcatttcttct

SEQ ID NO: 101787 - DNA, 511 bp, Homo sapiens
caagaatttcccccaaaagaatcctttaaccaaaaagttgtggtttcttgccttgctaactgtaccatagttattcctgcaggtgaatatataggctttatctgggttatttatttatttaatttttttttgagacagggtttcgctctgttgcccaacctggagtgcagcttccgcctcctaagctcaagccatcctcttacctcagcatcctgagtagcttggactataggcacgtgccactatgcctgactaatttttgtatttttttgtagagatggggattcaccatgttgcccatgctggtctggaactcatgagctcaggtgatccacccacctcagcctctcaaagtgctgggattacagacgtgagccacattgcttggcctatctggattttttaagacaggaataatgttttccagtatagccagccatttaaagaccttctgaagaatgtgtttccaggccctaccctcagaatatggcagcttggttatccagaatct

SEQ ID NO: 101788 - DNA, 408 bp, Homo sapiens
gagctcggtacccccgaatagctactaaatgagcattttgggaggcttaggtggacagatcaccaggtcaggagtttgagaccagtctggccgacacagtgaaaccccgcctctacttaaaataccaaatataagccgggtgtggtggcacacacctgtagccccagctaattgggaggctgaggtaggagactctcatgagcccagggggcagaggttgcagtgacctgagatcgtgccattgcactccgtgctgggattacagacgtgagccacattgcttggcctatctggattttttaagacaggaataatgttttccagtatagccagccatttaaagaccttctgaagaatgtgtttccaggccctaccctcagaatatggcagcttggttatccagaatct

SEQ ID NO: 101789 - DNA, 358 bp, Homo sapiens
attgcactccagcctgggcaataagagcaaaactcccatctcgaaaaagtaaagaaaagaaagaaaagcatcaaattcatgtcaggcttttgagctgaactccagcaggaatgttaaagaagtgtagatgttcagaaatttttctgtgtaactacaggtttttgctgactcacgctttttagaactagttacgaagtacagcattctagaagatgaattttgtgtttttcttttctgtctttccattgccccatgtcccaccttttccttttgtggtattcttttgttcccaactggtcttagtcttctctcctcctgtgcctaagtgatccttaatccagcagtgggtttgcattcc

SEQ ID NO: 101790 - DNA, 831 bp, Homo sapiens
cccaattaggttcaattagggttgaggggaccagctggatatagtcagggcgtgaggccagttcagcaaaagggtatcctaggggaaatttaaaaacagagttttccctatgccaaaaaggaaagagactcattcccttcttcctttcttggagaatttccttgagaaaatttgtgtttgtaattatatcttctgtccctttgataggtatgtaaatcttttgtgtgtgcgccattctttcatacaatcccaccgggccctggacactctcaccaacatcccatacttccttctccccttctgtacatttcatggaccccagggtaggaggggctgggtgagggttcgggatccccctcctgccatcctaactaagcatctggggtaccagccctgctgccaagtgatcttgtccctagccctctctccccaggctggcatgagtgtgtgtttgtgccaagcttctatttcatattgcaaatataaatcaaggaaaacaatttaagttaaaatgaaagaaaaagaaggctgggcgccatggctcacacccgtaattccagcactttgggaagccgaggcgggagttcaggaattggagaccagcctgcacaacatggtgaaaccccatctctacaaaaaaaaaatgcaaaaattagtcgggcttggtggtgtgtgcctgcagccccagctactcaggagcctaaggtgggaggctggcttgagtccaggaggcagaagttgctgtgagccgagatgacgccactgtactctaacctggatgacagagtgaaactctctctcaaaaaaaaaaaaaaaaaaaagaggccgggc

SEQ ID NO: 101791 - DNA, 154 bp, Homo sapiens
gacctgccctgcctgtaaggattctcggatggcactgatgtgatatgatttacaaataaacacacctgctgtgattcttagtaacagtgagaataagagttctcactcagattggaaaggaggccccgggctcctcagattcacccacagctca

SEQ ID NO: 101792 - DNA, 341 bp, Homo sapiens
catcagggctgcaggtcagctcttccctgtcttcagtaaaggatggacgcgaggaccagggtccccagtgtcagtggcgggtcagggatgccaaagtgctgagcagaagttggccagcccttgccagaggctctggagctgggccctgacacacgatgccgtgtgtagtgacatgcaattccatgtagtgacgtgattccgtgtagtaaggcgatgccgtgtgtggtgacgtgcagttccgtgtagtgacgtgatgccgtgtgtggtgacatgcagttccgtgtagtgacgtgatgccgggtagtgacgtgatgccgtgtagtgacgcaatgccgtgtagt

SEQ ID NO: 101793 - DNA, 103 bp, Homo sapiens
cttctcatggaatagtgggcatgttgttagaagggtgccagtacccagtaacattaaaagaaaacaattgtgagagaaatctaggaagtataaaataacattt

SEQ ID NO: 101794 - DNA, 204 bp, Homo sapiens
aagctgaatgtaaccctttgttctcaccctttcttcagatgtgctcatgttgttcacattaaccagacaacagtctgagcatgagtctcttaatgaatttctgtagggagacaggtataatttatacgttttagtcttcttttcttttttggagatggagtctcgctctgttgcccaggctggagcgcagtggcgcgatctcgg

SEQ ID NO: 101795 - DNA, 307 bp, Homo sapiens
attcaactctcatctcacctattctgtactctttaacctaacaggatctccaatgctcatattctcctcacctatgaagacttttggcttcattcctgatatggtttggctgtgtccctacccaaatctcatcttgagttgtagctcccacaattcccacatgtcatgggagggtacccgttgggacgcaactgaatcatgggagcaggtctttcccatccttattcttgatagtgaataagcctcatgagagctgatggtttcttaagggggagtttccctccacaagctcttgctttgcccgctg

SEQ ID NO: 101796 - DNA, 461 bp, Homo sapiens
aaaaaaagaagaaattacaaatgatctgatcttgaatgccaaaaatctaacctttgatgttggcttttcggaagttaaataatgaaccaaagtttctttttttccttttttcttaaaggactacttcataaagcctatcttactttataataaaaggaggaaaacataaataaaagacactcaaatatttatacagttattcaaaggattaaatgtatttggtaaggtcttaaggttgtttaatattttccccttcttttgaatctttgtttttagctctggtacattgaagattttctttttcctgtggttttgtttatagaaattaacaaattcccttgtgatccttaagaagttactttagaaatatacaaatatacatgaatgagagaaaggggatatgaaatagatgagataaggaaatattgtcataataactacactctttatattacactact

SEQ ID NO: 101797 - DNA, 655 bp, Homo sapiens
agcgcctagaacagtgcctggcacataatgtggatgtcagtcaatgttggatttacttgtgcttgtttatttaaaaactatttggggttagattgtcaggaaccctgctacatgttgtgtaaggcttctagtgtgtacgtgtgtgtatttcatataatacatttatgtgtatgagcagttggaattgatcactaaaatatttcttaaaggtaatataagtacaatttggtatgttgagtatcatgaatgaatcaatgcaaagattcaagtatctttgggtagaatcatgtcctttgaaatgtcagtgtacagtaaaaaggtctgacatcataactagattataaatcctatactcttgtactccaaagtcagtatagttggactggcttgtatgtcctgtttgacaaaatataaattttactttcctgtggcaattcccaaactgggctgaccacttggacttttaagaaaatgtaagcactcttgggcattgacccaacgattttcattcactagatcctggggtggggcctaggaatctgtgttttttaataatttcctttctgtaggtgtttacatatagtcagtttctctgctacccacctttcatgatatactttgaaatttggtgacaatcaccttggaccttttgggt

SEQ ID NO: 101798 - DNA, 787 bp, Homo sapiens
ctcggctcctccgagcgcctcccagctcacggcgccccccgaacccggctccaagggactcggtattccccagcgccggctccgggcagtcccggaagggctcaagggctgggcgactggctgatcgagaccgtccgggtcctggctctcgggtcacttgcagaggcctgagcagagcgttaatgagaatgatccagaagggaggagaagctaatggtgcagtggagagcagagtccctgagcaggtgagcagggatgggggcccatgcccatgtcggaagcgggcgccacactgcttcatgatggaaggcagaacgcctgggccagggtgcaggcaggtgtcacagagaatgtccttcatgaccacatcctagttcccagaacctgcgaatatgctactttacatggcaaaagggagtttgcaaatgtgattaagaattaagctaaagaccttcatacagggagattatcctggattctccagggggctggtgtcatcacaaggatctttaaaagtagaagtaaggaggagacgtgaccaaggaagaagggtcagagagacgcaatgcttccgaggaactctgaggatggaggaagggaccatcctccaaggaatgtgggtggcccctgaatgaagaggcaggagaaggcacacagccctgcctgccaacaccttgatcttagcccagtgaatcctgacagacttctaacccgtggaactgcaagacaataatcgtgtgtttgaagccaccaagagtgtggtcgttggttttggcagccatagaaa

SEQ ID NO: 101799 - DNA, 271 bp, Homo sapiens
agctttcttctcaaccgacatctggaagccattcagtgctgcatacacttcctgcaggctgcccctctgttctctcgcccttctcatctcacgtgattgatcacctgacaagctacctggatttcctagtgccccagagttgccctcaatcaacacacaacacgttcccatgtggaatcttcaccaagtgttcatttcttccattacaggaaatagtattctctccctgtccccaaaactttgcagtaaagacccctgacaatctagttca

SEQ ID NO: 101800 - DNA, 473 bp, Homo sapiens
tctcccagtgagctctatagctgcagagtaaataatactgttaataatagcagtacttataactgacagattgcttataaacaatgagctgccaaggtaggaagcaatcattaatggctaattgggaaagacttcctcgggtttgtgtgttcacctgataatgtacatttcctcgactcttttgagtttgtgttccctgtatttttctgcagggcatgaactgtgcatcaattccctttgtattcccaacaatgaatgagtgagtgaacaaatgaatgaatgaatccatttgttgtttcttttattccatagcctgcttcattgggtatgcaaacttcctcttttaatgttgacattgaaatgccatctgtaccaagactttttagatgccattatgaaagtgactccctgctgtccacgttttatggtgccctgtgtctattaaacttatgtctataaatacctaaaaaaaa

SEQ ID NO: 101801 - DNA, 266 bp, Homo sapiens
gctggctctggctggagatggcaacttccaagcccttctccccgtcatattcaggccaccatccctaatccctccccatatgctttcctgacttgacctcagaatccttcacaataccgactccaagaactgctaccactcagcaggagttgaaaagagatataaagcttatttgcattggtgttccaccctaccagctctttgtgggggaaaaaccctgatctgtaacatctgcagatttttaaaatataaatattcctaccacg

SEQ ID NO: 101802 - DNA, 900 bp, Homo sapiens
gtctttgtgctattgccctttctgctttgggcaccttgacctcaggtctttgtgccgttgccctctctgctttgggcaccttgacctcaggtctttgtgctgttgccctctgtgctttgggcactcttcctcagacctgtgcatcacattccctctcttcagctctctgctcaaatgtcacctccttcctgacatcttccctgaccatcctagccaaaatacccccaccccgtccctctctgtccctcgatcctgccttacttttcttcatcacactcagcattgccacctggaataacaatgatagactttttttgtttgttttttatctgtgctcccactagctccatgaaggcagagatcttgtttggctcgctgcacatccccagcacccaggacagactctggcacatataggtgcttaataagtgtcagctgagtatatgagtgacctccctgaacctcaggtcccttatctgcaaagtaatagatgccttgctggattatacttaaacatgcctcatcattagatggagcaatgaaaatttcagcacaatgtctggtacataataggtgctcaataaatgctcatcatgatgattttaaaaggtgtcatgctgaggcttgaggtgccattttcatcagaagtttgcctgataagatttaagttggctgggtgtggtggctcatgcctgtaatccaagcactttgggaggctgaggctggaggattatgaggtcaagagatcaagaccagcctggccaatatggtgaaacactgtctctactaaaaatacaaaaagttagccaggcgtgatggtgcttgcctgtagtcccagctacttgggaggctgaggcagaagaatcgcttgaacccgggaggtggaggttgcagtgagct

SEQ ID NO: 101803 - DNA, 429 bp, Homo sapiens
tctcattctggtcaagatggagcagccccactccttccaggtcctcttccttaagactaaaaatccttgaccgtgacacaaaaacgtacataggaagccaagatggaaagaagatggcacactgcatagggacttcggcacttgagaggcaagttcctgggtttccttattgtctcccatatatgcccaataaggtgcttcaaaagccttcaacctggcaccgatagacaaataaaaaaaaaatagctccaagaaaaacctgttctttcagccaaaagaccaggaaaagggtaggctaacaactgaaaatctttctggcaataccctccctattccaggcaacagggagggtactgccaaaaagaaaatggaaaaactgcagcaatggaaaaactgcagcaccaccccactgaggtttcagcaggccca

SEQ ID NO: 101804 - DNA, 263 bp, Homo sapiens
gcctgactctaatgtcctctgcagtccacttccctagccctgtccctttccatttaaaatgaatatgtccagcctgggcaacataaggagaccctgtctctacaaaaaaaatttttttaattagccaggcatggtgtgcacctgtaatcccagttactcgggaggttgaggcaggagaattgcttgaacctgggtggcggaggttgcagtgagccaagatcatgctactgcactccagcctgggcgacgagggagaatctctc

SEQ ID NO: 101805 - DNA, 691 bp, Homo sapiens
tgcagagctctggtgggcagagaggaagcgcggatgagcgaggtgggaggggcccggggtccacgtggagcacgccccttcccagcaaggggggcgttcattgcgcagagctccaccaggcaggcgcccagggatggccaccagtccccgagtttccaatggcctctgccttcctcagacacctccctcgcttcagcggtttcagtaaccataccggggctgcttcctgcccatgtttttgcccatgctttttacagcatttaaaaatgtatatgtttgtttcatcataatttacctttgtggcttagaaatcaaatcatggaaagcaactgtctccaactccaccctcgccgaccgcagcctccgcctcagagccagatcctcttcctcttccttagtaggcatcttctccgactcggcttctaagtccggctctttttgtgtgggttccagggccctgccgtgggggcaaagaggatggagttgcttacccaccatttcctcttggctggcgggctgcttattgcgaaggtgagacagaactgtggggcgggaagcaggagaggaatcgcccgcacctggaatttctcttttagtttatttgcttcctggttccattttctgtaaactacagccaatcattctgttcagagtggagcgtggagtggggtaagtggtggtgagagtgcat

SEQ ID NO: 101806 - DNA, 409 bp, Homo sapiens
tccgcagttagacgtgggccaggtctccacggagcatgcgtgcttggctgtccctgctcggcccaggggcaaggcctgctctgctgcagccctctctggcccccttttcccttcctcccatccttccccaccaggaaccttcccttcccccacaggcctccactccacactcgaggggagcacctttgctcacaccctctgtagctgtctgcggagtggagcaggaggaaagggaccgccacgtgctcactgtcgcctgttcgaggagatgcgtccactctggcctttcccctgcactgggcatgtcactgtcacctaaccactgcccctcttgtggagggacttgtgaggtccactgtcccggggagcagggtctgagagcagagctgggcaccccacctctctcatc

SEQ ID NO: 101807 - DNA, 411 bp, Homo sapiens
agggaaggaggtaaaaatggcttaaggggggaataaaatccttcaagggcccacagacaactataacagccccttgtcttggcaagaggctgatccttggtgacttttttcacccagttgaaagtcctaggactgcagataagacacaaaccctgcaccctcacttcctctactcctgtgcagattctagaattccctggtagactgcagaactaccctcatcctgtgagtagtacctggtgggagagaggaatgtcccctaggttcagccaacagcagcacatctatggagaaacgagaagggcgaccagacgtctgccatgttcaccatgtggacgtgacacacaggcagagcctgctccactctgcagctctgggtgtcccagccctagtcagtcccatctgaagccc

SEQ ID NO: 101808 - DNA, 382 bp, Homo sapiens
cctcgttaactcccaagatcagtgtctccatggccacagaatccccttctggagtcagacacatggcagcccaggatgaagaccatgctttccagagtccctatagacaggtgccaaaacactgcctacgagagctaagctgaagtaaccaactccaggttgagtccctaaaaggaaaggggccacccttccctcttcctttcctcctagctagaagaagaaggaaataggaagccatcagtgatgatatgaagaaccggtgtaccacagcaagctgaagggattcaggagttgccataccaggcctggtgtatttacaccaagctgttacatcaaagaaagaaagttttatcttgtttaaaccatggttactctagatcag

SEQ ID NO: 101809 - DNA, 374 bp, Homo sapiens
attatgggagaagagccacacaggatcagatagaacatctacgtgaggttctatcatccacacccccaaataagaaatgttttaaagcctgtctaggatcagagtcaaatgaacatgagagctgaaagcaaattttgaaatcataccttcattttatatatgagaagacctttaacatgaatgatgaggaagtgaagtgacttgcctaacatcccatagctagtttgggatagagctggggctggaactcaggtctccggatcctaggccagccaatttctccctgcatttacctcaatttcgaatcttaaagtcaccgggaccagcacattcaggataaaatcttggtgcccattcacctttttacaagtctg

SEQ ID NO: 101810 - DNA, 855 bp, Homo sapiens
tttgggtgctaattcggcttggatgaggtcatgagggtggagcccccaggatgggattattgttcttataagaaaagaagaggctgggagcagtggctcacacctgtaatcccagcactttgggaagccgaggtgggcagatgtcgaggtccggagattgagaccatcctggctaccacagtgaaaccccgtctctactaaaaatacaaaaaattagccgggtgtggtggcgcacgcctgtagaaccggctactcaggaggccgaggcaggagaatcgcttgaacccaggaggcggaggttgtagtgagccaagatcgagattgcatcactgcattccagcctgggagacacagcgatattccgtctccaaaaaaaaaaaaaaaaaaaaaagaaaaaaagaaaagaaaagaaaaaaaagggggggggcctaaaaaaaatcacccaggggggggcacaaacagcaagcggagtaccccaaaggtgtgtatttgccaacacagggggggccccaaaaagggagagcgcagtaatagagaagccgggaggaagtggggagacaagaaaaaacaacaggcgagagcgtgggcgaacacacggccgacacacgggcgacacactagcggcagcagagcgaccccccaataaccacgggggcggggcgacaacaaaattagggaaaacacccatccccacaagacaacttataaacgccccagcgggcggaaccacaagtaacaagcacacacaacagggcaacagaggtggttcaacaaacacacgcagagataaatagagagcagcagacgaagaatcgcgcaccgcagagcgcagcaagccagtccaagcgacacact

SEQ ID NO: 101811 - DNA, 759 bp, Homo sapiens
  misc_feature (151)..(151): n is a, c, g, or t
  misc_feature (153)..(153): n is a, c, g, or t
  misc_feature (157)..(158): n is a, c, g, or t
aaacaggtcctttaggggatcggataaagggcacagtattaataacttctgaaccccgcccagcaacacagactaggtttattcatgttccagtgggagctgccaaggcgaaagggccgtgtctaccaggttgcacacagctgataagttncnggannattccagcttcatccatgtcccttcaaaggacatgaactcattctttgttatagagatgccgggtcttgctatgttgcctagactggacttaaaccccgggcctcaagcaatcctcatgtcttgaactcccaaaatgctgggattactgtcatgagccaccattccttgccaaaatttaagttatacatacaggagactcttacctgcattgtatacaacactagaccactacttgtattaaaacaaatatatctacatagatagatattttccacacatatgcacaaatgtgtgcatatctaagtcaagaaatgtgtgacagtgtatattgggtctatggccaatgaactatcagccatgttttgtaataaaacaactagttggagaattaatatcttccaaaagcaagaatatacatttatgttgtttgatttttcccttcagaacttcatgactcaagaaaaacatcaactatgtgtgactaaaataaattcataagaaatagtctaaaaggggatagatgctgttgtttatgtacttaatgctattctaattttaaaaaatgtggtctgcattccattaaaccaattttataaacca

SEQ ID NO: 101812 - DNA, 471 bp, Homo sapiens
ttcctactccccatccccacactcagcttgagtgaccacagccacacccacttcttctactactactcaggggctgatgctcagcttccaaactggggtgtcgcaactagtcctcttccccaatgcctacactgtccatggaaatacctcaaattcagcataatcaaatccaaatcccacacatttcaccaaaaatcctattcctcttcttgtattccttattttgcttaatggatcccaccagtcaacaaacctaaaccttgaatcatcgaaaagtccttccctgtctcccagaatacatacagcttggccataattgcaacgaactgtgctttctaaattgaaccagagtcttccactctctcttgcattctcatgaaaatcatccagactccgccttcattgccactgttcctccacaagccaaaaacctgtcccagattggattccaccagaagtagagcctgagct

SEQ ID NO: 101813 - DNA, 549 bp, Homo sapiens
tatcgagtgcatggctagaggagtgggccacgtgtcagcctggaaagataacttttaaattatcttttaaggtaaacgcgttctcttaatcttccacaccttcatattttcaactctcagttctgtgtagtaatgctcttttctaaaagcccttcaatacaaatgtattcaaatttttctttacagtaaacatctgaatgtctacttatcccccggggtggcctgaaagaatagcataacagcttatatcttattccctgttttacccctttaagtgttacacaccaggcttgtatttttgggtggcgaatttgaggattcttaattcttaccattacattaaggggaaaaatgaccgcatttctagactctgggaaatttttttttcttggaacagagtttcactcttttggccccgggctggagcccaaagtggcgtgatgttgcgtcactcggaactctggcttcctcggtgcaagtgattctcctgcctcagcctcctgagtagctgggattaaaggggcatgctaccacgcctgggttatattt

SEQ ID NO: 101814 - DNA, 156 bp, Homo sapiens
tgtggaaaagagagctcttgcaattctttgctgaggtaactcttcactgtttctgatctccttatttctaagtaataagcatgtactgccatctctttttttttgagatgaactctcactctgttgtccaggctggagtgcagttgtacaatctca

SEQ ID NO: 101815 - DNA, 366 bp, Homo sapiens
aagttgaggggggctgctcttttagacctatgattctcaaattctaatgtgcacaccagtcatctggggatcatgctaaaatgcagattctgattccatggttctgggatgagacctgggactctgcattcctaacaagctcccagatgatgttgatgctgttggtcttggggccctttgagtagtaagggtttgcaacagtgcttcttaaatgtgtgtgtgcaaaagaatcacagggaaggctgattaaaacgtggattcctatttcccatcctgaagattgattcagccggaggcctgataatttgcattttaacaagttcccaggtgatcctgatgctgctggtccccagactacattttaat

SEQ ID NO: 101816 - DNA, 512 bp, Homo sapiens
aattaaagtttattataggtaggtatgtatacaaaaacacagtatatataggcttagtactatcctaggtttcaagtatctactaagggtcttgaaatacatctcgcatgaataaacttgggggactactatactactaaaacttccttgagttagtgttgtaaatatttgaaccataattatagggatgtatactttaagacaatgcattaatagtatgaaacactaataatccaaagaaacaattgtgtttttccaaattttactaaaatgttgtcacctgctttacataatacattcacatatttgatatatatgtaggacaaatagtgtttaagatttcttaaaaatacatttcattttataaaaaataatattttcatgagaagccttgaaaatagctttctcaaatacctatattatatgttgccataacactgaaaatgttggagaaataacttagttcattaacatgcaaaatagaagcatcaattgtaggttaattgcctgag

SEQ ID NO: 101817 - DNA, 142 bp, Homo sapiens
cttgaccatctggctctggttccagtgactccaggacttatatgcccacaagccaaaagaagatcaagatctgagtgggaactgtggaaagcatgtcatgcgagcccctgccgcccttgaaactctgcgttcctcctcctca

SEQ ID NO: 101818 - DNA, 110 bp, Homo sapiens
gggggtgctgctaggtgtgaggtgtaggcgtgagaaacggggaaaggaagatggggccaccagagactgccctgatggatgacatagtcaccacctaggtatcagcatca

SEQ ID NO: 101819 - DNA, 142 bp, Homo sapiens
tgccacaccaagagcatgcatgtgctattcaaggcaggaagcccgacaagtccctgggcccagcagtgagcctctgctgactgcaggttatctgggcctctatccagcagcagcccgtcatcagtctcttcagtttcccgcc

SEQ ID NO: 101820 - DNA, 967 bp, Homo sapiens
gttatgaccacacataaccttcccaccactgcaggaattctatatgatgacctgcccgttatgacctcacagaaccttcccccctctgcaggaatgctacatgatgacctgccctgttatgaccacacagaaccttcccaccaccgcaggaatgctatatgatgacctgccctgttatgatctcatcttcttccctcttcccctccttaatccctggaaaccactgatctgctttctatttctagaattttgtcattgaaaggaggctatgcaaatggaatcacacagtatgccacctttcagaactggctttttcctctcaacataaaccccttgagacccatgccggctgctgcctgtactgatagttcatccctcttccttgctacgtagaatcctggagcagggatggaaaggcactttttaaaataatgcttttgctgctcagaatatctcagtagtcatctttagcaactttggtaaaacctgttaagccctcctccacaatacaggtctcattttcatagttcctagaaaaacttccaaagaaaggattcctgacgggtgttgagagattgtagggccactgggatgagtttatgccaatgcaagaggagttacttgtgtgactctctacgtgggctggaggtggtggggctcatttagaaaaaccaagcagcatctcctgaagccctccctggtgcccacctcccctgatggggatcaccacaggagaggggactgttctagctcccaggctttcgggcacctgggcttataggggaatgcttttggagaggaggctgttagatgccttgaggatgagacactggctttgctgtgttctccagagttgggagggcagggtgctgtggctccatgaagagcatgtgagatgcatcttctttaggggctgcctccgtgagatggaaggcacccaaggaacacagggggtggcaataaatat

SEQ ID NO: 101821 - DNA, 128 bp, Homo sapiens
tttatttcaaggaagaaccctataactttcctacctgtactgtccctgaaaattcaatgttatagacactggcctgaaatcatttactgagtctactaaaagggcattctctcctgtctacctctcag

SEQ ID NO: 101822 - DNA, 366 bp, Homo sapiens
cttctctggaaacattaccatcatcatcatcatctcattgacagcttgtggttgccaggcactgcacatgtagcaacccagtgttgacaccagccatataggaagagttctgtgacatcccatgttacagatgtggacagagaaaggttaagtaacttgcccaaagtcacacgggtgggaagtggcagggcggtctggctcctgaggtgatgtgcttcacctccacacttcacttcttctccagattctaattcccaaacttactaatatcttctaattgctgtaggatattcatcccccatccgtgtctatttatgatctataaccaccttttgtgaatacaaccaataaagttttgtctgtata

SEQ ID NO: 101823 - DNA, 167 bp, Homo sapiens
tgtatttgagcctctagaaaagaagtgtaattataaaaaacatttaccataacctgaacaatgaatgaagaaaggaagacttggttcttctagctctggacaaaattccatttttttaaaaaaaatattgatttccagctgaagtatagtacatctctgatgttttc

SEQ ID NO: 101824 - DNA, 543 bp, Homo sapiens
aacagatttggtcgtactgggtgcctggtgcaccatgactgcttttaactctggtaaagtggatattgttgccatcaatgaccccttcattgacctcaactacatggtctacatgttcctgtatgattctacacatggcaaattccatggcaccgtcaaggctgagaacgggacgcttgtcatcaatggaaaccccatcacccattttccaggaccaagatccctccaaaatcaaatggggtgatgctggcgctgagtacgtcgtagagttcactggtgtcttcaccaccatggagaaggctggggctcacttgcaggggggagccaaaagggtcaacatctctgtcctctctgttgatgcccccatgtttgtgatgggcgtgaaccatgagaagtatgacaacagcctcaagatcgtcagcaatgcctcctgcatcaccaactgcttagcgccccagccaaggtcatccatgacaactttggtatcatagaaggattcatgaccacagttcacaccatcactgccacccagactataaatgg

SEQ ID NO: 101825 - DNA, 602 bp, Homo sapiens
gcagatccctcaccggtagcccccactccaggccagactgaaacaccgcggtgggctcctggagcaccccccacgcccggggctggctggcctgggaggaggggacacaagaacttgggacggcagttctcaaaatgcagtctggggaccgcagaggttcctgagatgctctggggggtctgtgaggccaaacttattttgatgatgaaactgacacattatccgtctttctcattctcgctctcacgaatgttccaagtacaaaacccacgatgcagtttcagatctcacgtcccaacagacctttaagacaggaccgcttgttgtgtttggggatcgaatcgaagcttatccacagttatctgagaggactgccgaggcactcctccctccaagtgtgcggtgaggccagactttccacagatttgcccaaaaccccattgcagtggcttgaacacagaagcagctccgagaaccagctgtctcccgtgaagccagacaccgaacagactggaaaagggaaaaacagtgcatattcctcacagatcttccgttcgggaaacgataatttaattgttttaattaaaaacataatatgtgaa

SEQ ID NO: 101826 - DNA, 308 bp, Homo sapiens
tattgacaccattttatgttcacctgattgcttcctattttctttcagttatgccttcggcattctttagatatcattttacttcatatttgtgtcattagagtggcaatgaagtgttccaagtacacaaccttatattgtaggttttagtaaatgaaaatcactactgactacccagggtctcagtcactttttccatggatctgctgtatgacctttcacttcttccactcttggagcctcatttactgacatgtaaaattagggctgataattttaaacctgttgcttctctaattgaaatattc

SEQ ID NO: 101827 - DNA, 566 bp, Homo sapiens
caggtggcagtctagtaagatttaacgatactgtctgactggagctggaaagcagtgagtatggctgctatcggagaggagagagaaaatcaatctctgtgggctgctattatccagaagaaatggagagctcccaatgaccaggcattccaccgagcaacagggcttacttgcctctgctctcattgaaaaccacacagagcatgcaacactttgctcactccaaaactttatgactttcttcaatttcaagcaatgttgaatgctgactcaataagatacaaccaaaacaacttgttgatgagacaaagctgagtttattttttaccatggtaaaagtgaacgctacctcagcagaggggcaagaaatatattttttgagattttgaagtctggtgcaagtttttcaatgtggaacttggttaagatggggctagcgtcataatgtagttgcttagaattgtgaacgcagggaggagagaattttgagaaaagtaattcaaagggtcttgacatataccattcagtaagttgctggaatgaaaaataaagtcatttgcaattgt

SEQ ID NO: 101828 - DNA, 98 bp, Homo sapiens
gcattcaacccccattcccaaccgtgccgacaaattgctgcttgaagttcctggtcccagaggccttcttaaaatgttcaggaatgcaggcatggaag

SEQ ID NO: 101829 - DNA, 179 bp, Homo sapiens
ggagaggtgaagaagacagaaggaaaagccagggccagttttctttccaagttgtccatggtaactgccatatgctacttatcgcactggccacaacctagtcaggtagtcacacttaggtgtaaagaagctaagaatgtagtcttttttttttttttttttttgatagccatatacca

SEQ ID NO: 101830 - DNA, 604 bp, Homo sapiens
aaaataacctgcacttttaaaaatgtcaaggccacgaaagataaggaaagactgaggaactgacccagattggaggagatttgggagatgcgacaactaaatggaatatggagtcctagactggatattggaactgaaaaaggacattagtggaaaaactagtgcaactcatgtcaatgagttctgtagttcacttaataacagtattctaccaaggtatatgttttggttttgataaatattttttggtgacattagatacgaacataaaggaaagctggtcaaagggtatatagaattctgcaatatttaggcaagaattctgtatgtctgaaattatctttaaaaaactacacacacatccatgcaccgagcaggccaaacaaaatatgtctgtgggtctgattcattcattccattccattcattcattcattccattcaacaagcctttgttgcgcgcctacttggcacaaggcactgtttcaggtactggggagactgcatgaacaaaacctcaaagtcctgcccttatggagctgacactaggtcgagagaaagataacaagtgaaataagtgaactatctagtgtgttagattttg

SEQ ID NO: 101831 - DNA, 174 bp, Homo sapiens
gtagagacagggtttcaccatgttagccaggatggtctcaatctcctgaccttgtgatccacccgccttggcctcccaaagttctgggattacaggtgtgagccaccgcgcccagctggttttggtttttactgtggttactgtgggtgtgggatattgacatgggggtggagg

SEQ ID NO: 101832 - DNA, 245 bp, Homo sapiens
agggggaagagagcatgtggcgggcgtcctttggctcgaaggtttggaagggacagaggacagcaaccaggcagtcccgggagcctgtactgaggctgggtgagagctcctggaaaagctgtggctgtcgcttgctgagctgcctgacgccgtccttgaagggcggggtgctcggacagggccctctcaatgctgtcagaggaacaacgggccctcactgaccctcacccctcacgcaccccaag

SEQ ID NO: 101833 - DNA, 763 bp, Homo sapiens
cttttcatctaccttaccactgtatcctcagcccctagaataaatgcttggcacatacctagtaggtcctcaaatgttggtcaaaataacagaacaagccaatcactgagattccagcccagctccctgggactccacagccttttctctttctgtccatactgtgggtccctctatccctcaaagttcagagctctgggattgcagggacactgactgtctgattagcctttgcttttccacaccagcacagctgattctggcagaggccccggggaagatgctccagctgctttcagtggagagcatgtcaaaatccatctaaccgtggatgagcaaacgtggagtggtgctgacacctggcttttgccgtggattaatgctttagtggtggtttctccctggtgcctagtggttgaaggtggcactgatgagcactatcacttattgcaccgagcttattgattcctcaccatgaccctttgtgtgagggttctccttattcctgttagaagtgaggcttggagaggttaagggatttacccagcacaggcagtggtggacagggaactgggatcaagatctgatggcctctccttcttctctctctctctctttcccctcctctgtctcccaattgtcttggcagaaataatgctttccaggtaagagctaaattcaaaggtttgcttcctagaatagaactcatccctattttcccagggctcatggttctccttctgtagcccagagagaagatgag

SEQ ID NO: 101834 - DNA, 313 bp, Homo sapiens
ttctcttgaagcaaggctagccaataaaaactttgtatgaccatttaaacaaaacgaaacgaaaaacaaaaacaaacaaagcttccttcactcagaccatcctctctgccgatgaaagcccagcctgccatagaaaatcagataggcctctgagcctatgcacattttgttgttttgcctaaaacacttttctaccatctctttgcctggatgactatctcatacttgaagaatcactagaaatgtcactttctccgggagccctacctggactttgtctgtatgtgctcccgcagcgtatggagtttcccca

SEQ ID NO: 101835 - DNA, 94 bp, Homo sapiens
atattcttttccatgtaccaaacattattttattttatttttattttattttgttgagaaagaatcttgctctgtcacccaggctggagtgcag

SEQ ID NO: 101836 - DNA, 180 bp, Homo sapiens
ctttcctgttttaatactatactcagttcatgcaggtccttctgagctggcattgcctgtgagtggtcttttacactttctgcacactatgttgaaggctgggattcaaagtctccctctgtcctagatgtaagtcaaaataaaaagtgaatgaacaaacaagaaagagaaggaaaaaaa

SEQ ID NO: 101837 - DNA, 392 bp, Homo sapiens
attttacagaagagcaaacactgtgtttgacctacatcatctgtcagatatcctaaggctctgaaattagaaaatccctggggtttgctgcattttgctaggctatccattagcttattttgtcaatttttattataagaggacaaaaaaatagaaatcacaatatctgttctaatattcttttatatttgcaagtaaaaacctttggaaaaggttctcaaatagatttataaatgtttttattatatggtacatctagctattatatgtaatgtagtttaacagtatatcattcttgtgtttatctttttatgtaaattcttaagccacacataattttcattaagatcctttgttcaggtaaaattagtagcatttgaaaatggtatatc

SEQ ID NO: 101838 - DNA, 523 bp, Homo sapiens
tacaagtttcattatgtacttaaagggggtaaccaccagaaatgaagttacgtcctcactggggtagatggaccctacgggccatgcagaccctatccggagttgagtgtaatttacggctctgtgtgttttgccaaacaaatccagtgtagataattccagaagaatgacactgggctctagctttctctcattcattttggaacatgcgcatcaaaccaaagttctttctctgcttattccctttaaacatttctaaagtagcacacactttgaagaacctgcttcttgccaagtgaattcagaaaccttggcttccgcttgctggggagactgtcagcatgggcacagatgtgcatgagtttcccactctttgggattctgtgtgttttggtacagccctttgtgcagccgtgggaaccctctgaaccatcccaacctatttgaaaatatttctagagggctgaattttgtcatgggggcaaccccaaagacccaggtttgaagcctggctctgcctctt

SEQ ID NO: 101839 - DNA, 469 bp, Homo sapiens
agccctggtagcaggagtgggggctatgcatggatccagcaatacacactcccactccacaacattgacccagccaccaaggctgacaaaatattcaaccttccagcaacagaaaccaaggatgacccttatccctgcccaggtatggtattagcccttgagactaaccagccatgtggtgggaagttgaatatcttctaccctggaaaggtcattgattcattttagtatgaattaattcatgtttctgggttggatttgctgttcttgcctgcagggcctcagctggcaccagcatctaaaggcttagagagttagtgatccaccaacatggcatctcacataacatcccatcaaaccaagtgacccactttactagaaatgaggtgcacgagtggacaagctccagcttgacccaagtggaacaagctctactagtcccatcagatcatgcaccatccagaagctg

SEQ ID NO: 101840 - DNA, 361 bp, Homo sapiens
taatttgatatgctttgtggatttgcctggcactctgagcaaatgaccaaaaccaattattctgccaggtaggcctctgttctcacgttaataacattctagttgtgagtcatttatgacttcgatgagagagtataaaacaaacagttccattaggggttggtttttccctggacaaatgggtacagagctgggcctgctgatgagctcagcaagaagtccccaccctgggaagccctgccaactgccagcaccttgtattcagcaggctctcagccacacacaggctaagtcacagcccctggccccattaggaatgtgtgtatcctttcctgcctgaatggcccactgagaggtcgtt

SEQ ID NO: 101841 - DNA, 462 bp, Homo sapiens
ctgcccgcctcagcctcccaaagtgctgggattacaggtgtgagccactgtgcccagcctctatccccagttttatattgaattataattagattcaaaagaaacctttcagccagtggtcctcatccttaaactgcatattggaatctcctgggagacgtaatgttgtaggctaaggatataattcaggctattactgaattataaagcgtgctgtgttcatatcctggaggatggaattgggtcacagtgttttcaagtctgaaaaatcagatgccatagttctttgtgtttttaagttagagtccattgccttaagtcctcatgggcattttaagaaatagatcaaagtatttgatgagctcagggtatgggcacccatactttctcctcgctttatccttcaaattagtctacttagaatttgcttttaaatttctgcctaattttaaaaagacaatt

SEQ ID NO: 101842 - DNA, 1258 bp, Homo sapiens
ggaggagaggctgcagctagaggctgggccacaacagtgaaagctgcccctgagtggaatgttgtcagtgtccctccacactggggggctgctgggtgggaggacaaagctgtcctccagaggctgtgcctgaggctgggtgaaagtgggcactgtggcatgtaccatcagacatgtgcagttgactgtggtgagcacaaggctacatttgcagccaagcccaccagaggacccagagctagagggtgatgcttggaccccattctgcagggcagtttctcctcgtatagggtgcatgtctgtttagggccatgagaagcactggttgagtgcttatcaagttccctgtgcccggccacataactttaaacccccagcttagtgactggctacaagagtcaaactctgttcacaagccatgctacctggactcctggttccatttctcaggagtctaccagtgctgccttgccactctgtccaagctttgtaagaatgcccagatgtgtacaaggatgacccatttgtgggcatgtatggcctaaagagcctgcccagccccaaggacttcttagcagagcagggcccttagtgcatctgggtgggcccagagcagctgcagccctctctcctgcacggccagagcgacttagctgggccctgctctgcccgccctgtggccatgcttccatgggctcctgactctcctagggccttcttctggaaagtgctcaagaaccgagacactatcaccaaaactggagactctgggaataggatgtcatgtgttaagcatcagaatgtcccctccaacaagctaagagtgtctactcttgccaccctgtcatcattgtgcttgaggtcaaagccagtgccagaaggcaagaagaaatgaaaaaccatccaggccagaggggaagaaatgaaaccatctccctttgcagatcacatgattgcatagaaaatcctagggaatctacaggaaagttattagaactaataagtgtgtttaagcaaggtctccagatataaggtcaacgtaacaaaaattcatcatatttatataatctatctgtaacagttgaaaattgaaaattttgagaaaagtgccattaataatagcaccaaaaaaaatgaaatacccaattataaataatataaaatatgtgcacattctgtttgctgcaaactgtaaaaccatgatgacaaaaaggcttaaataaaaggaaagataccatgttcatggatcaggtgtctc

SEQ ID NO: 101843 - DNA, 1173 bp, Homo sapiens
ggaggagaggctgcagctagaggctgggccacaacagtgaaagctgcccctgagtggaatgttgtcagtgtccctccacactggggggctgctgggtgggaggacaaagctgtcctccagaggctgtgcctgaggctgggtgaaagtgggcactgtggcatgtaccatcagacatgtgcagttgactgtggtgagcacaaggctacatttgcagccaagcccaccagaggacccagagctagagggtgatgcttggaccccattctgcagggcagtttctcctcgtatagggtgcatgtctgtttagggccatgagaagcactggttgagtgcttatcaagttccctgtgcccggccacataactttaaacccccagcttagtgactggctacaagagtcaaactctgttcacaagccatgctacctggactcctggttccatttctcaggagtctaccagtgctgcgcccagccccaaggacttcttagcagagcagggcccttagtgcatctgggtgggcccagagcagctgcagccctctctcctgcacggccagagcgacttagctgggccctgctctgcccgccctgtggccatgcttccatgggctcctgactctcctagggccttcttctggaaagtgctcaagaaccgagacactatcaccaaaactggagactctgggaataggatgtcatgtgttaagcatcagaatgtcccctccaacaagctaagagtgtctactcttgccaccctgtcatcattgtgcttgaggtcaaagccagtgccagaaggcaagaagaaatgaaaaaccatccaggccagaggggaagaaatgaaaccatctccctttgcagatcacatgattgcatagaaaatcctagggaatctacaggaaagttattagaactaataagtgtgtttaagcaaggtctccagatataaggtcaacgtaacaaaaattcatcatatttatataatctatctgtaacagttgaaaattgaaaattttgagaaaagtgccattaataatagcaccaaaaaaaatgaaatacccaattataaataatataaaatatgtgcacattctgtttgctgcaaactgtaaaaccatgatgacaaaaaggcttaaataaaaggaaagataccatgttcatggatcaggtgtctc

SEQ ID NO: 101844 - DNA, 230 bp, Homo sapiens
tgatttgctcacagaattagaatggctgagtcaaagggtataatgtgtttaaggccatgggctaactgaaacactgctttttagagaggtgaactagattatactctaatcagccatgtgtaagaatgcttgctttaccatatccttgaaagaaatgattcttaacaaattcgtgggtagacttctgtttccagcatcggccaactagatagtttcaaagaagccttctg

SEQ ID NO: 101845 - DNA, 424 bp, Homo sapiens
tccggcatgcctccctggcttcaatcactctattctggagaagtacaggacactttatacctagaggagcctcagcctggacagcgaatctcaaagtttgcattgacaaaagtcattttcccgagttgattgctgatagtccaaatttctgggtctaaacctcagggactctaattcagtagctttgggtgaggttcaggaatctgtagctttggtttgtaactcagggcgaggtctttgctccggctataacttagaagtacataatttgcaaagtttaactggtctgtactgaaatgtttgaccaaaggaaataatttcaatcataacaatgatttctgttataaaagctactattaacccgatttaccatgttccaaggcactgtggtaagtaccatacatgcattatttcatttaattca

SEQ ID NO: 101846 - DNA, 259 bp, Homo sapiens
tggttgctttgagtggctcgcccgttgtctttaggatggttcattcccaattgcttgactgctatgaaagaacttatatgaatcccaggaggtttattagaaacatgttctaagtaatagtaagaaagttggattaacagggtctgcatggaaactctaacctccctccctaaaggaggagaggagcaagatgagtctttccagcttggggcaggcatcgtaagtgtacaatgaccacataatatggcacactatataa

SEQ ID NO: 101847 - DNA, 402 bp, Homo sapiens
tggagatgggtcttgctctgttgcccatactggagtgcagtggtgcaaccatatctcactgtaacctcaaactcatgggctcaagtgatgcttccacctcaatctcttgagtagctgagattatagatgagtgccaccgctaagcaagtgcctggctaacttttgtatttttgatttagtagacatggggtcttgctgtgttgcccaggttggtcttgaacttctggtctcaagagatcctcccgcctcagcctcccaaactgctgggattacaggcatgagccactgtgcccagcctacaattaaccattttttagtgaacaattcagtgctatttagtatattcacaaggttgtacaactaccatctctatttagttccaaaacatttccattacctcaa

SEQ ID NO: 101848 - DNA, 1121 bp, Homo sapiens
cactactgggttatgtccagaggactctaaatggttctaccatgaagacacacgcactcaaatgcccactgcagcaccactcacaacagcaccgacatggaatcaagctggggcctgtcagcggcagacggataaagaggatgtggtccatatacaccgcggaatactatgcagccataaaaaggaacaagatcatgccctttgcaggaacttggatggagctggaggccattatccttcgcaaactaatgcggggacagaatcccgggcactacacttccccacttacaagtggaagctgaatgatgagaacacagggacagaaaggggccaacaacacacactggggccggcctgagggaagagggagaggctcagaaaaccattttaacaaaactgtcaggtacccatgcttggtacccggtgctgaaatgatctgtaggacaaaccctagtcactagtttacctatataccaagcctgcacacagacctgaggctaaaataaacattagcatatttaaaaataaatcaacaaagcctgcacacctgcccgaggctaaaataaacataagaatatttaaaaataagtcaacaaacagtatcttttggtaaatttacccgacagctgaagggataaacaattgtgctggagacacacagggaaaaccactcagcgataaaaggaactgcggacgctccaggaggagtctcccagcctccgtggtgaatgaattcaagcggttagacagaaagtgcgcactgtgattccacatacgtaaaactccaggaaacaccacctcacctaagtgcagcccgcagatgcacgggtgccggggatggggtggggtggggtgggagtgggggcgaggaggcctggttgcagagccccacagtgccgtggtatcttctgtgtcttgactggtcatagttcattcatgtcagacctcaccaaattatacattttacataaatatttaaatgtaaatgtgcaattacatatatttattgacataaaagcattttaaaaaatggctgggtgctatggctcccacctataatccccgcactttgctggtcttgaactcccaacctcaggtgatctgcccgcctcggcctccca

SEQ ID NO: 101849 - DNA, 1218 bp, Homo sapiens
cactactgggttatgtccagaggactctaaatggttctaccatgaagacacacgcactcaaatgcccactgcagcaccactcacaacagcaccgacatggaatcaagctggggcctgtcagcggcagacggataaagaggatgtggtccatatacaccgcggaatactatgcagccataaaaaggaacaagatcatgccctttgcaggaacttggatggagctggaggccattatccttcgcaaactaatgcggggacagaatcccgggcactacacttccccacttacaagtggaagctgaatgatgagaacacagggacagaaaggggccaacaacacacactggggccggcctgagggaagagggagaggctcagaaaaccattttaacaaaactgtcaggtacccatgcttggtacccggtgctgaaatgatctgtaggacaaaccctagtcactagtttacctatataccaagcctgcacacagacctgaggctaaaataaacattagcatatttaaaaataaatcaacaaagcctgcacacctgcccgaggctaaaataaacataagaatatttaaaaataagtcaacaaacagtatcttttggtaaatttacccgacagctgaagggataaacaattgtgctggagacacacagggaaaaccactcagcgataaaaggaactgcggacgctccaggaggagtctcccagcctccgtggtgaatgaattcaagcggttagacagaaagtgcgcactgtgattccacatacgtaaaactccaggaaacaccacctcacctaagtgcagcccgcagatgcacgggtgccggggatggggtggggtggggtgggagtgggggcgaggaggcctggttgcagagccccacagtgccgtggtatcttctgtgtcttgactggtcatagttcattcatgtcagacctcaccaaattatacattttacataaatatttaaatgtaaatgtgcaattacatatatttattgacataaaagcattttaaaaaatggctgggtgctatggctcccacctataatccccgcacttttgttgggattacaggcatgagccactgcgcccggcaaattgggcaaatatttatatacaaattcctaggcacggcaggcatcagggtgaatgctgaacaacataaaagttccccatcacacagctctatggctggcccctctaccca

SEQ ID NO: 101850 - DNA, 505 bp, Homo sapiens
aagtttcctgtgcagaaggaaaaaattgatcgctgttctggtaagaaactggaagatggccctaaattcttgaagtctggtgatgctgccattgttgatacggttcctggcaagcccttgtgtgttgagagcttctcagactatccacctgtgggtcgctttgctgttcatgatctgagacagacagttgtcgtgggtgtcatcaaagcagtggacaaaaaggctgcggaagctggcaaggtcaccaagcctgcccagaaagctcagaaggctaaatgaatgttatccgtaatacctgcctccctggtcttcttaatcagtggtggaagaacagtctcagaactgttcgtttcgactggccatttaagtttaatagtaaaagactggttaatgataataatgcatcgtaaaatcttcagaaggaaagaagaatgttttgtggaccactttggtattatttttgtgtgtgtggcagttttaaattattagttttaaaaattagtac

SEQ ID NO: 101851 - DNA, 84 bp, Homo sapiens
agagcaggatggaggacaggaagaagaaggaagattttctggaagttccacataggacagtgcttacaaatcattggcttaaag

SEQ ID NO: 101852 - DNA, 334 bp, Homo sapiens
tcagggttctgaggattcagaatacaatgtgggtgacttctcagcacagaggctggcacacagcggtccccaggtgaacggtgctgttgatgtcactctatagtagtctgtctttctttagctatgagacaggctgtcacttcacttttggtgttactgagttcttccttgatccacttaacctgtgtttccctaggccacaccagccaggtcattaataataataaattgagattatttggctggtatccttatctgcttctgtggaatctgtgactgcactcaaaagtctcacccacccagtaactcttggagtcgtccccacggcataagg

SEQ ID NO: 101853 - DNA, 413 bp, Homo sapiens
aattttcaaggatgggggtgataagagcaacctttgccattagcccttccaggaccccatgtaagactttagacaccttctcactcatctcagaccttctcagggtaacttggtgaaaatgtcttccgatctgagccccagtgagcctccctgcaacttggcgacgagggactagaccagaaaaggtcaacccgagtgtccctgaccgttgaaatgattggcaaaatggagtgcgtgtctgggtgtggctttttttttttttgaggagtgcccagttgtgattagaattttcaatgggatgcagtgccctaaaaatgaaaaacaaaagcagaagaatggaagaaatagaggtagactcagacacagagaccatcttcaaggcctttctctgtatgaggacatcacagcaaaat

SEQ ID NO: 101854 - DNA, 1527 bp, Homo sapiens
gttgagcttctgtgtcgtttaattacttactcaaaatacaaatcaacatttaaagaaatatattttatatataataaatatcacaaaatatctcatctgacaaaactgcaactagaataggtaacatgggaatttccttatgaattcttatctcttatgcaaacattctagccaatcaaatagatctttcaatacgtgcagtgcctccgtagtgatgcctcatgctaactaactcccttcatcggtaagttatcactgctttaaaccttcagtctctgtccatccatttcctgttaaattcctcctagattcactcaattcatccagccagccattcattaaacaaatattactgagttcatatctacagtagagtgctaggcacccagcacacaacagagagtcaaccaaacatggtccctgccctggaaagcttacagttgaattctcttcccaatcaatgcccattctgcttgtccacctctgggcccctctgtctctcaggctacatgcctgtgctgaagtaccaactaacaggtagctgaccagggttttaccgagtctgtatggtacattaggtgtctgtagggcatggtcatctctgtacaacacaggcctactttctggatttgttatgttggaatagattatctaccctgagtattttcccttatttttgtgatcaaattactttctcttggcaatgccttctttttttttcattaagtacctgggtgcccccaagtggatgatggttctctcacattgcaagagctggttgtacaaaatgcagcacccaagaacttcatgaccatattatcaacctaggagaaaaatgttatggatttgtgcaccaagaaaggaatctaaaatacatttgcatattttataactcatttgaatgtcatcatacccagaaaataaaattcaggccatttttcccttgttaaaaaaaaaaaaaaaaaaaaaaaaaaaaaaaaaaaaaaaaaaaaaaaaaaataaaaaagaaaaaaaaaaaaagaagacagaggcgcgagggcgagcgtagaggaataaataatcttacaacagggagggggagccgcgagtaagcgcgccacaagacgatgtgtagttgggagaagaagggggggcgccacccatcaaagaggacacagtaatcaacaagacggacaaacagcagaggcggcctttatcaataacaaacgccgccgcacaggggagagaacaataaagatgccaacagagagacctattggcgagaagggaaaggcaccacaacagaagcggcggacgcgcaccacaacaaacgacgaacagcaagcaccaccccagacgaaaatagagccgcgcaatgtgagctaagatacaaacagcaaaaagagaggagtcaacgcagagacaacacaggcgaaaaagagcagcgatggcgagacccaagaaaggaaggacgcgcgaaccaggtatgacgagaaacgttaaaaacaggagggcgagaaacgaagagaccacatcgcgaagagaagg

SEQ ID NO: 101855 - DNA, 1023 bp, Homo sapiens
gttgagcttctgtgtcgtttaattacttactcaaaatacaaatcaacatttaaagaaatatattttatatataataaatatcacaaaatatctcatctgacaaaactgcaactagaataggtaacatgggaatttccttatgaattcttatctcttatgcaaacattctagccaatcaaatagatctttcaatacgtgcagtgcctccgtagtgatgcctcatgctaactaactcccttcatcggtaagttatcactgctttaaaccttcagtctctgtccatccatttcctgttaaattcctcctagattcactcaattcatccagccagccattcattaaacaaatattactgagttcatatctacagtagagtgctaggcacccagcacacaacagagagtcaaccaaacatggtccctgccctggaaagcttacagttgaattctcttcccaatcaatgcccattctgcttgtccacctctgggcccctctgtctctcaggctacatgcctgtgctgaagtaccaactaacaggtagctgaccagggttttaccgagtctgtatggtacattaggtgtctgtagggcatggtcatctctgtacaacacaggcctactttctggatttgttatgttggaatagattatctaccctgagtattttcccttatttttgtgatcaaattactttctcttggcaatgccttctttttttttcattaagtacctgggtgcccccaagtggatgatggttctctcacattgcaagagctggttgtacaaaatgcagcacccaagaacttcatgaccatattatcaacctaggagaaaaatgttatggatttgtgcaccaagaaaggaatctaaaatacatttgcatattttataactcatttgaatgtcatcatacccagaaaataaaattcaggccatttttcccttgttaatattcatggtatggtgtggtatgtgtatgtgtgttgggggcatggtacaaacaaggaaggttgatacaagtta

SEQ ID NO: 101856 - DNA, 181 bp, Homo sapiens
cccaaagtgctgggattacaggcgtgagctaccgcatctggcccactctgcctccttaattcagctctcacattgtaaacaagcacccttttcacagtctatttagtgccatgttttttgcatttttgtgccttttttttttttttttttttgagacggagtcttgctctgtcgcccaggc

SEQ ID NO: 101857 - DNA, 608 bp, Homo sapiens
gccccaggctggagaccccaggtcctaggagcctgtgtgggcaccagcaaggtggggacaggtgggcgcggggccgcccccttcagcctgcgcccgcagctctgtgggccccgcacccagggctgccttgagggagcactggctctgtggccatgcttggctctgcgcctctccacctggcttcactgattcagtacctcacttcctctccctgacacgcattctgcgtggagctgaaatgatatggaaggtcctccccatccccaggcacctctgagccagtaaatgtgggttcttctggaagacttggccccgccagtgcacctacggaatcgcgaccatggggtggaagcaaacatctcccctggggacaccgaagcccaagtcaagccccagcactgccgactccatgtgggtgaccgtggacaaagggctgggcccctcagagcctctgagatgcagagtgggtgacgtccaggtcacaggctgcagcgaggttgatgcccaggtccagcactgacgcccagcccgcccagcccaggtgaccacatccccacggctctcgtggcagaagcaccttccctagcacccctacacccctggggtga

SEQ ID NO: 101858 - DNA, 514 bp, Homo sapiens
tggtaatgatggtgatagggtaaagtttggctttttcttggtttttgtttttgcgggactccatcatggatcacccaataggaagccaagaatgaagcagactgggaatgcgagagctcttgtagccaatgcccagccctgcaaatctgccagggaagcagaacagagccaagtggaagtagtgtcctactgggcagggttgggcatctctcccttatccagtggggtctgctccttggagtcaagggtctgtcatgcatccgagggtttggggtctatctctcctcaggatgacccaatgttcagatgggcaaggagaaggcactgcccacagccccagctctccatgtgaccacctaccacaagagtacctccctgcagtgtcggcttggcttatgaaccacaagcacacagggaggggtgcggatggggaatctcccacctgcatctggtctgctgggtaaaatccaactggtgtcagtgcagtccaagtcaccgggagacatgcagtttg

SEQ ID NO: 101859 - DNA, 529 bp, Homo sapiens
tctagtagagatggggtttcaccatgttgcccagggtggtgtcaaactcctgagttcaggtgatccacccgcctcagcctctcaaagtgctgggattacaggcatgagccacctcagggttacacttccttgatgagtttaattcagaagtgaccaggaggttttgcttagccaatgaaacacagatgggcatgatgtgtgttgcgtctgagcagaggcttttcgatccagctcatggctcagcgcctttctgtggtccttctgctatgaaatcagcagcgtcccatggagaggttgacccatcagcctgggttctggagtgaagcaccactggctacactgcagtatgagcaagaaagtaaagctttgctgctgtaaaccactgagattcagggattgtgtgtcatgtggcctaactcagcctagcccagctgactcagtcagtgggagacacaggcaggagatctgcaggccggcagagggcgaggccagggcaactctacttcaggcagagtctctttcaggggcc

SEQ ID NO: 101860 - DNA, 638 bp, Homo sapiens
ccacagctaatattatactcagtgataaaaagttgaaggattttcctctaagatcaagaacaagacaaagatgcccattcccaccactttggctcaaaatggtactacaagtgctagccagagtaattaggcaagaaaagaaaagaaaagaaaaggcatccaaataggaaaggaaaaagtgaaattgtctgtgtagatgatagaattttatatataccaaatccaaaagattccacccaaaaaatattagaactgataaatgaatgaagtaaagttgcaggatacaaaatcaacatacaaaagagtagcactttcatatactaacaatgatctatctgaaaaaaaataagaaaacaatcccatttacaatagcaacaaaagaataaattactttggagtaaatttaaccaaggaagtgaaagatctatatactaaaaactataaacattgatgaaagaaatttaagaatcagttggaaacattaaatatgttaaaagagaaactaaagacataaataagtggaaagatatcctttgttcatgcatcggaataattaatatttaaaaaatgtccatactacccaaagtgatgcaatccctatcaaaattccagtgtcattctttttattttatttattt

SEQ ID NO: 101861 - DNA, 328 bp, Homo sapiens
tgtgcaggagaaacaattttttttctatgatttcaatagttcattctttctctactgatttataatatcacctctattccgtgtcaggtctttgtatacgtaggtctttttttatgctctgaattcagttctattggtctaattgtctattcctacaacaataccacgtggatttaattactgtaacctcataagtttttcaattaattttaaattgagatataatttgcataccataaaattcactccattagagtataaaatttggtgtatttgcagagttgtacaaccatcatcactatttaattgcagcacatttttatcactc

SEQ ID NO: 101862 - DNA, 336 bp, Homo sapiens
cacatggatcaatagaacagaatagagaatccagaaatgaagccacataactacaaccaactgatctttgatagacctgacaagaacatacattgggaaaaggatactcttttcaataaatggtactgggaaaatcggattaccatatgcagatgaatgaaattggatccatatctctggccgtataccaaaatcaactcaagatggattaaagacgtaaacataagacctgaaactataaaaatgctagaagaatacctagggaaaactcttctggatatcggtctaggcaaagaatttatgactaactcctgaaaagcacaggcaacaaaacca

SEQ ID NO: 101863 - DNA, 743 bp, Homo sapiens
ataatttgagtcttaaaaatattcatagttttcaacaggcaaagtagaaaataagggtgtttaatctgaacaacgtgaacaaaggcattctcactccttataatgtctcctgaaaaatggttctattaactggctacagtttcctagagagtttaaattgtcttggaaaatttatacttttttttacaccatcatttatccaatagccactgagtgcctaccatgtggtaggcatttctctatgtccttgggatacaacagtgaagaatcaggcaaaaataattgttattgaggtgcttgcattctgtacaggaatccagtcctccattgccatttaggcaaaatcacttaacctataagttaaccaacaatttaagtcatcctgtactcttcattttaacaccaaaaaaaaaaaattgaaataaagtagtaataattggacattactgtttgtgtcttgagcctaaaaatcactactgatgaataaaaatatctgaacataaacctgtgagcaaaacaaactatctggggttcaatttcagtcaaaattggaattacgtttagtgattatgcctgttcgactatttttgcctggaaatgtttacttgtgtagcagttacttgcttcctaaagtagaatactgaaaatttttcatgaagtgcaaaggacaaatcaaaagtaaactctagttttacagtgtccccatgtttattttgaaagggccctggtagattgtgttgaga

SEQ ID NO: 101864 - DNA, 227 bp, Homo sapiens
gtgtctgtaaactgtgtgtttgtgggtgtgcctgctgttaaccatgctccgccacgtgcatagagagtggttatccatccctgcatggatgcgtatgcttagagaaaactcctttctgggtctgagtgtggtggctcatacctgtaatcccagcactttgggaggccaaggcaggcggttcacctgaggtcaggagttcaagaccagcctggccaacatggtgaaac

SEQ ID NO: 101865 - DNA, 502 bp, Homo sapiens
ctttgtagagatggcgtctctctgtcatccaggctggaatgcagtggcaccatcacagctcactgcatctttcaactcctgagcttcaagggatcctcctgcctcagcctcccaagtaactggagtcacaggcatgggccaccacaccgcgcccagcctgtcttttcattcttaacagtgtctctggcacagcagacatgtttcactttaatgaggtccatcttgtccattttttctttcgtagatggtgtttttgtgttgcatctagaaactcattgccaaacccaaggtcacctagattttctcctatgttattaaacttacagaagtttgctagttttgtgttacatttaggtctatggtctgttttgtgttaattgttgggaaaggtgtaaggtcagtgtttatattcattattccacatgtggatgtctagttgtttccagcactatttattgtaaagacaatcttttctccattaaattgcgtttgctcctctgcc

SEQ ID NO: 101866 - DNA, 714 bp, Homo sapiens
cgcgctgttgcaggctatcgtgtgttaacctgtacttctgccgcagagtttggagaaagcggcagcagattgtgctgccgcaggctggagcctggaacctggagccctggagccttgaatggtgtgtggtggcaatggagagaggcagctggcagtgacagctgctccgtgcttggctacaggaaggaaagaaggagaaagcacctaccataggctggaggctagagcctgcaggactgcggctggcctcgctggctcgcctccctggctggcctcgctgtggttggtggcagcgacggatactgcagctggccagagtgtagaaaggcaatggggagcgcagtcctggtgggcccagcggttcctgtggattggagccaggcagtgtgatgttaccagtcaccactccaggtcccagttcctggcccgcttgagccaaaaggagaggctggactttggagggtggatatgagtgccttcactgagactggcccctgccacccagtggccaggatgacaaggcagaggagaatgaccctgtggccaccaccatcacaggcctatggggcacctcaaactcaactccaaaattgatctaatgaactttcccaaaccacattcccttcttgcatttctgagagaatggattcccattcatctgactacagtgctaccctgaaagcagatccagagactaagattcacctgcaggtg

SEQ ID NO: 101867 - DNA, 340 bp, Homo sapiens
ggcaggcctatcatgtgcagctaagaatgtggactcagcaaccagactgcctggatttgaatcctagcttagctacttattagatctgttatctttggcaagttacttgaccgtcttgtgcttcaatgtcctcatctatacaatgggaacaataatagtaccgtacctatctcatgggatgattatgatgattaagacaaaatgcagtaaatgttagctgctgcattctaccttaattattaacagtgaatattagacaaatccaattttaagttcttagaagataagttctttgagtagaaggactttaacagtggaaagccatctatcagtgtggata

SEQ ID NO: 101868 - DNA, 321 bp, Homo sapiens
agcattctggtagttacatgttttcattaatgtgatttcagagaagcacagaccttatcagatgctgatgtgataaaccaaagtttccttggttggctgtattgtagatactcccctggagccatcacctttttttggaggggggtggtgggtagaggcagggtctcgctacattccccagcctgggctcaaacgatccttctgcctcagcctcccaaagtactaaaattacaggtgtgagccacggtgcttggcctgcattatcattttgtagtgaagttttctttttatttcaagagagaacctattgccatccacttt

SEQ ID NO: 101869 - DNA, 293 bp, Homo sapiens
ctcaactgctctgctcttacaggatccgaagaaatggaatcatcgtatcgctgatctacgtaaacaaactgaagaattgtctgaaagaaaatatgacatgagcttatgaattcaacaggtgaagatttacaacttgataaatcaactttgtcagctcgagctgtaaaagccaaaggtccggtgatgatcccatacccttttttccagtctcatgttgaagatttttatgtagaaggccttcccaaaggaatttttttttttttttttttttgagatggagttttcactcttat

SEQ ID NO: 101870 - DNA, 876 bp, Homo sapiens
tttttatccatctccaagttccttcttgggacccagcgtctgattgcctggggcggccacattcctgtccttgtaccttacatggtgcttgtgtgctcccatcatggattgtcaattctcgttggcatccagacgggagacaagtcagcgataagtgccaaggagaagacggaagcgggtgggcccctctgtgtaggacttctgtctgaatcaggtggagggaagacatggggaggagccgcatggctgcagtgccagctgggagagaagtacgggcagagggagctgccgcgaccacatgttttcctgcagcctgttgggtgcgaggggaggcagtaaagctggaagggagtagttgagagccttctgggcatcccaagcccagagcaagcacacttgttgctgccatccctgcccacccctccgtctttttacctatgcctctctgactcctcccattgcatgtgggcatctgttgtggacataaagggaggtacagcaaggcttttttttttaagttggggttctgctttttttacccaggctggagtgcagtggcacaatctcagctcactgcaacctccgcctctgggactcgagcaattctcctgcctcagcctccctagtagctgggattacaggtgcccgccaccacgcccggctaattttttgtatttttggtagagacgggatttcaccatgttggccagcctagtctcgaactcctgacctcaggtgatccacctgcctcagcctcccaaagtgccggcccggccaggctgtgttcttaaggacagatgaggggcagctgcttagacgacccttgaacaatgcaggggtaggggcgccaaccacctgagcagttgaaaatcccca

SEQ ID NO: 101871 - DNA, 456 bp, Homo sapiens
ctaacctccctatctctcttctttgcctcctacatattgtagccatagtgatcttcgtaaactgtccatttgatccttccattttctttaaaatggagtttctttcaaattcttcaatggtcctttgttgccctcacaatttcttatcttgccatgtaattccctcctgttcatctttccagccttacttctcaccatataggcacatacactcacacacacttgctgtcttcctctcttccccatctagccacactgaaacactggcactcgtcccaaaagcaccatgcccttgacctggctaactgctcattgctttgagtctcagcttagttgtcactttcttggcccctcaagatgacgttggtgcccctgcactgtgctcccataaccctctgcctaccgtagcaggcattttatggtttgccttaagttattgtagaggcaaagaaaatt

SEQ ID NO: 101872 - DNA, 212 bp, Homo sapiens
caactggaggttaagtgaaagataagaaaaattgggagatacgccaataaaagatccgcccacagcacaagcagatagcacacagctgacagtaaggatgcttagcaaaagcttgctacaaaacatgtctccaatctggggaactcccgctacatttcaatggccaaaatcctctacccttcagggcagcctaataggaacaccatcacaca

SEQ ID NO: 101873 - DNA, 357 bp, Homo sapiens
gtttatcaattccagaatcaagctgcctgcatttcaccttagacaaattcgttaacttgtctgaactttactttctgatacggtttgactctgtgtccccacccaaatctcatgttgaatcgtagctcccataattcccacgtgttgtggggagggacctagggggaggtaattgaatcataaggacaggtctttcctgtgttgttctcatgatagtgaacaagtcttatgagatctgatgggtttgtaaaggggagtttccctacacaagctctctcattctctcttgttctctgccatgtaagacatgccttttgccttccaccatgattgtgaggcctccccagccatgtggaa

SEQ ID NO: 101874 - DNA, 295 bp, Homo sapiens
ctattgatttaatcaatccacaactgatggacattaaaattgtttccagtgtctggctattacaaaaagtgcctcagtgaacatgctttgtgtatttgtgctgatacttctaaaaggcaggaattccttaagtggaattccttggtctaagaagtatgaacattttaatgtttgagatgtaccactaagttgacctccaaataggctattcaactttatattcctcagataggtacataatagtacactttgctcacactctcatcaacaaggtattattatcaatctgataggt

SEQ ID NO: 101875 - DNA, 462 bp, Homo sapiens
gtgcttggcatgggaaaggtggttctgaagcaccaaggcaggtggcttgtgaatctgcctacattcccctaactctctgaggcttgaaatatcccctcagggctccagagagttgctgttgttcagttatgatgccccatgccctaccagcctctagcaaaaaccatgcatagtgacttgggaaattcttttcactttgctgggccaagacccagatgctctgtgggcatgctgatgggggcctagtggtgttactcctgtattcctccgtagcaaaaaaatagtattaggagagatacagggagatcaggagaatacagcgtcccttcaacttctgcccaaatttctgcagtagcctcctaaccagtttccttatagctctctggttcccttccaatctctcccctcctatgcagccagagggattccttcacactgaaagctaatttgttacactcctgc

SEQ ID NO: 101876 - DNA, 434 bp, Homo sapiens
gaaggtgctggaatttgaaccctgggagccacccccaggtctacctttgcaactcatcagttaaggccctggtgggccctgggtggggagtaggagaggggaagactgaaaacggaggtggtggtgtcccgctcacacgtagtccaatgaggggtgctgctgtgcagggccacacggtgagtacccccaggcctgtttcaaggcatctgaggctgagctgggaggcaggaggggaaagtcgttcagggcatggcggcctgtgagtgaccaccccgtcctcagccagctcaaggagctgcctgtacactgtttggaagcacacagctggttggccagtgcagactttattctctgtattaaagaatcacactaacattgagaccaaccgtaaggaagacaacaaaaccacagggaggagtaaaggccgccacata

SEQ ID NO: 101877 - DNA, 822 bp, Homo sapiens
aactattcaggtatccaaagactgagaataaaaggagatagatgaaattagtccagtggaaaaaaaaaaagcctaatgataaataaacatctggggacaaaaaagaaagaacaaagcaaaacttcctgtatttcttttttaaacatgagtcacagtcacttcccattctccttgtcagattcctataaaaaattcaaaataaaattcaatttttagatgatccaggtctcagatttttggagattttgctcccctgccaactttcctctttcgctttttaggacttgagtcttaaacaaacaactaagtaaaaaagaaatatatttctatttggacatgaaaaaaagctatagagcaaacccattatcttcctttcctttgtaaagctttttgttttgagactggagatagtttggtcagaagaagaaattctaactcatgattctatgaaaaaaaggaaatataaagattcttctcctaattcagtcttccaccacctgcagggagtccaattcttaaaaagtacttcacaaaagaagactgtgttttcaaagcaaactagattttaagaaaccctatgttcgaatgtaaatgaaaaagcaaacgagacattttctaaccttaaagcatactaaaagatttactttttcaagaatcccaatgtatggcaaatttgaattatatttcattaaaccaaggtgtgtaactatctattttaatgagtgagcaaaactgtcatgtggctgtgtactcctgacattccatatctgagttttaagggctatgtaatattaggaccttaattgtaaaagtacaaaagtt

SEQ ID NO: 101878 - DNA, 352 bp, Homo sapiens
ccacctctctgttctctgcttctgaaccacagccgcatcctatttgcagccctcgagattaaggatgaaaatttgactttttaattttattattcttgttcttccttcctacttcattagaatcatgttattggcctaaaatactgtatgtaaaggatgctctggggcccatctggaagcctgcattctctggggatataattacgctaagcaatttttcaccagggacagcatgacttagcttctacctgggcatcctctggcaacacagccctcagttcttccaaagggattggctgctgtcccttcaggccttcttcttggtgtgtgtgtgtgtgtgtgcgtgtgtgtg

SEQ ID NO: 101879 - DNA, 519 bp, Homo sapiens
gctccctgtttgggcaattgtccaaacaattgcctagagatctaaattcttaggttcttgccagtttcatctcctatcattacagcacatgatattgttatttaccattcggcttcaattttctctgcttgttctctatgtgagaacaagttctcttgttctctgcttgttctcatatgtgaatgctagcctggaatgtacttaactttaccatatccttgatttggcgttagagcagggcatagcaaactaaggcccttgggccaatgcagcccaaccattttttttaagtaaagttttaatgcagcacagccatccccattcatttacttactgtctgtgactgcactacaatgggagagttgagtagttgcaacagagacaatgtaacctgtaaagccttaaatatttacttctgaacctttacagaaaatgtttgttgatccctgatctaaagccaagcagttctctcgacctagatactgcttattctttgataatttcccattcccatcttgt

SEQ ID NO: 101880 - DNA, 134 bp, Homo sapiens
ttgtggtgagagtgtattactttaactaacgtttgattattacttctttcattgtgaaaaggaaaagattttattccttggtaaaaggattcctaacagcagctgccaaatgggagggattttggagcaaagga

SEQ ID NO: 101881 - DNA, 668 bp, Homo sapiens
cattgcactccagcctaggcagcaagagcaaaaactccatctcaaaaaaaaaggtttttttttaattataaaaattaaaagggggaaattgtaaaatacaataaaattcctcttcaaaggtttagtcttaactttcttgttctttgttctcaaactcaactttcttgttctccatgcctccttgcccctagttactgtaacaaccttccttcccaacagctctaatcaataattcacatctgttcccttgattactcactctgcagccttcccacccttcaaaaccacacgtcccaccactgtgacttatacatgccccttcccttccttatttggaaaaatatttacaaatagccaatcgggtcagtttagattgtggggtccgaccctagcccatgggggagtaacacagaggaagagactttacgttaaaaataaaaaccccttccctcctttgttcagggtgctcttgcgatcgtgattaatgcaaacaaaaaccttttgcagaagtaaattgccttactaaaaaaaaaaaaaaaaaaaactcgctcgtgccgctcgtgccgaattcggacgagtcgacatggccaagggctgggcaaagagggcccgaggaaacctttttatttccatgctcttaaaaacacggccaatgcaacctggacttg

SEQ ID NO: 101882 - DNA, 159 bp, Homo sapiens
tgcctctctaacagcccacctgaggcttttctagttttcattttcccatccctgtttacacatcattcctgagagatctctgacaggtctccactctgaggacaactgatctgaatcattatttattctgtccctgtgggatgtttagagtaaaaggag

SEQ ID NO: 101883 - DNA, 613 bp, Homo sapiens
tgcaacctccacctcatgggttcaagttgattctcctgcctcagcctcccaagtagcttggattataggcatgcgccaccatgcccgactaattttgtgtttttagtagagatggggttcaccacgttggccaggctggtcgaactcctgacctcaggtgatcgacccacctcggcctcccaaagttgctaggattacaggtgtgagccatctctcctggccatgatacaagataatttatatgaagtaatacactgctggttctgaagtaggtgtgcagtaagtgatgcctactgctgcatgccaagagtcaaatgtatatttgaaagagttgtgaatttcaagaaagatatttttgagtttttttttttttctttctgagacagggtcttgtactgtttcccaggctagagtgcagtggcctgatcttggctcctggctgggcccaagtgatccaccgccctcagccttccaacgtattgggattacgggaatgagccactgcatttggctaagtttttgtttttttttttctctatttttccaaacttatttgattagtaagataaagacattaactgctgttgacagtttccatttttaattagtaatc

SEQ ID NO: 101884 - DNA, 782 bp, Homo sapiens
agcggggtgacgcgcgagcgcggcgcgcagcttgggttcctgccggcgcctctccctccacacctcacctcaaacagagggagccggctccggtctcggccagcccagagagggcctcccatagtgcagcggcgggctgaaggtctcctcaagcgctgccagagtgggcgtcgaggctgaggagacaccgagagcgagtgagggctgccagcatgctgtcacctctcagtaatttgagaaaatttctgttttctatgggttgggagcagcaagtactgcagcccatttgaggtatgataatcagctgattagctagtggagtcgttttccctgaggctcttttgtgtgcaaaatcctcacactcaattgacatgtggacatcataaagctgatgaaatgcaattgtaatgaacaagagggagcggcatctgcagccgtctaaatgaaggaccctttcctctcgccatgctaattcagaaaatctgctcttaacgtgtactccccctggattccaaattgaggcacatctccatgaatgcatattcaaggagtgaattagcctctgtggcaagtgagcgcctagcctggccagactgattctaatttcaagacagattatactgcatcaaccatagtaatgatctgacagttcatttgtgatgagagtcctacagtcagctttactgctcggacagacaggtgcacagagagagccagcaagacctctcagaaaacaccaaaggctgctgtcaaatgatttcagcccaaatagccagatgaag

SEQ ID NO: 101885 - DNA, 105 bp, Homo sapiens
cctcctccttcctctctctcttctgaaacatccccatcctgccactctttctacataaaggctccctagccagcccagcccagctcagcatccctttttccttct

SEQ ID NO: 101886 - DNA, 406 bp, Homo sapiens
cagcttcttatttgaggatatattgggcaaaggggccttcagacaagtagagggagatttttacagaaagattgagatgaaggtatagaaggctgtaaagaccagaaaagagaattgagacagaggaagcaggaagccactgtaggtttttgagcaagatattgatgctgtaagtatggtgtttatgaaaggttagtctggaagagatttgcaggatggagaccccggaagtttttttgttataatacagaaagacttgcactgagggtgaggtgttaaaaataaacaggtaagtaaatgtttaaacatcttgaaggaaaagtcaacaaatcttggcaagtaaacagataacagtgaaaaagaatgggaccaagattttgagttttggagactggtggattgaaca

SEQ ID NO: 101887 - DNA, 435 bp, Homo sapiens
tctatattcttacctagcttgcacaaacctataaataggctcatctcagggttattgctgttataaattaattatggaaatgtcaaccaaatcaggtacgtgccagcagagtaatgggagggcagcgatccactgagcagagggtgattctgatgatgccctctgtgcaaagttcacagcctctggccaggttccatcagcttctagggagtttaaccttgaagaagacactctgggtttgtttcctcctgagtaacggagggagtctggaaaagtgacttccacgactagttctgtgccttcctcttcatagaacctgttgtttctttccctcactgggaactgtaggcaaatttggcaggcctgccttttttcaaacaagatgacggataatctggagcttatctatattgggctaatgttagctacaccact

SEQ ID NO: 101888 - DNA, 159 bp, Homo sapiens
ctgtggtgtcttcagtacttccaaggagcagtgctttggtatatttcactcaaatggtgagagatcccttcctctttccctcctttttctccctttttgcttccagccccttttatttctctttcagcattagaggtctagtgttgccttcatctttgt

SEQ ID NO: 101889 - DNA, 212 bp, Homo sapiens
aaaaaaatcataaaaaagcagccataggaaaaaaaaaagagttgctcttcaaaaaacagtaagactcacaaatttctcaacagaaacaacagaagccaaaatataatagaataacactgttaaagggccaaagagaaaataactgctaatctagaatactatgcccagcaaaactatccttcaaaaataaaggtgaaattttaaaatttgca

SEQ ID NO: 101890 - DNA, 298 bp, Homo sapiens
aacaatagacatttaattctcacagttctggaggttgggaagtctaagaccaaggcgctggcagatctagtgcctggtgagggctcgatttctggtttgcagacagctgccttcttgctgtaacttcacatgactgagagagtgctcggtctctttctcttcttataaggacgccaaccccattcatgaaggctctaccctcacaacctaagcacctcccaaaggcccacctcctaatatcctcacattggaggttaggcttcaaaatgggaattttgttggagggacacaaatatta

SEQ ID NO: 101891 - DNA, 403 bp, Homo sapiens
aggcagacagccctgtgtgggagaaggagatggaggtgggagagcctggctaccctcagcttgggaaggcttccttcaaagcatttccctgctggatgcctgcccaagagagaggcaagcagctgattctcggctttgagggaaaaggaaatacacaagtgttaacagatacattagctcctcacctgcccctgcagtgggggcccccaacattccttttctcaccatttctttgggccaagaaattgaggctcagagagatgaggtcacagagtggtggagaggagggcccagtctctttcttgctccgccaaacaggctctcctgttgggccttcccatcacacctcctcactcctctgatccctggctttttgaatcctaagggagccttggcaattatg

SEQ ID NO: 101892 - DNA, 110 bp, Homo sapiens
aacacagaaagcgacatgtgagcaaacgagagagaaaaatgtttcaggtaagttgacaaaatggtcggtgagccttcactttggttgatatttgggtctttttttttttt

SEQ ID NO: 101893 - DNA, 456 bp, Homo sapiens
ggaccccaccccacaaccgagttgggaaaagatacacattttgtcccctgaagttcctttaagtatgctttgcgtccttacatgaaatgtttataggaatctggaatcatcacagacaatccccctccattaatagttggatccccccaaaacccaccttgtctgccagttagttggaaagctttgtaacttcatgagcccatttctacgaaataatggcccgagacagagaatttctagagacagaaagcagatcagtggttgctgggagtaggaatgggaattaactgcaaacaagcaaaagggatctttgtggggtgatgggaatgttctaaaactagactgtggtaatggttgcataagtctgtaaatatactaaaagttgttgaatcatgtacttaaaatgcatgatatgtaaattctctctcaataaagctgttaaaaaataaacacatg

SEQ ID NO: 101894 - DNA, 356 bp, Homo sapiens
aagatgagtaactactcaaatagctttgctgtgaccattattgtctgatatttgtcaagagatggcccagatttgtaaagaaaccacatccctcaacaaaccagccctgtgcttcattcctcgtcctggtaaatggcaccactgtcccccgctgatgtcaatcagaagattaagcatcatccgggcctctccctttgtttcctttctcactctatgcaagagatatccaggctagcttattctgtgtcttagctcctttcatcattcccctctttgcctctgcacgttgactttcacagacccacttacatattcattatttcttttgggggtggcactacatcctcctaatctga

SEQ ID NO: 101895 - DNA, 83 bp, Homo sapiens
agcttcctacagtaaaacaaagcagagagccacaggcccctggatgacacttggcagccacccccacccccgccaagcagcag

SEQ ID NO: 101896 - DNA, 199 bp, Homo sapiens
ggctggtctcaaaatcttggcttcaagcaatccttctgcctgtctgcctctgaaagtgctgggattgcaggcatgaatcaccatgcccagttaagagttctttatatactgtggatactgactcttacccgatatgtgatttgcaaatattttctcccattatgtaagttgtcttttcacttccttgatagtgtctttg

SEQ ID NO: 101897 - DNA, 585 bp, Homo sapiens
attacattatgggtcacatgctaatcatttaattacagtttttttcaagaggtgaagcctgaaggagcaagctggagatagcaaaattaaccagtctgtcaaagaacaccagggccaaaaagacaagcttttgtgtctttcttagctttgctgtgtctagccctctctcttgtcagaagatgaatagaattagggagctgagcatgacttccttactgaaatggttataactagcctctcaggactgggaactgggtttgatttttaactccaccaagtactttctgcatggtattgggtaagctacttaaacgttttcagccttacattgtgcatatttgaatagggtgggtgataagacttactagaagctatggttgactaaatggcatgatgcctatagagtcctcagtaaatattagctattacgattatcccctaggattctcctaggagaacatttcagacacattcttgtcgaagttagcagcagccagctttagggttagaggtgaacaacggtcaattctgaagcaaagctatctatgttcagaactcatgatatatctctggctcttggtatag

SEQ ID NO: 101898 - DNA, 883 bp, Homo sapiens
aaggaagctgctacattggagatgcctgtgtgaccaggaactgtcccagttcctgcaggaccctcagtcctacaatctgcaagaaatcgaattctgccagcaagcaagtgagtgagtttaagtcatgtcctgttccagccaagcctattaggatgatactgcagccccagaccttaatggtagactctgagagaccctaaaacagaggagccaggtaaacctcgatggctgacctactgaaatcatgagatacccgtgctgttgtttcaagcatctctgctttgagttcatgctgcctattggatggaatctcagagggcgctatcagctggaacactgaacattggccttcccacgtggctggagcttccttacaacatggcgacgagttccaacagtgagcgtgctgaggcagagcccggtgaaagcttcactgccttttgtaacctagccttagagctcatgcagagtcccttccaccaccctgcctctattcactgaggcagtcacaaagactgtccatattcaaggggtaggggactggattccaccgtttgtagggagcagtgccaaagaatttgcggacatgtttcaaaacatacagcccctgctctgtggacactgattatccttgttctggtcccatgtatactctgtgggctactcctttttactgggggatgggaggttgggttttttcagtcctgagtcaaacctcccttcctggggccagtgtgaatatatggggagaaggctgagactgtgaactcacagccagaccagaactgtgtacaatgagagactgaggtttctccaaacaagggacggcaggcagacaaaaacatatgtcctttctgaataataaataaataaacacacaagt

SEQ ID NO: 101899 - DNA, 686 bp, Homo sapiens
ggagatttttgaaacaaagtatgtcatgtcatgattttggaatttagtgcccatatgctgacagatggtttaatgggtctatctgttctagagttttcctaataggtctgaaaatacctctaatcaaaattatttacttgagaaaagtattcagaatagttcctaaaaattaagagtatatcttctgacagcttgcttgaaacagtcttcactgttgaattcaggctcatggtcttaagtagacttcattatagcatttgagaaacaggagtgacacttatagtcataccagagtaaactcagatatgatagatgtattatagcaaatttctggtataaaaggataaataatctgtatatgagtattaatccaatattcttaaaacttcagtattttacttaaaagtactttttgtcattaaaattatagcaaaggtagaatgcacttgtttaatatactctcatgattcttttgcagggtgttcatttagaagaaagcaacactaatgattcaaacagcttcctgaattttaattttgtgttgtctcacagaaagccttatcataaattccataattctaattaatttaccaagataatgtaattacatttggttttgtaaggtatacagcagtaatctcctattttggtgtcagtttttcaataaagttttgattatgggcaaa

SEQ ID NO: 101900 - DNA, 251 bp, Homo sapiens
gcctactactactactatacggctgcttataagacgacagaagggtgttcatttagaagaaagcaacactaatgattcaaacagcttcctgaattttaattttgtgttgtctcacagaaagccttatcataaattccataattctaattaatttaccaagataatgtaattacatttggttttgtaaggtatacagcagtaatctcctattttggtgtcagtttttcaataaagttttgattatgggcaaa

SEQ ID NO: 101901 - DNA, 1203 bp, Homo sapiens
ggagatttttgaaacaaagtatgtcatgtcatgattttggaatttagtgcccatatgctgacagatggtttaatgggtctatctgttctagagttttcctaataggtctgaaaatacctctaatcaaaattatttacttgagaaaagtattcagaatagttcctaaaaattaagagtatatcttctgacagcttgcttgaaacagtcttcactgttgaattcaggctcatggtcttaagtagacttcattatagcatttgagaaacaggagtgacacttatagtcataccagagtaaactcagatatgatagatgtattatagcaaatttctggtataaaaggataaataatctgtatatgagtattaatccaatattcttaaaacttcagtattttacttaaaagtactttttgtcattaaaattatagcaaaggtagaatgcacttgtttaatatactctcatgattcttttgcagggtgttcatttagaagaaagcaacactaatgattcaaacagcttcctgaattttaattttgtgttgtctcacagaaagccttatcataaattccataattctaattaatttaccaagataatgtaattacatttggttttgtaaggtatacagcagtaatctcctattttggtgtcagtttttcaataaagttttgattatgggcaaatcccctctttttctttttttaaaatatatttgagtatgccatacatttatatatatggtgtatatgaatttggtttaaacattttaaaatttattctgattagttgtgtctttttttttttttggagagagagagtcctgctctgtcactcaagctggagtgcagtggtgcgatctcggctcactgcaacctccgcctcccaggtccaagcaattctcttgccttgtcctcccaagtagctgggattataggcacacaccaccatgcctggctaatttgtgtctcattttcaagagtagaaaccctaaatattttattttcattccttttccaaattgctatgaatgggattaaaggattacagatgtaaagtctattatttgtgaattctaaatgtagttctgctgttgtacctgtggaaacatcttaaagaagtacatattttgcacgtcctgcacgtgtaccccagaacttaaactataattaaaaagaatagtttcaaaaaaatacatattga

SEQ ID NO: 101902 - DNA, 409 bp, Homo sapiens
  misc_feature (5)..(5): n is a, c, g, or t
  misc_feature (16)..(17): n is a, c, g, or t
  misc_feature (32)..(32): n is a, c, g, or t
tttgnattagggtgtnnttttaaaggaaaggnacccttagttggctagagatttactacatccgtccttggaagaggaaaagaaaaaacataaaaagaaacgcctagtacaaagtccaaattcttactttatggatgtaaaatgtccaggttgctacaagatcaccacggttttcagccatgctcagacagtggttctttgtgtaggttgttcaacagtgttgtgccagcctacaggaggaaaggccagactcacagaaggctgaaagtgcgtaaatctaactaagaaagagaaagtgcctgcaatcccagcactttgggaggcggagacgggtggattacttgagctcaggatttcgagactagcctgagcaacgtggcagaaaccgcatctctacaaaatatacaaa

SEQ ID NO: 101903 - DNA, 831 bp, Homo sapiens
ccgggggctgagcggcccgccgggttccggggtggcgccggccccggtggccgcgggcgctccctcgccatggcctaagcccgaggccgctccccagccagattctggcctcaggcactgcagagcccgcggcgctcgccaacaagcccgttagacccacgggacttggcaccctggaacgctcaccatccccgggtcttccctgcgccctggacccgagtaccctgctgcggcgtccccctaccaccgagaggagggcctagagcagacaagcccgccccgccgctcctcccagcagcttctatcccggaagttgatgccgagcgcagatcgcttgcagcttgctagctgtgtgggctgggaggtctggtagggctgagcttgcaagaggatcaacatgcctttggctagagatttactacatccgtccttggaagaggaaaagaaaaaacataaaaagaaacgcctagtacaaagtccaaattcttactttatggatgtaaaatgtccaggttgctacaagatcaccacggttttcagccatgctcagacagtggttctttgtgtaggttgttcaacagtgttgtgccagcctacaggaggaaaggccagactcacagaagggtgttcatttagaagaaagcaacactaatgattcaaacagcttcctgaattttaattttgtgttgtctcacagaaagccttatcataaattccataattctaattaatttaccaagataatgtaattacatttggttttgtaaggtatacagcagtaatctcctattttggtgtcagtttttcaataaagttttgattatgggcaaa

SEQ ID NO: 101904 - DNA, 550 bp, Homo sapiens
tccctggtgggtgatgatggagatcccggaagttgatgccgagcgcagatcgcttgcagcttgctagctgtgtgggctgggaggtctggtagggctgagcttgcaagaggatcaacatgcctttggctagagatttactacatccgtccttggaagaggaaaagaaaaaacataaaaagaaacgcctagtacaaagtccaaattcttactttatggatgtaaaatgtccaggttgctacaagatcaccacggttttcagccatgctcagacagtggttctttgtgtaggttgttcaacagtgttgtgccagcctacaggaggaaaggccagactcacagaagggtgttcatttagaagaaagcaacactaatgattcaaacagcttcctgaattttaattttgtgttgtctcacagaaagccttatcataaattccataattctaattaatttaccaagataatgtaattacatttggttttgtaaggtatacagcagtaatctcctattttggtgtcagtttttcaataaagttttgattatgggcaaa

SEQ ID NO: 101905 - DNA, 1444 bp, Homo sapiens
ccgggggctgagcggcccgccgggttccggggtggcgccggccccggtggccgcgggcgctccctcgccatggcctaagcccgaggccgctccccagccagattctggcctcaggcactgcagagcccgcggcgctcgccaacaagcccgttagacccacgggacttggcaccctggaacgctcaccatccccgggtcttccctgcgccctggacccgagtaccctgctgcggcgtccccctaccaccgagaggagggcctagagcagacaagcccgccccgccgctcctcccagcagcttctatcccggaagttgatgccgagcgcagatcgcttgcagcttgctagctgtgtgggctgggaggtctggtagggctgagcttgcaagaggatcaacatgcctgtgagttgtttacatcgggctccgggtttgttttgggcttctttaccgagagtcatatgggacggatgagtccggctgcctctcgggcctgtagtgtccgagagtggcgaggcggctcaggttgcgcagcgtcttcgcgcgtggcgggcatgtagtgacttgcccggtcaccgcggcgcggctggccctgcaggggcgtgggctgcaattcagaggcggtggctgggaggggaacagttctctgtgtagcttatgagcggtcttggtctttgaggatgcccctgaggttgtgatctttgggtcttttggctttcccagtgattggtgtttctcgccccctctgccttctttcggaagcgatttcctacttgttttccttttttaaaaactgtcctcgttgttgccttatatattaattccgtcaaggacggtcgctcagcaagaattcctgtcagatcagctgttgagccacaggagcaaaaatcacccaggcgctgacgttgtctggtctacttcagcagtttctactctaagcgagtccacagtcggggtcactttctttgcttagcacctcgacttcgcgcagttttcatcgaagacagttcattacgcattggctagagatttactacatccgtccttggaagaggaaaagaaaaaacataaaaagaaacgcctagtacaaagtccaaattcttactttatggatgtaaaatgtccaggttgctacaagatcaccacggttttcagccatgctcagacagtggttctttgtgtaggttgttcaacagtgttgtgccagcctacaggaggaaaggccagactcacagaagggtgttcatttagaagaaagcaacactaatgattcaaacagcttcctgaattttaattttgtgttgtctcacagaaagccttatcataaattccataattctaattaatttaccaagataatgtaattacatttggttttgtaaggtatacagcagtaatctcctattttggtgtcagtttttcaataaagttttgattatgggcaaa

SEQ ID NO: 101906 - DNA, 478 bp, Homo sapiens
ttattatctatactgacctatctatctacttatctatactgacctatctattggctagagatttactacatccgtccttggaagaggaaaagaaaaaacataaaaagaaacgcctagtacaaagtccaaattcttactttatggatgtaaaatgtccaggttgctacaagatcaccacggttttcagccatgctcagacagtggttctttgtgtaggttgttcaacagtgttgtgccagcctacaggaggaaaggccagactcacagaagggtgttcatttagaagaaagcaacactaatgattcaaacagcttcctgaattttaattttgtgttgtctcacagaaagccttatcataaattccataattctaattaatttaccaagataatgtaattacatttggttttgtaaggtatacagcagtaatctcctattttggtgtcagtttttcaataaagttttgattatgggcaaa

SEQ ID NO: 101907 - DNA, 1428 bp, Homo sapiens
ccgggggctgagcggcccgccgggttccggggtggcgccggccccggtggccgcgggcgctccctcgccatggcctaagcccgaggccgctccccagccagattctggcctcaggcactgcagagcccgcggcgctcgccaacaagcccgttagacccacgggacttggcaccctggaacgctcaccatccccgggtcttccctgcgccctggacccgagtaccctgctgcggcgtccccctaccaccgagaggagggcctagagcagacaagcccgccccgccgctcctcccagcagcttctatcccggaagttgatgccgagcgcagatcgcttgcagcttgctagctgtgtgggctgggaggtctggtagggctgagcttgcaagaggatcaacatgcctttggctagagatttactacatccgtccttggaagaggaaaagaaaaaacataaaaagaaacgcctagtacaaagtccaaattcttactttatggatgtaaaatgtccaggttgctacaagatcaccacggttttcagccatgctcagacagtggttctttgtgtaggttgttcaacagtgttgtgccagcctacaggaggaaaggccagactcacagaagggtgttcatttagaagaaagcaacactaatgattcaaacagcttcctgaattttaattttgtgttgtctcacagaaagccttatcataaattccataattctaattaatttaccaagataatgtaattacatttggttttgtaaggtatacagcagtaatctcctattttggtgtcagtttttcaataaagttttgattatgggcaaaaaaaaaaaaaaaaaaaaaaaaaaaaaaaaaaaaaaaaaaaaaaaaaaaaaaaaaaaacaaaaaaaaacgcaaaaaaaaaaaaaaaaaaaaaaaaagaaaaacaccaacaaataaacaaacaaaaaaaaaaaaacaaaaagacaagggggggcgggcgcctgccgccgtctatcccctactcgcgggaggcggggcgctccgccctgccgaccccccccactccgctcgacgcagcgcgcgcgcgacgatgctacgtctccgcgcgtccgcgcgcgcggggctcggggctgcgagttgtaacacacgtgctcccaggcggcggcaacgataccaacgcaggttcagtcgtcgtggactagctgcgtgacagaaagaccgaccccctgcttctgtgggtggcatgatacaatcagcatcggacgacctgcgtcacatactgacgaggagagatcgaccgtcgtggtctagctgagcagatatcaatctcctcatctgagggacattggcgtgatgtccacgacccgacagagatcattagtggatgacgcgaaagagtgcagagccgcgcgctgctgtacctatcatcaaacacggcga

SEQ ID NO: 101908 - DNA, 1046 bp, Homo sapiens
ccgggggctgagcggcccgccgggttccggggtggcgccggccccggtggccgcgggcgctccctcgccatggcctaagcccgaggccgctccccagccagattctggcctcaggcactgcagagcccgcggcgctcgccaacaagcccgttagacccacgggacttggcaccctggaacgctcaccatccccgggtcttccctgcgccctggacccgagtaccctgctgcggcgtccccctaccaccgagaggagggcctagagcagacaagcccgccccgccgctcctcccagcagcttctatcccggaagttgatgccgagcgcagatcgcttgcagcttgctagctgtgtgggctgggaggtctggtagggctgagcttgcaagaggatcaacatgcctttggctagagatttactacatccgtccttggaagaggaaaagaaaaaacataaaaagaaacgcctagtacaaagtccaaattcttactttatggatgtaaaatgtccaggttgctacaagatcaccacggttttcagccatgctcagacagtggttctttgtgtaggttgttcaacagtgttgtgccagcctacaggaggaaaggccagactcacagaagggtgttcatttagaagaaagcaacactaatgattcaaacagcttcctgaattttaattttgtgttgtctcacagaaagccttatcataaattccataattctaattaatttaccaagataatgtaattacatttggttttgtaaggtatacagcagtaatctcctattttggtgtcagtttttcaataaagttttgattatgggcaaaaaaaaaaaaaaaaaaaaaaaaaaaaaaaaaaacaccgtcgggggcattttttgtgggggggcgggaaaagggggtttatggaaggggccaaggggctcataagggtggttctcgggcccagttttttgttgctaccaaggggggaaaaaatgggggggcccccaaaagggggggggggaaaaaaattggagaaaacgcggggtacccggatagag

SEQ ID NO: 101909 - DNA, 992 bp, Homo sapiens
  misc_feature (873)..(873): n is a, c, g, or t
  misc_feature (875)..(875): n is a, c, g, or t
  misc_feature (906)..(906): n is a, c, g, or t
  misc_feature (914)..(914): n is a, c, g, or t
ccgggggctgagcggcccgccgggttccggggtggcgccggccccggtggccgcgggcgctccctcgccatggcctaagcccgaggccgctccccagccagattctggcctcaggcactgcagagcccgcggcgctcgccaacaagcccgttagacccacgggacttggcaccctggaacgctcaccatccccgggtcttccctgcgccctggacccgagtaccctgctgcggcgtccccctaccaccgagaggagggcctagagcagacaagcccgccccgccgctcctcccagcagcttctatcccggaagttgatgccgagcgcagatcgcttgcagcttgctagctgtgtgggctgggaggtctggtagggctgagcttgcaagaggatcaacatgcctttggctagagatttactacatccgtccttggaagaggaaaagaaaaaacataaaaagaaacgcctagtacaaagtccaaattcttactttatggatgtaaaatgtccaggttgctacaagatcaccacggttttcagccatgctcagacagtggttctttgtgtaggttgttcaacagtgttgtgccagcctacaggaggaaaggccagactcacagaagggtgttcatttagaagaaagcaacactaatgattcaaacagcttcctgaattttaattttgtgttgtctcacagaaagccttatcataaattccataattctaattaatttaccaagataatgtaattacatttggttttgtaaggtatacagcagtaatctcctattttggtgtcagtttttcaataaagttttgattatgggcaaaaaaaaaaaaaaaaaaaaaaaaaaaaaagcggccgctcgaatngncgacgcggccgcgaattcgcggcggcaaacnggggctgncgagaagacgacagaagggaaactctgctggacattagtctaggcaaagatttatagctaagacctcagtacaggcct

SEQ ID NO: 101910 - DNA, 983 bp, Homo sapiens
ccgggggctgagcggcccgccgggttccggggtggcgccggccccggtggccgcgggcgctccctcgccatggcctaagcccgaggccgctccccagccagattctggcctcaggcactgcagagcccgcggcgctcgccaacaagcccgttagacccacgggacttggcaccctggaacgctcaccatccccgggtcttccctgcgccctggacccgagtaccctgctgcggcgtccccctaccaccgagaggagggcctagagcagacaagcccgccccgccgctcctcccagcagcttctatcccggaagttgatgccgagcgcagatcgcttgcagcttgctagctgtgtgggctgggaggtctggtagggctgagcttgcaagaggatcaacatgcctttggctagagatttactacatccgtccttggaagaggaaaagaaaaaacataaaaagaaacgcctagtacaaagtccaaattcttactttatggatgtaaaatgtccaggttgctacaagatcaccacggttttcagccatgctcagacagtggttctttgtgtaggttgttcaacagtgttgtgccagcctacaggaggaaaggccagactcacagaagggtgttcatttagaagaaagcaacactaatgattcaaacagcttcctgaattttaattttgtgttgtctcacagaaagccttatcataaattccataattctaattaatttaccaagataatgtaattacatttggttttgtaaggtatacagcagtaatctcctattttggtgtcagtttttcaataaagttttgattatgggcaaaaactaacctaaacctaacttaatccccttccactacaattccctttccccaatcgcttactcccactacatcccttcaccctcagcctttctctattcctcctcccttcctctttcacgcttaccttcgtctctcttcctctgtttttcctt

SEQ ID NO: 101911 - DNA, 852 bp, Homo sapiens
ccgggggctgagcggcccgccgggttccggggtggcgccggccccggtggccgcgggcgctccctcgccatggcctaagcccgaggccgctccccagccagattctggcctcaggcactgcagagcccgcggcgctcgccaacaagcccgttagacccacgggacttggcaccctggaacgctcaccatccccgggtcttccctgcgccctggacccgagtaccctgctgcggcgtccccctaccaccgagaggagggcctagagcagacaagcccgccccgccgctcctcccagcagcttctatcccggaagttgatgccgagcgcagatcgcttgcagcttgctagctgtgtgggctgggaggtctggtagggctgagcttgcaagaggatcaacatgcctttggctagagatttactacatccgtccttggaagaggaaaagaaaaaacataaaaagaaacgcctagtacaaagtccaaattcttactttatggatgtaaaatgtccaggttgctacaagatcaccacggttttcagccatgctcagacagtggttctttgtgtaggttgttcaacagtgttgtgccagcctacaggaggaaaggccagactcacagaagggtgttcatttagaagaaagcaacactaatgattcaaacagcttcctgaattttaattttgtgttgtctcacagaaagccttatcataaattccataattctaattaatttaccaagataatgtaattacatttggttttgtaaggtatacagcagtaatctcctattttggtgtcagtttttcaataaagttttgattatgggcaaatagtcacgacggaccggctga

SEQ ID NO: 101912 - DNA, 791 bp, Homo sapiens
ccgggggctgagcggcccgccgggttccggggtggcgccggccccggtggccgcgggcgctccctcgccatggcctaagcccgaggccgctccccagccagattctggcctcaggcactgcagagcccgcggcgctcgccaacaagcccgttagacccacgggacttggcaccctggaacgctcaccatccccgggtcttccctgcgccctggacccgagtaccctgctgcggcgtccccctaccaccgagaggagggcctagagcagacaagcccgccccgccgctcctcccagcagcttctatcccggaagttgatgccgagcgcagatcgcttgcagcttgctagctgtgtgggctgggaggtctggtagggctgagcttgcaagaggatcaacatgcctttggctagagatttactacatccgtccttggaagaggaaaagaaaaaacataaaaagaaacgcctagtacaaagtccaaattcttactttatggatgtaaaatgtccaggttgctacaagatcaccacggttttcagccatgctcagacagtggttctttgtgtaggttgttcaacagtgttgtgccagcctacaggaggaaaggccagactcacagaagggtgttcatttagaagaaagcaacactaatgattcaaacagcttcctgaattttaattttgtgttgtctcacagaaagccttatcataaattccataattctaattaatttaccaagataatgtaattacatttggttttgtaaggggagatgtacaacgggccgagc

SEQ ID NO: 101913 - DNA, 1033 bp, Homo sapiens
ccgggggctgagcggcccgccgggttccggggtggcgccggccccggtggccgcgggcgctccctcgccatggcctaagcccgaggccgctccccagccagattctggcctcaggcactgcagagcccgcggcgctcgccaacaagcccgttagacccacgggacttggcaccctggaacgctcaccatccccgggtcttccctgcgccctggacccgagtaccctgctgcggcgtccccctaccaccgagaggagggcctagagcagacaagcccgccccgccgctcctcccagcagcttctatcccggaagttgatgccgagcgcagatcgcttgcagcttgctagctgtgtgggctgggaggtctggtagggctgagcttgcaagaggatcaacatgcctttggctagagatttactacatccgtccttggaagaggaaaagaaaaaacataaaaagaaacgcctagtacaaagtccaaattcttactttatggatgtaaaatgtccaggttgctacaagatcaccacggttttcagccatgctcagacagtggttctttgtgtaggttgttcaacagtgttgtgccagcctacaggaggaaaggccagactcacagaaggtatatcatttggcattctccaacccagtgatgagattgatgattataaatgtctctatcttcactgaaaagtttaaagaaatcttaatgattaccaaaataacttatctttcattgtgtgctttcagtaaagaatggcctgttcaaatggatatatttatactcttgaccttgcagtgaactccattgacttatttttcttagtttagaacacatttattcacttagtttgcttaacttggaataaattaagtcagaatagaagcaaaagaataactacatgttataggacatgcagatttatttatttatttatttattattttttttttttattaggagtctcgctctgtcacccaggctggagtgcagtggcgccatctcagctcactgcaacttctgcctccccg

SEQ ID NO: 101914 - DNA, 1269 bp, Homo sapiens
ccgggggctgagcggcccgccgggttccggggtggcgccggccccggtggccgcgggcgctccctcgccatggcctaagcccgaggccgctccccagccagattctggcctcaggcactgcagagcccgcggcgctcgccaacaagcccgttagacccacgggacttggcaccctggaacgctcaccatccccgggtcttccctgcgccctggacccgagtaccctgctgcggcgtccccctaccaccgagaggagggcctagagcagacaagcccgccccgccgctcctcccagcagcttctatcccggaagttgatgccgagcgcagatcgcttgcagcttgctagctgtgtgggctgggaggtctggtagggctgagcttgcaagaggatcaacatgcctgtgagttgtttacatcgggctccgggtttgttttgggcttctttaccgagagtcatatgggacggatgagtccggctgcctctcgggcctgtagtgtccgagagtggcgaggcggctcaggttgcgcagcgtcttcgcgcgtggcgggcatgtagtgacttgcccggtcaccgcggcgcggctggccctgcaggggcgtgggctgcaattcagaggcggtggctgggaggggaacagttctctgtgtagcttatgagcggtcttggtctttgaggatgcccctgaggttgtgatctttgggtcttttggctttcccagtgattggtgtttctcgccccctctgccttctttcggaagcgatttcctacttgttttccttttttaaaaactgtcctcgttgttgccttatatattaattccgtcaaggacggtcgctcagcaagaattcctgtcagatcagctgttgagccacaggagcaaaaatcacccaggcgctgacgttgtctggtctacttcagcagtttctactctaagcgagtccacagtcggggtcactttctttgcttagcacctcgacttcgcgcagttttcatcgaagacagttcattacgcagttgagtaaagaaggacaaagtttgccttaccatatgtttcctgatcgtgcgaaagcccttttctagggacttggagaacacaagtattatgaaaagtactgatgaaagttattaacaggtttcgaaaaataactttactatctgacgtgttgcttctgccgaggatgaccgttattcctgtttttgcatgtatatttcacgtatggttaaatgtgccagcgttgtggtttaaaactaatagtaataatatgc

SEQ ID NO: 101915 - DNA, 1348 bp, Homo sapiens
ccgggggctgagcggcccgccgggttccggggtggcgccggccccggtggccgcgggcgctccctcgccatggcctaagcccgaggccgctccccagccagattctggcctcaggcactgcagagcccgcggcgctcgccaacaagcccgttagacccacgggacttggcaccctggaacgctcaccatccccgggtcttccctgcgccctggacccgagtaccctgctgcggcgtccccctaccaccgagaggagggcctagagcagacaagcccgccccgccgctcctcccagcagcttctatcccggaagttgatgccgagcgcagatcgcttgcagcttgctagctgtgtgggctgggaggtctggtagggctgagcttgcaagaggatcaacatgcctttggctagagatttactacatccgtccttggaagaggaaaagaaaaaacataaaaagaaacgcctagtacaaagtccaaattcttactttatggatgtaaaatgtccaggttgctacaagatcaccacggttttcagccatgctcagacagtggttctttgtgtaggttgttcaacagtgttgtgccagcctacaggaggaaaggccagactcacagaagggtgttcatttagaagaaagcaacactaatgattcaaacagcttcctgaattttaattttgtgttgtctcacagaaagccttatcataaattccataattctaattaatttaccaagataatgtaattacatttggttttgtaaggtatacagcagtaatctcctattttggtgtcagtttttcaataaagttttgattatgggcaaatcccctctttttctttttttaaaatatatttgagtatgccatacatttatatatatggtgtatatgaatttggtttaaacattttaaaatttattctgattagttgtgtctttttttttttttggagagagagagtcctgctctgtcactcaagctggagtgcagtggtgcgatctcggctcactgcaacctccgcctcccaggtccaagcaattctcttgccttgtcctcccaagtagctgggattataggcacacaccaccatgcctggctaatttgtgtctcattttcaagagtagaaaccctaaatattttattttcattccttttccaaattgctatgaatgggattaaaggattacagatgtaaagtctattatttgtgaattctaaatgtagttctgctgttgtacctgtggaaacatcttaaagaagtacatattttgcacgtcctgcacgtgtaccccagaacttaaactataattaaaaagaatagtttcaaaaaaatacatattga

SEQ ID NO: 101916 - DNA, 791 bp, Homo sapiens
ccgggggctgagcggcccgccgggttccggggtggcgccggccccggtggccgcgggcgctccctcgccatggcctaagcccgaggccgctccccagccagattctggcctcaggcactgcagagcccgcggcgctcgccaacaagcccgttagacccacgggacttggcaccctggaacgctcaccatccccgggtcttccctgcgccctggacccgagtaccctgctgcggcgtccccctaccaccgagaggagggcctagagcagacaagcccgccccgccgctcctcccagcagcttctatcccggaagttgatgccgagcgcagatcgcttgcagcttgctagctgtgtgggctgggaggtctggtagggctgagcttgcaagaggatcaacatgcctttggctagagatttactacatccgtccttggaagaggaaaagaaaaaacataaaaagaaacgcctagtacaaagtccaaattcttactttatggatgtaaaatgtccagagtggttctttgtgtaggttgttcaacagtgttgtgccagcctacaggaggaaaggccagactcacagaagggtgttcatttagaagaaagcaacactaatgattcaaacagcttcctgaattttaattttgtgttgtctcacagaaagccttatcataaattccataattctaattaatttaccaagataatgtaattacatttggttttgtaaggtatacagcagtaatctcctattttggtgtcagtttttcaataaagttttgattatgggcaaa

SEQ ID NO: 101917 - DNA, 1103 bp, Homo sapiens
ccgggggctgagcggcccgccgggttccggggtggcgccggccccggtggccgcgggcgctccctcgccatggcctaagcccgaggccgctccccagccagattctggcctcaggcactgcagagcccgcggcgctcgccaacaagcccgttagacccacgggacttggcaccctggaacgctcaccatccccgggtcttccctgcgccctggacccgagtaccctgctgcggcgtccccctaccaccgagaggagggcctagagcagacaagcccgccccgccgctcctcccagcagcttctatcccggaagttgatgccgagcgcagatcgcttgcagcttgctagctgtgtgggctgggaggtctggtagggctgagcttgcaagaggatcaacatgcctttggctagagatttactacatccgtccttggaagaggaaaagaaaaaacataaaaagaaacgcctagtacaaagtccaaattcttactttatggatgtaaaatgtccaggttgctacaagatcaccacggttttcagccatgctcagacagtggttctttgtgtaggttgttcaacagtgttgtgccagcctacaggaggaaaggccagactcacagaagggtgttcatttagaagaaagcaacactaatgattcaaacagcttcctgaattttaattttgtgttgtctcacagaaagccttatcataaattccataattctaattaatttaccaagataatgtaattacatttggttttgtaaggtatacagcagtaatctcctattttggtgtcagtttttcaataaagttttgattatgggcaaaaaaaaaaaaaacaaaaaattaaacattaattaaataaaccatttatatttatataatctctccttatttcatcaaattttctatcactctcataaaatatctaaataaaaaaaaaaacctcgaggggggcacaggtcccaatttccccttatgggagtggtttaacaataaatgggccttgtttacaacagtatgaactggaaaaaccctggggtacccaaatttaatcccctttaaaaaaatacccctttatcccaactggctatataatt

SEQ ID NO: 101918 - DNA, 876 bp, Homo sapiens
ccgggggctgagcggcccgccgggttccggggtggcgccggccccggtggccgcgggcgctccctcgccatggcctaagcccgaggccgctccccagccagattctggcctcaggcactgcagagcccgcggcgctcgccaacaagcccgttagacccacgggacttggcaccctggaacgctcaccatccccgggtcttccctgcgccctggacccgagtaccctgctgcggcgtccccctaccaccgagaggagggcctagagcagacaagcccgccccgccgctcctcccagcagcttctatcccggaagttgatgccgagcgcagatcgcttgcagcttgctagctgtgtgggctgggaggtctggtagggctgagcttgcaagaggatcaacatgcctttggctagagatttactacatccgtccttggaagaggaaaagaaaaaacataaaaagaaacgcctagtacaaagtccaaattcttactttatggatgtaaaatgtccaggttgctacaagatcaccacggttttcagccatgctcagacagtggttctttgtgtaggttgttcaacagtgttgtgccagcctacaggaggaaaggccagactcacagaagggtgttcatttagaagaaagcaacactaatgattcaaacagcttcctgaattttaattttgtgttgtctcacagaaagccttatcataaattccataattctaattaatttaccaagataatgtaattacatttggttttgtaaggtatacagcagtaatctcctattttggtgtcagtttttcaataaagttttgattatgggcaaaaaatagacccgtcgagcggccgttaatttagtagtagtagtcggc

SEQ ID NO: 101919 - DNA, 1051 bp, Homo sapiens
  misc_feature (832)..(832): n is a, c, g, or t
ccgggggctgagcggcccgccgggttccggggtggcgccggccccggtggccgcgggcgctccctcgccatggcctaagcccgaggccgctccccagccagattctggcctcaggcactgcagagcccgcggcgctcgccaacaagcccgttagacccacgggacttggcaccctggaacgctcaccatccccgggtcttccctgcgccctggacccgagtaccctgctgcggcgtccccctaccaccgagaggagggcctagagcagacaagcccgccccgccgctcctcccagcagcttctatcccggaagttgatgccgagcgcagatcgcttgcagcttgctagctgtgtgggctgggaggtctggtagggctgagcttgcaagaggatcaacatgcctttggctagagatttactacatccgtccttggaagaggaaaagaaaaaacataaaaagaaacgcctagtacaaagtccaaattcttactttatggatgtaaaatgtccaggttgctacaagatcaccacggttttcagccatgctcagacagtggttctttgtgtaggttgttcaacagtgttgtgccagcctacaggaggaaaggccagactcacagaagggtgttcatttagaagaaagcaacactaatgattcaaacagcttcctgaattttaattttgtgttgtctcacagaaagccttatcataaattccataattctaattaatttaccaagataatgtaattacatttggttttgtaaggtatacagcagtaatctcctattttggtgtcagtttttcaataaagttttgattatgggcaaanaaataattcagaacggccaccaaaaagcaggctttggaaacaaagggcctattacttacacatctggaaaaaatttctttggaaggttttcttgccaacaaagggaagaatcaataaggggggggcgcccctccccctgcgttaataaaaaaagcagtattgggaaagcgggcccttcttccgcctcaaaaaattaagccaattaagcgtggtaaactt

SEQ ID NO: 101920 - DNA, 1150 bp, Homo sapiens
  misc_feature (699)..(700): n is a, c, g, or t
  misc_feature (1150)..(1150): n is a, c, g, or t
ccgggggctgagcggcccgccgggttccggggtggcgccggccccggtggccgcgggcgctccctcgccatggcctaagcccgaggccgctccccagccagattctggcctcaggcactgcagagcccgcggcgctcgccaacaagcccgttagacccacgggacttggcaccctggaacgctcaccatccccgggtcttccctgcgccctggacccgagtaccctgctgcggcgtccccctaccaccgagaggagggcctagagcagacaagcccgccccgccgctcctcccagcagcttctatcccggaagttgatgccgagcgcagatcgcttgcagcttgctagctgtgtgggctgggaggtctggtagggctgagcttgcaagaggatcaacatgcctttggctagagatttactacatccgtccttggaagaggaaaagaaaaaacataaaaagaaacgcctagtacaaagtccaaattcttactttatggatgtaaaatgtccaggttgctacaagatcaccacggttttcagccatgctcagacagtggttctttgtgtaggttgttcaacagtgttgtgccagcctacaggaggaaaggccagactcacagaagggtgttcatttagaagaaagcaacactaatgattcaaacagcttcctgaattttaattttgtgttgtctcacagannaagtgcctttattcaattttaacaaacacattcttttttttccccccccaaaatttttaacaacacacaattctttttttcaccccttttttttaaaacacacacacacttttttttttttccccacaaacaaacacacaaccacaggttgtttttttgttttgattcttcttaaaaaaaaaagtggatgcaagcacccataaaaaaataaaagaggagaggaggcgggagccaacaaacaaaaaaaacatttttttttttacaagacaaaaaacacaaaaaatattgtgggggggggggggagcacaaatttttttctattacaacacagaaagatgatacgtctaatgttctttctatatgtattacataagaaacaaactagccgcagagaagaaatagtttttttttttttattcaagaagaaatagagaaagggaagaagagaan

SEQ ID NO: 101921 - DNA, 772 bp, Homo sapiens
ccgggggctgagcggcccgccgggttccggggtggcgccggccccggtggccgcgggcgctccctcgccatggcctaagcccgaggccgctccccagccagattctggcctcaggcactgcagagcccgcggcgctcgccaacaagcccgttagacccacgggacttggcaccctggaacgctcaccatccccgggtcttccctgcgccctggacccgagtaccctgctgcggcgtccccctaccaccgagaggagggcctagagcagacaagcccgccccgccgctcctcccagcagcttctatcccggaagttgatgccgagcgcagatcgcttgcagcttgctagctgtgtgggctgggaggtctggtagggctgagcttgcaagaggatcaacatgcctttggctagagatttactacatccgtccttggaagaggaaaagaaaaaacataaaaagaaacgcctagtacaaagtccaaattcttactttatggatgtaaaatgtccaggttgctacaagatcaccacggttttcagccatgctcagacagtggttctttgtgtaggttgttcaacagtgttgtgccagcctacaggaggaaaggccagactcacagaaggctgaaagtgcgtaaatctaactaagaaagagaaagtgcctgcaatcccagcactttgggaggcggagacgggtggattacttgagctcaggatttcgagactagcctgagcaacgtggcagaaaccgcatctctacaaaatatacaaa

SEQ ID NO: 101922 - DNA, 351 bp, Homo sapiens
ttctttttttttttttcctactggtacaatacactaagcttacttagatttcaccagctgtatatgtactcattccatatgcttttgtggtctgaagtcatcacttggaggcaccaatggaaaagagcagtgtcagagggctgggattcctctaccagctgtgtgaccttgagtaagccaccttaacctataaacagaaagtaatatctgccctgatacatgatagccaattatttcacttagataaaaactgaatatctactatatatttttatgagatataaggaaagattcttcttgccgctttgccattttttcccataagaagcctggtggtaaagagcacaggct

SEQ ID NO: 101923 - DNA, 426 bp, Homo sapiens
gcaattcccttttatatgagacgtgagcatgtgtgtatgtgtaatttattcattcatggaaagtataatacatacactaaaatgttcatgccatatgaatatgacagatggctgcctttttagaaatagaatcagttagtgatagaacttgaccattttcagagcatgtcagccttttccagtctctgtgtcttggtatagctagttccttctgcctggaatacttcctcatctcacttgctttcctgcctggcagcttcctacttgccctctggaaccagctctagggtcaccacatctctgcttctgagtgcctcctcagacacagtctgtatttcctcttccaagctctcatcacaaacattgtgctgtattatatgtttctgtgtggtcttccttctatgaggaagccttggaaagcaggag

SEQ ID NO: 101924 - DNA, 270 bp, Homo sapiens
aggggtcacagaacacaagaactggaaggaagctgagaggtgggctgctgcctgtgcaccccttcacacatgtggaaacaggtccagggaaggagggccttggatgcctgcaggggtcaggacatctactcactcactcttggtaggtactgtgctaagagagaaaatatatatctaatacaaaaaagtagccaggcatgatggtggcacacgcctgtagtcccagctactcaggaggctgaggcacaagaatcgcttgaatccaggagg

SEQ ID NO: 101925 - DNA, 391 bp, Homo sapiens
acatttgaaaaaggtatatatcaaccacatctcttatctgcaaaataaaagagaagataaaaggaaaataacttttaaagaaatgtgtgtttcaaagtgcaagttttggatgaggacggtgctacaaggcataataaagtagacaaatgcctgcccatatacacagaaccactgtgaacacaactactacagtggcaagatgacaaacactggtgcattgtactgatggctcagttaccaccagtggcattgcattggatgttgatattttctgagatagtataaacatcttgattaaatttcaaataaaaaagtacaatgtttgtactttctacaaagtgccataaacttctttaaaaatttgttatatgaaaacaggaagatgtttttt

SEQ ID NO: 101926 - DNA, 858 bp, Homo sapiens
tggaatgatgactctcatacctctagtcagctattggaagaaatactgtctctcatagctcgacttagataaatgagtcacttccttggtcttctctttttatgaaggtcataaagaattgccacactctaacatattgtataatgccctcgagtgttacaaacgtgttatcccagggcacacagcacaaaggtgagattgtttcttatatgcacacctcaccaattattaggattatcaccctcacacagggaaagagcctatggctgaagtcttgaatctcaaatgcaaacagaatctcaaatgcaaacactgtccacagttggaattgtgactcatgtatgagcctccaaccacagttgagatggtgacacatttctaaactcagaacatagcagatgaggactctactctcttaaacccaacaaattaagagagatgttgactaatacctgggcttagggccacaagtatggtcatgggtgcttacaaacatgattttagagtaaattgtgcctctcatttatactggataaagcctttgagtagtatagtgtactaaccaggcgcagtggctcacgcctgtaatcccagcactttgggaggccgaggtgggtgaaacgaggtcaggagttcaggaccagcctgaccaacatgttgaaaccccatctctactaaaaaatacaaaaaattagctgggcatggtggtgggcacctgtaatcccagctacttgggagcctgaggcaggagaattgcttcaacccgggaggtggaggttgcattgaattgagatcatgccactgtactccagcctgggtgatagtgcgagactctgtctcaccaaaaaaaaaaaaaaa

SEQ ID NO: 101927 - DNA, 229 bp, Homo sapiens
ggttcccaatgtcagcatccccaacacctgcacaccctgacacagacagtcaggaatgacttgagtagtcaaagggcatgacagagagcagcatgtagaaagcagttggcaatttttcaaatataccagtaagggttgtttgtgttcacaatactctggctttgcaggactattctgatgctaaaaagagtctagaaagtttaggtgaacatggttcctaaaggagggg

SEQ ID NO: 101928 - DNA, 433 bp, Homo sapiens
catactggcttaaatactattaagccttagtctagccctgtccttggtgtataattcctacaactggaactgtttgtgcatcttacttaaatttatcagttaatattaggtattatgagttccccttggccttaacccctactcttatcaaagaaacatgtttagaaaatgaagcttatcttccacaggactttaggcataaaatgtgattaagatttattttggctgggcgtggtggctcatgcctgtaatcccagcaccttgggatgcagagacgggtggatcatctgaggtcaggagttcgagaccagcctgaccaatatggtgaaacctcgtctctactaaaactacaaaaaaaaattatttgggtttggtaggatatcagtgatggaagatgaaaggaatgaaatgaagtgagaagggaagtttagag

SEQ ID NO: 101929 - DNA, 279 bp, Homo sapiens
aagtagaatgatggttatcagaggcggggaagggtaatggggggatgaagataaagtggggatgggtaatgggtacaaaaatatagtttgaatgaataagatatagtattcagtagtgcaataggatggctatagttaacaatattttattgtgtattttaaaataactaaaagagtgaaattgcaatattcctgatagaaaaaaatgataaatggttaagatgattgtgatacagtttggctgctagaacatggttaccatgtctttctctctccact

SEQ ID NO: 101930 - DNA, 469 bp, Homo sapiens
gcattccaagcagatcgcatggcccctcacccagccgtggcagcaccgctgttcccaaaccatcaaacctctctcacctatcagtccacgtttttatttttattttttgagaaggtgtctcgttctgtcacccaggctggagtgcagtggtgaggccaaggctcactgcagcctccaactcctaggctcacgtgctcctcatagctcagcctcctgagttgctgggattacaggcgtgagccaccacgtttagctgagtataattttaaatagccctatgtgacaagtggctactttattggacagtgtagatctaagattaattcctcaactgttttgcactcaacaaagacatacctctgagttggcaaccagcagggtggataacgggccagtggtgataaaatcaaagaataggtaatgaaacaatcatccagttaacaatcagcaaggttcttcagagcctaat

SEQ ID NO: 101931 - DNA, 625 bp, Homo sapiens
gtttagttataggaatccatacatcctccttttgtctaaaatagttcatgtgtatttttatcatttgaaaccatacagagatcagttaatacagttggaatatggggcagggtacaatcaggaagttgcaaccctgagagcttttgtttatttaaatgttagttattatagctgagataactggccccttattgctcagtctctctgctgagtcaatgaaagttgaatgtataaatgaataatgcctcttgctccccaccttgtctccccagccaggttcctgatcctcacctgaaatgactttatgctaagttctttttttttttttttttttttgagacaaagtcttgctcttttgcccaggctagagtgtagtggtgcagtctcggttcactgcaacctccgcctcccaggttcaagtgattgtcctgctgtggcctccgagtagctggggttacaggtgctcaccaccatgcctggtgaatttgtattttgaatttgaatacaaattttgaatttgtatttttatggtagagatggggtttcaccatgttggccaggctggtctcgaactcctgacctcaggtgatccacctgcctcggcctcccaaagcgctggaattat

SEQ ID NO: 101932 - DNA, 676 bp, Homo sapiens
gctgcagtgagctaagatcaaatcactgcactcaagcctgggtgaccctgtctcaaaacaaacaaaaaacccagtaggatcacaggtgaatttcctcaagtgtgagcttcctgagtgccctgagctttctttcccagggcctagcacacccactgtagattcctatttacttgtctatctccaacaacagactgtgaactccttcagggcagagttggaggccttttctcactagtctcagcctccaatgtggtctagcacatggtaggtgcatgggaatgaataaatcaatcaaattgcttcatgaaagcaacataatcactcatcaagagcccttttcaccccagcctatcgaaccacatcacccacctgtcttcccaagccttccatcactgttcccttctgtctgcattgctggtgcattcctcctcacaaccccctttcccctttgcacccttgcctctcccttgatgataccacacagatgccagcaccagcttgggagtcccatgggagcaagagccagtggtggcctcctgacccaagttggccacagccctcaaccgctgtgggtcttggggatctttgacttccccctcctggccttgggctcatcactaatgaggggctggggcccacaggggagaagcagtgaccttctctgtgtttgtctgga

SEQ ID NO: 101933 - DNA, 168 bp, Homo sapiens
aaacacacatctcaaattttctttgacaatctcaatttcaaatattccccatagtctattcattccattgtacacattccaacacattcctaggcttctggtttagaaaacaaagtatcatcattttggttaacatactgctatttcccctcctaaatcctctgttcc

SEQ ID NO: 101934 - DNA, 438 bp, Homo sapiens
gaaagctcgctctggtagaagctagcagccatatgagaaatccaactaccatgagatcaccatagcttgaggaagtccagcctcaccacatgaagagaatgtctgggacagaaaatatatggccagtccccaaaaattctacctattctattctatcccagctgaagttctaaacatgtgaacagaaagttactaacactgagtaatagtcttttaaatgagtaacaatgaggcaaaatgggaagatacacaggaaagagtgtaacagtttccatatactggaaagagtataacatctccagcgttttctggagagcagtgttaaaatgtatatgaaactccttgcaatttacctagccttttaaaaaaatattcagcatcgcttaggaagatttatgttaaaggatgttaataccagcattattcataatacaaaaa

SEQ ID NO: 101935 - DNA, 230 bp, Homo sapiens
gaggaggaagagccacgcatgggtgggcaagaggaagaggaagagcattcaggatggagaacaccctaacaaaaagcaaagtgtgcattgcagaaggagcactgaccgcaaaggggcctgaagagaccgcctggcctcaggtgatccacctgctttggcctcccaaaatgctaggattacaggcgtgagccaccgtgcccggccgggaggttttcttagggagatggaaa

SEQ ID NO: 101936 - DNA, 377 bp, Homo sapiens
gagtgttgaaatcttcatttaccatatacttgggttaagtaccatgttgcgcttatatcttttgattttataaatctcattttctttactgtaactcatacagtaccaattaccagcccttgtgtttcttattttcttgggggctctatttaatcttaaatttcatagatcctgatgattttggtctttggaagaacacaatagctttttgtgttgctgaatagctttgtggattaagactgggctgtcatacagagatgatacttgggattcagagattataactgtgaagtataagatggttagcagtctataaaaaaatagcattccatgaccttggcctcattaacactatccctctgaactaatcagctgta

SEQ ID NO: 101937 - DNA, 194 bp, Homo sapiens
ggatttcgcgcgataggcagccatatgtgctagataagaaaggaatagaaaggaatatacatacatcagagggcccagtttctttttcttcctttttaaaattgtttttattttttgagagggagtctcgttctgtcacccatgctggagtgcagtagcgtgatatcagctcactgcagcctctccctcccaga

SEQ ID NO: 101938 - DNA, 644 bp, Homo sapiens
tcattttcctaaactgcttcagggttcaatcctgttattatcacattcagaaattaatcacagttctgttaaaacatctgttttaaataggaagttcaagaaacttcctctcttgatttggacttgtattcctcttttggattcagcttagctaattaaaaatacttccgctaataggttctgtcatttgctctaggaaatttttgaaccagatgatacaaactctcttgggagttctcaaccacctaataatttatttgcttccttccagcagatttcccactctaccatcagcccaaattatctccttacctccccaggatgcagaagtcaccaataatcacagttataactgataaattcttttttggcaagctaattcttatctccagcatagattgctgttttacagatacaagcaaatttgaattagttcccatatataacattaactataaataaaaattaagtaatggaaaaataggtaagtatttgagcaaagcatgctgaggttctactcttttaaacacagatggtaaatacctaggttgttctaagtctatggctagtcacagaatagcatgcaaaataacattatgtgtgaaaactaaggtcactgcgctttttaaatgaggacaacaata

SEQ ID NO: 101939 - DNA, 465 bp, Homo sapiens
agtaggtgctgctgcatcattaggttgggtttagattcctttctgatatggatctagcatctgacacagtactgtcagttaataggagtaagatgtagtgccacctcagttatctgtggacaggagcatattgaaataagggatcagaccaacaaagattaaaacatcagagaaagcaaagatgaagaagagatgcccctgtgttctcagtcactggaagattgggggagttgtgaggggagtgccttcctgctcagtggcatggactagcttgccccctgagaggtgctccgccagtggattggttgcagatggtggttgtggtgtggccatcagtcacctgctcacagcctttttctagtgactggtcccattccagtgctgtgaaaactcccagtgtaccatggattaactttgtcagcctgattttatgtttgggagacaagtaacttttatcctataact

SEQ ID NO: 101940 - DNA, 2475 bp, Homo sapiens
ggcctggggggcttccctggggggcttgtcgccggggccgcctgggctttcaggtcttccgaggctgacattcacgtttcattctgccacactcgggaacggtgatcggggaagcatggggatccgggagaagcacccacaaaactagcatcctcctggaggagctcgggaataggatgagtgataatccacccagaatggaagtgtgtccttactgtaagaagccatttaaacgattaaaatcccacttgccatactgtaagatgataggaccaaccatacctactgatcaaaaagtttatcagtccaagccagctacactcccacgtgctaaaaagatgaaaggaccaatcaaagatttaattaaagctaaagggaaagagttagagacagagaatgaagaaagaaattctaagttggtggtggacaaaccagaacagacagtgaagacctttccactgccagctgttggtttggaaagagcagctactacaaaggcagataaagacatcaagaatccaatccaaccatccttcaaaatgttaaaaaatactaaaccaatgactactttccaagaagaaaccaaggctcagttttacgcatcagagaaaacctctcctaaaagagaacttgccaaagatttgcctaaatcaggagaaagtcgatgtaatccttcagaagctggagcgtctttactggttggctcaatagaaccttctttgtcaaatcaagatagaaaatattcctcaactctacctaatgatgtacaaactacctctggtgatctcaaattggacaaaattgatccccaaagacaggaacttctagtaaaattactagatgtgcctactggtgattgtcatatttctccaaagaatgtcagtgatggggttaaaagggtaagaacattattaagcaatgagagagattccaaaggcagggatcacctctcaggagtccctactgatgttacagttactgagactccagaaaagaacacagaatccctcattttaagccttaaaatgagctcattaggtaaaatccaagtcatggagaaacaagagaaaggacttaccctgggagtagagacgtgtgggagcaaaggaaatgcagagaaaagtatgtctgcaacagaaaagcaggaacggactgtcatgagccatggctgtgagaacttcaacaccagggattcagtcacaggaaaggagtctcaaggggaaagaccacatttaagtttgttcattccgagggagacgacttaccagtttcattctgtatcgcagtcaagtagtcaaagtcttgcctctctagctacaacatttcttcaagaaaagaaagcagaagcccagaatcataattgtgtccctgatgtaaaggcattaatggagagtcccgagggacagttatctctggagcccaaatctgatagtcagttccaagcatcacacactgggtgccagagccctttatgttcagcccagcgtcacactcctcagagccccttcaccaatcatgctgcagctgctggcaggaagactcttcgcagctgcatggggctggagtggtttccagagctctatcctggttaccttggactaggggtgttgccagggaagcctcagtgttggaatgcaatgacccagaagccacaacttatcagtccccagggggaaagactctcgcaagtttctttgttggaacgaagctcaactcatataaggagtttggaaccccctaccggacttacaacctccaacttctctctaatgaggctcttgggagctgtacaaaaaggctggatcaggtgcaacaccaccataaggaagagtggattcggtggcatcacgatgctcttcacaggatacttcgtcctgtgttgtagctggagtttcagacgtctgaagctgcagcggtggcgtaagtagtgttgacctggacatcacttaaagctctggaacagcaaagggcgtacagtggagacgactgcaatacatacttaacagtttaaaaatgtataatatttgggacagggagaggggagtgaaaaaaataaagaataaaattattggaatctaaaataatgatacaggaagtaaacgtattattaatatagacagatctggttctgtctggatgttcttggcttgctctcaggagcaactgagaattagagaaaaactagttttgtttaaccataaagttgttattcaaggagatgtgaagatgacaaagttcatcactaaaattaagaagtcacttctcagtaaaaagctagtatctcattaccattcagctatatgagataccagactactacctatatgttgatacaggaaagtatctgaattggcagaaaataagcccacatcaggcccttccccttagtttctttggggcccttgaccagatcttgataaggtgtgagaaacacaagagctaaggatgggcattcgagttgcaggtaagcctccg

SEQ ID NO: 101941 - DNA, 2190 bp, Homo sapiens
ggcctggggggcttccctggggggcttgtcgccggggccgcctgggctttcaggtcttccgaggctgacattcacgtttcattctgccacactcgggaacggtgatcggggaagcatggggatccgggagaagcacccacaaaactagcatcctcctggaggagctcgggaataggatgagtgataatccacccagaatggaagtgtgtccttactgtaagaagccatttaaacgattaaaatcccacttgccatactgtaagatgataggaccaaccatacctactgatcaaaaagtttatcagtccaagccagctacactcccacgtgctaaaaagatgaaaggaccaatcaaagatttaattaaagctaaagggaaagagttagagacagagaatgaagaaagaaattctaagttggtggtggacaaaccagaacagacagtgaagacctttccactgccagctgttggtttggaaagagcagctactacaaaggcagataaagacatcaagaatccaatccaaccatccttcaaaatgttaaaaaatactaaaccaatgactactttccaagaagaaaccaaggctcagttttacgcatcagagaaaacctctcctaaaagagaacttgccaaagatttgcctaaatcaggagaaagtcgatgtaatccttcagaagctggagcgtctttactggttggctcaatagaaccttctttgtcaaatcaagatagaaaatattcctcaactctacctaatgatgtacaaactacctctggtgatctcaaattggacaaaattgatccccaaagacaggaacttctagtaaaattactagatgtgcctactggtgattgtcatatttctccaaagaatgtcagtgatggggttaaaagggtaagaacattattaagcaatgagagagattccaaaggcagggatcacctctcaggagtccctactgatgttacagttactgagactccagaaaagaacacagaatccctcattttaagccttaaaatgagctcattaggtaaaatccaagtcatggagaaacaagagaaaggacttaccctgggagtagagacgtgtgggagcaaaggaaatgcagagaaaagtatgtctgcaacagaaaagcaggaacggactgtcatgagccatggctgtgagaacttcaacaccagggattcagtcacaggaaaggagtctcaaggggaaagaccacatttaagtttgttcattccgagggagacgacttaccagtttcattctgtatcgcagtcaagtagtcaaagtcttgcctctctagctacaacatttcttcaagaaaagaaagcagaagcccagaatcataattgtgtccctgatgtaaaggcattaatggagagtcccgagggacagttatctctggagcccaaatctgatagtcagttccaagcatcacacactgggtgccagagccctttatgttcagcccagcgtcacactcctcagagccccttcaccaatcatgctgcagctgctggcaggaagactcttcgcagctgcatggggctggagtggtttccagagctctatcctggttaccttggactaggggtgttgccagggaagcctcagtgttggaatgcaatgacccagaagccacaacttatcagtccccagggggaaagactctcgcaagtttctttgttggaacgaagctcaactcatataaggagtttggaaccccctaccggacttacaacctccaacttctctctaatgaggctcttgggagctgtacaaaaaggctggatcaggtgcaacaccaccataaggaagagtggattcggtggcatcacgatgctcttcacaggatacttcgtcctgtgttgtagctggagtttcagacgtctgaaaaaattgtgccgacccctgccctggaagagcacagtacctccatgcattggtgtggcgaagacgactggggattgccgctctaaaacatgtttggattaggaagcacgtttaagtaggagaagccttcgtgacttctctctagtgccttcgtgccctgtgttgcccactgaattgccctgtaacacctaagtgtagtggtagcattaagggatagcttttcagccctcaaggttatcaggagcatttgtatcactgctataaataaagtagtatcacttgtcat

SEQ ID NO: 101942 - DNA, 2082 bp, Homo sapiens
ggcctggggggcttccctggggggcttgtcgccggggccgcctgggctttcaggtcttccgaggctgacattcacgtttcattctgccacactcgggaacggtgatcggggaagcatggggatccgggagaagcacccacaaaactagcatcctcctggaggagctcgggaataggatgagtgataatccacccagaatggaagtgtgtccttactgtaagaagccatttaaacgattaaaatcccacttgccatactgtaagatgataggaccaaccatacctactgatcaaaaagtttatcagtccaagccagctacactcccacgtgctaaaaagatgaaaggaccaatcaaagatttaattaaagctaaagggaaagagttagagacagagaatgaagaaagaaattctaagttggtggtggacaaaccagaacagacagtgaagacctttccactgccagctgttggtttggaaagagcagctactacaaaggcagataaagacatcaagaatccaatccaaccatccttcaaaatgttaaaaaatactaaaccaatgactactttccaagaagaaaccaaggctcagttttacgcatcagagaaaacctctcctaaaagagaacttgccaaagatttgcctaaatcaggagaaagtcgatgtaatccttcagaagctggagcgtctttactggttggctcaatagaaccttctttgtcaaatcaagatagaaaatattcctcaactctacctaatgatgtacaaactacctctggtgatctcaaattggacaaaattgatccccaaagacaggaacttctagtaaaattactagatgtgcctactggtgattgtcatatttctccaaagaatgtcagtgatggggttaaaagggtaagaacattattaagcaatgagagagattccaaaggcagggatcacctctcaggagtccctactgatgttacagttactgagactccagaaaagaacacagaatccctcattttaagccttaaaatgagctcattaggtaaaatccaagtcatggagaaacaagagaaaggacttaccctgggagtagagacgtgtgggagcaaaggaaatgcagagaaaagtatgtctgcaacagaaaagcaggaacggactgtcatgagccatggctgtgagaacttcaacaccagggattcagtcacaggaaaggagtctcaaggggaaagaccacatttaagtttgttcattccgagggagacgacttaccagtttcattctgtatcgcagtcaagtagtcaaagtcttgcctctctagctacaacatttcttcaagaaaagaaagcagaagcccagaatcataattgtgtccctgatgtaaaggcattaatggagagtcccgagggacagttatctctggagcccaaatctgatagtcagttccaagcatcacacactgggtgccagagccctttatgttcagcccagcgtcacactcctcagagccccttcaccaatcatgctgcagctgctggcaggaagactcttcgcagctgcatggggctggagtggtttccagagctctatcctggttaccttggactaggggtgttgccagggaagcctcagtgttggaatgcaatgacccagaagccacaacttatcagtccccagggggaaagactctcgcaaggctggatcaggtgcaacaccaccataaggaagagtggattcggtggcatcacgatgctcttcacaggatacttcgtcctgtgttgtagctggagtttcagacgtctgaaaaaattgtgccgacccctgccctggaagagcacagtacctccatgcattggtgtggcgaagacgactggggattgccgctctaaaacatgtttggattaggaagcacgtttaagtaggagaagccttcgtgacttctctctagtgccttcgtgccctgtgttgcccactgaattgccctgtaacacctaagtgtagtggtagcattaagggatagcttttcagccctcaaggttatcaggagcatttgtatcactgctataaataaagtagtatcacttgtcat

SEQ ID NO: 101943 - DNA, 971 bp, Homo sapiens
gagtagcgggtaggtccgacagcaggaacaaggcggcagcactcctgcatgctggctgggatggcctcgccgccatctcttgtatcagacacctggccatgggtgaggaaaagaagtgcctttctgatcgtcctgcataaatggagaggcccaaaaccaagagtcatttctcccacagagaaaagggcttttcttaaagttttaccagtctgaaagggattgtttgatacctgacattaatgaacagagactgaagaaagtgaaacaaacttctcattgtgcttaatactctatttctaaacttataaaacaaaaagagaatgatctgtagaggcaaaagatagtaacagtcattggaagtggcctctcggatccttacatttgtctctgtttatccaaagagctgcagcggtggcgtaagtagtgttgacctggacatcacttaaagctctggaacagcaaagggcgtacagtggagacgactgcaatacatacttaacagtttaaaaatgtataatatttgggacagggagaggggagtgaaaaaaataaagaataaaattattggaatctaaaataatgatacaggaagtaaacgtattattaatatagacagatctggttctgtctggatgttcttggcttgctctcaggagcaactgagaattagagaaaaactagttttgtttaaccataaagttgttattcaaggagatgtgaagatgacaaagttcatcactaaaattaagaagtcacttctcagtaaaaagctagtatctcattaccattcagctatatgagataccagactactacctatatgttgatacaggaaagtatctgaattggcagaaaataagcccacatcaggcccttccccttagtttctttggggcccttgaccagatcttgataaggtgtgagaaacacaagagctaaggatgggcattcgagttgcaggtaagcctccg

SEQ ID NO: 101944 - DNA, 561 bp, Homo sapiens
actgtgtcaaaaacaaaaagatgatgtaagagactcacttcatgaagcacatgcgcatcaatcacctggccagggtactcagcagaccaaaaaacaagtagacgccctgattttcaggggtcccttggccttttgaaaaacattttttcaacctgtaattgatttgactttcaacacttagctgcagtccaatgcagaaatctttaatgcacctgtttagaatatgctcttcctgaggcttagccgtggatccttcggcactggatgttagggaagggggtacgtttcggtaaacaatgacagtgacttctgtttggaaccatagtttctttgttggaacgaagctcaactcatataaggagtttggaaccccctaccggacttacaacctccaacttctctctaatgaggctcttgggagctgtacaaaaaggtgaggctggagtttgactgttgtcttctgttgcaggttctgggcatttggaaaagtttctcttcgggctgttaagctagagctggaaagttttctgctcttctggtcatgcatgagtagcgggtgga

SEQ ID NO: 101945 - DNA, 3545 bp, Homo sapiens
ggcctggggggcttccctggggggcttgtcgccggggccgcctgggctttcaggtcttccgaggctgacattcacgtttcattctgccacactcgggaacggtgatcggggaagcatggggatccgggagaagcacccacaaaactagcatcctcctggaggagctcgggaataggatgagtgataatccacccagaatggaagtgtgtccttactgtaagaagccatttaaacgattaaaatcccacttgccatactgtaagatgataggaccaaccatacctactgatcaaaaagtttatcagtccaagccagctacactcccacgtgctaaaaagatgaaaggaccaatcaaagatttaattaaagctaaagggaaagagttagagacagagaatgaagaaagaaattctaagttggtggtggacaaaccagaacagacagtgaagacctttccactgccagctgttggtttggaaagagcagctactacaaaggcagataaagacatcaagaatccaatccaaccatccttcaaaatgttaaaaaatactaaaccaatgactactttccaagaagaaaccaaggctcagttttacgcatcagagaaaacctctcctaaaagagaacttgccaaagatttgcctaaatcaggagaaagtcgatgtaatccttcagaagctggagcgtctttactggttggctcaatagaaccttctttgtcaaatcaagatagaaaatattcctcaactctacctaatgatgtacaaactacctctggtgatctcaaattggacaaaattgatccccaaagacaggaacttctagtaaaattactagatgtgcctactggtgattgtcatatttctccaaagaatgtcagtgatggggttaaaagggtaagaacattattaagcaatgagagagattccaaaggcagggatcacctctcaggagtccctactgatgttacagttactgagactccagaaaagaacacagaatccctcattttaagccttaaaatgagctcattaggtaaaatccaagtcatggagaaacaagagaaaggacttaccctgggagtagagacgtgtgggagcaaaggaaatgcagagaaaagtatgtctgcaacagaaaagcaggaacggactgtcatgagccatggctgtgagaacttcaacaccagggattcagtcacaggaaaggagtctcaaggggaaagaccacatttaagtttgttcattccgagggagacgacttaccagtttcattctgtatcgcagtcaagtagtcaaagtcttgcctctctagctacaacatttcttcaagaaaagaaagcagaagcccagaatcataattgtgtccctgatgtaaaggcattaatggagagtcccgagggacagttatctctggagcccaaatctgatagtcagttccaagcatcacacactgggtgccagagccctttatgttcagcccagcgtcacactcctcagagccccttcaccaatcatgctgcagctgctggcaggaagactcttcgcagctgcatggggctggagtggtttccagagctctatcctggttaccttggactaggggtgttgccagggaagcctcagtgttggaatgcaatgacccagaagccacaacttatcagtccccagggggaaagactctcgcaagtttctttgttggaacgaagctcaactcatataaggagtttggaaccccctaccggacttacaacctccaacttctctctaatgaggctcttgggagctgtacaaaaaggctggatcaggtgcaacaccaccataaggaagagtggattcggtggcatcacgatgctcttcacaggatacttcgtcctgtgttgtagctggagtttcagacgtctgaaaaaattgtgccgacccctgccctggaagagcacagtacctccatgcattggtgtggcgaagacgactggggattgccgctctaaaacatgtttggattaggaagcacgtttaagtaggagaagccttcgtgacttctctctagtgccttcgtgccctgtgttgcccactgaattgccctgtaacacctaagtgtagtggtagcattaagggatagcttttcagccctcaaggttatcaggagcatttgtatcactgctataaataaagtagtatcacttgtcataatcagggtgctgaaacataatgaaaaggtttaacttagtcacagtaaatattttatatccctgaaaataagttatttaatgagaatagaactatttaatgatccatgagtcctaaaaggatatctgccttgtattgccaagtttaaggcaaaggtgagatcctgtattaataagaagacagcttttttgtttgacattggtaagtaccaagaattctaactcacatatagtaggaaacaacaaaaagtctccactgacttctttgaattagatactgagaatccacaatacagtagtgtggataactttcaagaagccattggaaacatctccacattctgggatgacttgtaaatgtctacagagtaatggaaggaaaggcttccttgtctgctcattgctgccacctgggttgggaaaataattgaagatgttttctcaagtccttcaagaatctcttcttaatgttcagaatagtttaagagcgttgttgaggtaaagtgatagctgattattttctgagatttagatctaaacaaactcagcatgacgaggaagcacacttcacagctccagggtgcaatactgatgtaaagttgcctcgtgaggatacatttttcgctcatgtatgcaaaattcctatcagttcatttgcacagccagttccaatcatgtatgtgatcaccagattaaaagcttcatccagaaagacaagactcctcagaacgaatagtagacaagtaagactgctacccacagaagccagtacgcttcaggtgtgaggcggggtaactactcatctcttcacagagccaaggaaagaaaaagaacgtctctaacatgatttaccattttaaacagccttataagttttgtctcttaaaatcatgctgcagaaggagggggtaaaagtcgtgttctgccctgtctgtggcattggagtgccccgctaggtaagaagcaatgcttagatcttgcttccaggcagcagcttgaattcccgaatcttcctgcaaggtgcatacaaatgcagcgtgagaatccatacacgtaatccatattcaccttcccatccatcccgcagaagaggcatggtgacacccaggctactgtccatgcttgagaggacgtatttgaaggttctgttactacaagttgggaatattcacggacatgcctgaataccccggctgtaactcacacgtggtctgtgtaagtggattaacctcggggcggccttgtttaatcctgaataatatctgaaagactgagtttacttgggaatgtgtagtttttctaatgcacattaaaatttattttagctgttaaaaataaaatcattttattatcagca

SEQ ID NO: 101946 - DNA, 3532 bp, Homo sapiens
gacctcccctggggtggcagaagcgctcgcctgttcacagccaacggagggctgacattcacgtttcattctgccacactcgggaacggtgatcggggaagcatggggatccgggagaagcacccacaaaactagcatcctcctggaggagctcgggaataggatgagtgataatccacccagaatggaagtgtgtccttactgtaagaagccatttaaacgattaaaatcccacttgccatactgtaagatgataggaccaaccatacctactgatcaaaaagtttatcagtccaagccagctacactcccacgtgctaaaaagatgaaaggaccaatcaaagatttaattaaagctaaagggaaagagttagagacagagaatgaagaaagaaattctaagttggtggtggacaaaccagaacagacagtgaagacctttccactgccagctgttggtttggaaagagcagctactacaaaggcagataaagacatcaagaatccaatccaaccatccttcaaaatgttaaaaaatactaaaccaatgactactttccaagaagaaaccaaggctcagttttacgcatcagagaaaacctctcctaaaagagaacttgccaaagatttgcctaaatcaggagaaagtcgatgtaatccttcagaagctggagcgtctttactggttggctcaatagaaccttctttgtcaaatcaagatagaaaatattcctcaactctacctaatgatgtacaaactacctctggtgatctcaaattggacaaaattgatccccaaagacaggaacttctagtaaaattactagatgtgcctactggtgattgtcatatttctccaaagaatgtcagtgatggggttaaaagggtaagaacattattaagcaatgagagagattccaaaggcagggatcacctctcaggagtccctactgatgttacagttactgagactccagaaaagaacacagaatccctcattttaagccttaaaatgagctcattaggtaaaatccaagtcatggagaaacaagagaaaggacttaccctgggagtagagacgtgtgggagcaaaggaaatgcagagaaaagtatgtctgcaacagaaaagcaggaacggactgtcatgagccatggctgtgagaacttcaacaccagggattcagtcacaggaaaggagtctcaaggggaaagaccacatttaagtttgttcattccgagggagacgacttaccagtttcattctgtatcgcagtcaagtagtcaaagtcttgcctctctagctacaacatttcttcaagaaaagaaagcagaagcccagaatcataattgtgtccctgatgtaaaggcattaatggagagtcccgagggacagttatctctggagcccaaatctgatagtcagttccaagcatcacacactgggtgccagagccctttatgttcagcccagcgtcacactcctcagagccccttcaccaatcatgctgcagctgctggcaggaagactcttcgcagctgcatggggctggagtggtttccagagctctatcctggttaccttggactaggggtgttgccagggaagcctcagtgttggaatgcaatgacccagaagccacaacttatcagtccccagggggaaagactctcgcaagtttctttgttggaacgaagctcaactcatataaggagtttggaaccccctaccggacttacaacctccaacttctctctaatgaggctcttgggagctgtacaaaaaggctggatcaggtgcaacaccaccataaggaagagtggattcggtggcatcacgatgctcttcacaggatacttcgtcctgtgttgtagctggagtttcagacgtctgaaaaaattgtgccgacccctgccctggaagagcacagtacctccatgcattggtgtggcgaagacgactggggattgccgctctaaaacatgtttggattaggaagcacgtttaagtaggagaagccttcgtgacttctctctagtgccttcgtgccctgtgttgcccactgaattgccctgtaacacctaagtgtagtggtagcattaagggatagcttttcagccctcaaggttatcaggagcatttgtatcactgctataaataaagtagtatcacttgtcataatcagggtgctgaaacataatgaaaaggtttaacttagtcacagtaaatattttatatccctgaaaataagttatttaatgagaatagaactatttaatgatccatgagtcctaaaaggatatctgccttgtattgccaagtttaaggcaaaggtgagatcctgtattaataagaagacagcttttttgtttgacattggtaagtaccaagaattctaactcacatatagtaggaaacaacaaaaagtctccactgacttctttgaattagatactgagaatccacaatacagtagtgtggataactttcaagaagccattggaaacatctccacattctgggatgacttgtaaatgtctacagagtaatggaaggaaaggcttccttgtctgctcattgctgccacctgggttgggaaaataattgaagatgttttctcaagtccttcaagaatctcttcttaatgttcagaatagtttaagagcgttgttgaggtaaagtgatagctgattattttctgagatttagatctaaacaaactcagcatgacgaggaagcacacttcacagctccagggtgcaatactgatgtaaagttgcctcgtgaggatacatttttcgctcatgtatgcaaaattcctatcagttcatttgcacagccagttccaatcatgtatgtgatcaccagattaaaagcttcatccagaaagacaagactcctcagaacgaatagtagacaagtaagactgctacccacagaagccagtacgcttcaggtgtgaggcggggtaactactcatctcttcacagagccaaggaaagaaaaagaacgtctctaacatgatttaccattttaaacagccttataagttttgtctcttaaaatcatgctgcagaaggagggggtaaaagtcgtgttctgccctgtctgtggcattggagtgccccgctaggtaagaagcaatgcttagatcttgcttccaggcagcagcttgaattcccgaatcttcctgcaaggtgcatacaaatgcagcgtgagaatccatacacgtaatccatattcaccttcccatccatcccgcagaagaggcatggtgacacccaggctactgtccatgcttgagaggacgtatttgaaggttctgttactacaagttgggaatattcacggacatgcctgaataccccggctgtaactcacacgtggtctgtgtaagtggattaacctcggggcggccttgtttaatcctgaataatatctgaaagactgagtttacttgggaatgtgtagtttttctaatgcacattaaaatttattttagctgttaaaaataaaatcattttattatcagca

SEQ ID NO: 101947 - DNA, 3531 bp, Homo sapiens
ccgaagaacatattggctaagatcaggctggtggaaatcggacgaggcggctgacattcacgtttcattctgccacactcgggaacggtgatcggggaagcatggggatccgggagaagcacccacaaaactagcatcctcctggaggagctcgggaataggatgagtgataatccacccagaatggaagtgtgtccttactgtaagaagccatttaaacgattaaaatcccacttgccatactgtaagatgataggaccaaccatacctactgatcaaaaagtttatcagtccaagccagctacactcccacgtgctaaaaagatgaaaggaccaatcaaagatttaattaaagctaaagggaaagagttagagacagagaatgaagaaagaaattctaagttggtggtggacaaaccagaacagacagtgaagacctttccactgccagctgttggtttggaaagagcagctactacaaaggcagataaagacatcaagaatccaatccaaccatccttcaaaatgttaaaaaatactaaaccaatgactactttccaagaagaaaccaaggctcagttttacgcatcagagaaaacctctcctaaaagagaacttgccaaagatttgcctaaatcaggagaaagtcgatgtaatccttcagaagctggagcgtctttactggttggctcaatagaaccttctttgtcaaatcaagatagaaaatattcctcaactctacctaatgatgtacaaactacctctggtgatctcaaattggacaaaattgatccccaaagacaggaacttctagtaaaattactagatgtgcctactggtgattgtcatatttctccaaagaatgtcagtgatggggttaaaagggtaagaacattattaagcaatgagagagattccaaaggcagggatcacctctcaggagtccctactgatgttacagttactgagactccagaaaagaacacagaatccctcattttaagccttaaaatgagctcattaggtaaaatccaagtcatggagaaacaagagaaaggacttaccctgggagtagagacgtgtgggagcaaaggaaatgcagagaaaagtatgtctgcaacagaaaagcaggaacggactgtcatgagccatggctgtgagaacttcaacaccagggattcagtcacaggaaaggagtctcaaggggaaagaccacatttaagtttgttcattccgagggagacgacttaccagtttcattctgtatcgcagtcaagtagtcaaagtcttgcctctctagctacaacatttcttcaagaaaagaaagcagaagcccagaatcataattgtgtccctgatgtaaaggcattaatggagagtcccgagggacagttatctctggagcccaaatctgatagtcagttccaagcatcacacactgggtgccagagccctttatgttcagcccagcgtcacactcctcagagccccttcaccaatcatgctgcagctgctggcaggaagactcttcgcagctgcatggggctggagtggtttccagagctctatcctggttaccttggactaggggtgttgccagggaagcctcagtgttggaatgcaatgacccagaagccacaacttatcagtccccagggggaaagactctcgcaagtttctttgttggaacgaagctcaactcatataaggagtttggaaccccctaccggacttacaacctccaacttctctctaatgaggctcttgggagctgtacaaaaaggctggatcaggtgcaacaccaccataaggaagagtggattcggtggcatcacgatgctcttcacaggatacttcgtcctgtgttgtagctggagtttcagacgtctgaaaaaattgtgccgacccctgccctggaagagcacagtacctccatgcattggtgtggcgaagacgactggggattgccgctctaaaacatgtttggattaggaagcacgtttaagtaggagaagccttcgtgacttctctctagtgccttcgtgccctgtgttgcccactgaattgccctgtaacacctaagtgtagtggtagcattaagggatagcttttcagccctcaaggttatcaggagcatttgtatcactgctataaataaagtagtatcacttgtcataatcagggtgctgaaacataatgaaaaggtttaacttagtcacagtaaatattttatatccctgaaaataagttatttaatgagaatagaactatttaatgatccatgagtcctaaaaggatatctgccttgtattgccaagtttaaggcaaaggtgagatcctgtattaataagaagacagcttttttgtttgacattggtaagtaccaagaattctaactcacatatagtaggaaacaacaaaaagtctccactgacttctttgaattagatactgagaatccacaatacagtagtgtggataactttcaagaagccattggaaacatctccacattctgggatgacttgtaaatgtctacagagtaatggaaggaaaggcttccttgtctgctcattgctgccacctgggttgggaaaataattgaagatgttttctcaagtccttcaagaatctcttcttaatgttcagaatagtttaagagcgttgttgaggtaaagtgatagctgattattttctgagatttagatctaaacaaactcagcatgacgaggaagcacacttcacagctccagggtgcaatactgatgtaaagttgcctcgtgaggatacatttttcgctcatgtatgcaaaattcctatcagttcatttgcacagccagttccaatcatgtatgtgatcaccagattaaaagcttcatccagaaagacaagactcctcagaacgaatagtagacaagtaagactgctacccacagaagccagtacgcttcaggtgtgaggcggggtaactactcatctcttcacagagccaaggaaagaaaaagaacgtctctaacatgatttaccattttaaacagccttataagttttgtctcttaaaatcatgctgcagaaggagggggtaaaagtcgtgttctgccctgtctgtggcattggagtgccccgctaggtaagaagcaatgcttagatcttgcttccaggcagcagcttgaattcccgaatcttcctgcaaggtgcatacaaatgcagcgtgagaatccatacacgtaatccatattcaccttcccatccatcccgcagaagaggcatggtgacacccaggctactgtccatgcttgagaggacgtatttgaaggttctgttactacaagttgggaatattcacggacatgcctgaataccccggctgtaactcacacgtggtctgtgtaagtggattaacctcggggcggccttgtttaatcctgaataatatctgaaagactgagtttacttgggaatgtgtagtttttctaatgcacattaaaatttattttagctgttaaaaataaaatcattttattatcagca

SEQ ID NO: 101948 - DNA, 3437 bp, Homo sapiens
ggcctggggggcttccctggggggcttgtcgccggggccgcctgggctttcaggtcttccgaggctgacattcacgtttcattctgccacactcgggaacggtgatcggggaagcatggggatccgggagaagcacccacaaaactagcatcctcctggaggagctcgggaataggatgagtgataatccacccagaatggaagtgtgtccttactgtaagaagccatttaaacgattaaaatcccacttgccatactgtaagatgataggaccaaccatacctactgatcaaaaagtttatcagtccaagccagctacactcccacgtgctaaaaagatgaaaggaccaatcaaagatttaattaaagctaaagggaaagagttagagacagagaatgaagaaagaaattctaagttggtggtggacaaaccagaacagacagtgaagacctttccactgccagctgttggtttggaaagagcagctactacaaaggcagataaagacatcaagaatccaatccaaccatccttcaaaatgttaaaaaatactaaaccaatgactactttccaagaagaaaccaaggctcagttttacgcatcagagaaaacctctcctaaaagagaacttgccaaagatttgcctaaatcaggagaaagtcgatgtaatccttcagaagctggagcgtctttactggttggctcaatagaaccttctttgtcaaatcaagatagaaaatattcctcaactctacctaatgatgtacaaactacctctggtgatctcaaattggacaaaattgatccccaaagacaggaacttctagtaaaattactagatgtgcctactggtgattgtcatatttctccaaagaatgtcagtgatggggttaaaagggtaagaacattattaagcaatgagagagattccaaaggcagggatcacctctcaggagtccctactgatgttacagttactgagactccagaaaagaacacagaatccctcattttaagccttaaaatgagctcattaggtaaaatccaagtcatggagaaacaagagaaaggacttaccctgggagtagagacgtgtgggagcaaaggaaatgcagagaaaagtatgtctgcaacagaaaagcaggaacggactgtcatgagccatggctgtgagaacttcaacaccagggattcagtcacaggaaaggagtctcaaggggaaagaccacatttaagtttgttcattccgagggagacgacttaccagtttcattctgtatcgcagtcaagtagtcaaagtcttgcctctctagctacaacatttcttcaagaaaagaaagcagaagcccagaatcataattgtgtccctgatgtaaaggcattaatggagagtcccgagggacagttatctctggagcccaaatctgatagtcagttccaagcatcacacactgggtgccagagccctttatgttcagcccagcgtcacactcctcagagccccttcaccaatcatgctgcagctgctggcaggaagactcttcgcagctgcatggggctggagtggtttccagagctctatcctggttaccttggactaggggtgttgccagggaagcctcagtgttggaatgcaatgacccagaagccacaacttatcagtccccagggggaaagactctcgcaaggctggatcaggtgcaacaccaccataaggaagagtggattcggtggcatcacgatgctcttcacaggatacttcgtcctgtgttgtagctggagtttcagacgtctgaaaaaattgtgccgacccctgccctggaagagcacagtacctccatgcattggtgtggcgaagacgactggggattgccgctctaaaacatgtttggattaggaagcacgtttaagtaggagaagccttcgtgacttctctctagtgccttcgtgccctgtgttgcccactgaattgccctgtaacacctaagtgtagtggtagcattaagggatagcttttcagccctcaaggttatcaggagcatttgtatcactgctataaataaagtagtatcacttgtcataatcagggtgctgaaacataatgaaaaggtttaacttagtcacagtaaatattttatatccctgaaaataagttatttaatgagaatagaactatttaatgatccatgagtcctaaaaggatatctgccttgtattgccaagtttaaggcaaaggtgagatcctgtattaataagaagacagcttttttgtttgacattggtaagtaccaagaattctaactcacatatagtaggaaacaacaaaaagtctccactgacttctttgaattagatactgagaatccacaatacagtagtgtggataactttcaagaagccattggaaacatctccacattctgggatgacttgtaaatgtctacagagtaatggaaggaaaggcttccttgtctgctcattgctgccacctgggttgggaaaataattgaagatgttttctcaagtccttcaagaatctcttcttaatgttcagaatagtttaagagcgttgttgaggtaaagtgatagctgattattttctgagatttagatctaaacaaactcagcatgacgaggaagcacacttcacagctccagggtgcaatactgatgtaaagttgcctcgtgaggatacatttttcgctcatgtatgcaaaattcctatcagttcatttgcacagccagttccaatcatgtatgtgatcaccagattaaaagcttcatccagaaagacaagactcctcagaacgaatagtagacaagtaagactgctacccacagaagccagtacgcttcaggtgtgaggcggggtaactactcatctcttcacagagccaaggaaagaaaaagaacgtctctaacatgatttaccattttaaacagccttataagttttgtctcttaaaatcatgctgcagaaggagggggtaaaagtcgtgttctgccctgtctgtggcattggagtgccccgctaggtaagaagcaatgcttagatcttgcttccaggcagcagcttgaattcccgaatcttcctgcaaggtgcatacaaatgcagcgtgagaatccatacacgtaatccatattcaccttcccatccatcccgcagaagaggcatggtgacacccaggctactgtccatgcttgagaggacgtatttgaaggttctgttactacaagttgggaatattcacggacatgcctgaataccccggctgtaactcacacgtggtctgtgtaagtggattaacctcggggcggccttgtttaatcctgaataatatctgaaagactgagtttacttgggaatgtgtagtttttctaatgcacattaaaatttattttagctgttaaaaataaaatcattttattatcagca

SEQ ID NO: 101949 - DNA, 3491 bp, Homo sapiens
ggcctggggggcttccctggggggcttgtcgccggggccgcctgggctttcaggtcttccgaggctgacattcacgtttcattctgccacactcgggaacggtgatcggggaagcatggggatccgggagaagcacccacaaaactagcatcctcctggaggagctcgggaataggatgagtgataatccacccagaatggaagtgtgtccttactgtaagaagccatttaaacgattaaaatcccacttgccatactgtaagatgataggaccaaccatacctactgatcaaaaagtttatcagtccaagccagctacactcccacgtgctaaaaagatgaaaggaccaatcaaagatttaattaaagctaaagggaaagagttagagacagagaatgaagaaagaaattctaagttggtggtggacaaaccagaacagacagtgaagacctttccactgccagctgttggtttggaaagagcagctactacaaaggcagataaagacatcaagaatccaatccaaccatccttcaaaatgttaaaaaatactaaaccaatgactactttccaagaagaaaccaaggctcagttttacgcatcagagaaaacctctcctaaaagagaacttgccaaagatttgcctaaatcaggagaaagtcgatgtaatccttcagaagctggagcgtctttactggttggctcaatagaaccttctttgtcaaatcaagatagaaaatattcctcaactctacctaatgatgtacaaactacctctggtgatctcaaattggacaaaattgatccccaaagacaggaacttctagtaaaattactagatgtgcctactggtgattgtcatatttctccaaagaatgtcagtgatggggttaaaagggtaagaacattattaagcaatgagagagattccaaaggcagggatcacctctcaggagtccctactgatgttacagttactgagactccagaaaagaacacagaatccctcattttaagccttaaaatgagctcattaggtaaaatccaagtcatggagaaacaagagaaaggacttaccctgggagtagagacgtgtgggagcaaaggaaatgcagagaaaagtatgtctgcaacagaaaagcaggaacggactgtcatgagccatggctgtgagaacttcaacaccagggattcagtcacaggaaaggagtctcaaggggaaagaccacatttaagtttgttcattccgagggagacgacttaccagtttcattctgtatcgcagtcaagtagtcaaagtcttgcctctctagctacaacatttcttcaagtggagagtcccgagggacagttatctctggagcccaaatctgatagtcagttccaagcatcacacactgggtgccagagccctttatgttcagcccagcgtcacactcctcagagccccttcaccaatcatgctgcagctgctggcaggaagactcttcgcagctgcatggggctggagtggtttccagagctctatcctggttaccttggactaggggtgttgccagggaagcctcagtgttggaatgcaatgacccagaagccacaacttatcagtccccagggggaaagactctcgcaagtttctttgttggaacgaagctcaactcatataaggagtttggaaccccctaccggacttacaacctccaacttctctctaatgaggctcttgggagctgtacaaaaaggctggatcaggtgcaacaccaccataaggaagagtggattcggtggcatcacgatgctcttcacaggatacttcgtcctgtgttgtagctggagtttcagacgtctgaaaaaattgtgccgacccctgccctggaagagcacagtacctccatgcattggtgtggcgaagacgactggggattgccgctctaaaacatgtttggattaggaagcacgtttaagtaggagaagccttcgtgacttctctctagtgccttcgtgccctgtgttgcccactgaattgccctgtaacacctaagtgtagtggtagcattaagggatagcttttcagccctcaaggttatcaggagcatttgtatcactgctataaataaagtagtatcacttgtcataatcagggtgctgaaacataatgaaaaggtttaacttagtcacagtaaatattttatatccctgaaaataagttatttaatgagaatagaactatttaatgatccatgagtcctaaaaggatatctgccttgtattgccaagtttaaggcaaaggtgagatcctgtattaataagaagacagcttttttgtttgacattggtaagtaccaagaattctaactcacatatagtaggaaacaacaaaaagtctccactgacttctttgaattagatactgagaatccacaatacagtagtgtggataactttcaagaagccattggaaacatctccacattctgggatgacttgtaaatgtctacagagtaatggaaggaaaggcttccttgtctgctcattgctgccacctgggttgggaaaataattgaagatgttttctcaagtccttcaagaatctcttcttaatgttcagaatagtttaagagcgttgttgaggtaaagtgatagctgattattttctgagatttagatctaaacaaactcagcatgacgaggaagcacacttcacagctccagggtgcaatactgatgtaaagttgcctcgtgaggatacatttttcgctcatgtatgcaaaattcctatcagttcatttgcacagccagttccaatcatgtatgtgatcaccagattaaaagcttcatccagaaagacaagactcctcagaacgaatagtagacaagtaagactgctacccacagaagccagtacgcttcaggtgtgaggcggggtaactactcatctcttcacagagccaaggaaagaaaaagaacgtctctaacatgatttaccattttaaacagccttataagttttgtctcttaaaatcatgctgcagaaggagggggtaaaagtcgtgttctgccctgtctgtggcattggagtgccccgctaggtaagaagcaatgcttagatcttgcttccaggcagcagcttgaattcccgaatcttcctgcaaggtgcatacaaatgcagcgtgagaatccatacacgtaatccatattcaccttcccatccatcccgcagaagaggcatggtgacacccaggctactgtccatgcttgagaggacgtatttgaaggttctgttactacaagttgggaatattcacggacatgcctgaataccccggctgtaactcacacgtggtctgtgtaagtggattaacctcggggcggccttgtttaatcctgaataatatctgaaagactgagtttacttgggaatgtgtagtttttctaatgcacattaaaatttattttagctgttaaaaataaaatcattttattatcagca

SEQ ID NO: 101950 - DNA, 3653 bp, Homo sapiens
ggcctggggggcttccctggggggcttgtcgccggggccgcctgggctttcaggtcttccgaggctgacattcacgtttcattctgccacactcgggaacggtgatcggggaagcatggggatccgggagaagcacccacaaaactagcatcctcctggaggagctcgggaataggatgagtgataatccacccagaatggaagtgtgtccttactgtaagaagccatttaaacgattaaaatcccacttgccatactgtaagatgataggaccaaccatacctactgatcaaaaagtttatcagtccaagccagctacactcccacgtgctaaaaagatgaaaggaccaatcaaagatttaattaaagctaaagggaaagagttagagacagagaatgaagaaagaaattctaagttggtggtggacaaaccagaacagacagtgaagacctttccactgccagctgttggtttggaaagagcagctactacaaaggcagataaagacatcaagaatccaatccaaccatccttcaaaatgttaaaaaatactaaaccaatgactactttccaagaagaaaccaaggctcagttttacgcatcagagaaaacctctcctaaaagagaacttgccaaagatttgcctaaatcaggagaaagtcgatgtaatccttcagaagctggagcgtctttactggttggctcaatagaaccttctttgtcaaatcaagatagaaaatattcctcaactctacctaatgatgtacaaactacctctggtgatctcaaattggacaaaattgatccccaaagacaggaacttctagtaaaattactagatgtgcctactggtgattgtcatatttctccaaagaatgtcagtgatggggttaaaagggtaagaacattattaagcaatgagagagattccaaaggcagggatcacctctcaggagtccctactgatgttacagttactgagactccagaaaagaacacagaatccctcattttaagccttaaaatgagctcattaggtaaaatccaagtcatggagaaacaagagaaaggacttaccctgggagtagagacgtgtgggagcaaaggaaatgcagagaaaagtatgtctgcaacagaaaagcaggaacggactgtcatgagccatggctgtgagaacttcaacaccagggattcagtcacaggaaaggagtctcaaggggaaagaccacatttaagtttgttcattccgagggagacgacttaccagtttcattctgtatcgcagtcaagtagtcaaagtcttgcctctctagctacaacatttcttcaagaaaagaaagcagaagcccagaatcataattgtgtccctgatgtaaaggcattaatggagagtcccgagggacagttatctctggagcccaaatctgatagtcagttccaagcatcacacactgggtgccagagccctttatgttcagcccagcgtcacactcctcagagccccttcaccaatcatgctgcagctgctggcaggaagactcttcgcagctgcatggggctggagtggtttccagagctctatcctggttaccttggactaggggtgttgccagggaagcctcagtgttggaatgcaatgacccagaagccacaacttatcagtccccagggggaaagactctcgcaagtttctttgttggaacgaagctcaactcatataaggagtttggaaccccctaccggacttacaacctccaacttctctctaatgaggctcttgggagctgtacaaaaaggctggatcaggtgcaacaccaccataaggaagagtggattcggtggcatcacgatgctcttcacaggatacttcgtcctgtgttgtagctggagtttcagacgtctgaaaaaattgtgccgacccctgccctggaagagcacagtacctccatgcattggtgtggcgaagacgactggggattgccgctctaaaacatgtttggattaggaagcacgtttaagtaggagaagccttcgtgacttctctctagtgccttcgtgccctgtgttgcccactgaattgccctgtaacacctaagtgtagtggtagcattaagggatagcttttcagccctcaaggttatcaggagcatttgtatcactgctataaataaagtagtatcacttgtcataatcagggtgctgaaacataatgaaaaggtttaacttagtcacagtaaatattttatatccctgaaaataagttatttaatgagaatagaactatttaatgatccatgagtcctaaaaggatatctgccttgtattgccaagtttaaggcaaaggtgagatcctgtattaataagaagacagcttttttgtttgacattggtaagtaccaagaattctaactcacatatagtaggaaacaacaaaaagtctccactgacttctttgaattagatactgagaatccacaatacagtagtgtggataactttcaagaagccattggaaacatctccacattctgggatgacttgtaaatgtctacagagtaatggaaggaaaggcttccttgtctgctcattgctgccacctgggttgggaaaataattgaagatgttttctcaagtccttcaagaatctcttcttaatgttcagaatagtttaagagcgttgttgaggtaaagtgatagctgattattttctgagatttagatctaaacaaactcagcatgacgaggaagcacacttcacagctccagggtgcaatactgatgtaaagttgcctcgtgaggatacatttttcgctcatgtatgcaaaattcctatcagttcatttgcacagccagttccaatcatgtatgtgatcaccagattaaaagcttcatccagaaagacaagactcctcagaacgaatagtagacaagtaagactgctacccacagaagccagtacgcttcaggtgtgaggcggggtaactactcatctcttcacagagccaaggaaagaaaaagaacgtctctaacatgatttaccattttaaacagccttataagttttgtctcttaaaatcatgctgcagaaggagggggtaaaagtcgtgttctgccctgtctgtggcattggagtgccccgctaggtaagaagcaatgcttagatcttgcttccaggcagcagcttgaattcccgaatcttcctgcaaggtgcatacaaatgcagcgtgagaatccatacacgtaatccatattcaccttcccatccatcccgcagaagaggcatggtgacacccaggctactgtccatgcttgagaggacgtatttgaaggttctgttactacaagttgggaatattcacggacatgcctgaataccccggctgtaactcacacgtggtctgtgtaagtggattaacctcggggcgacactccgatggctcagggatggtaacactgtacagggagaactcacagctccaagagcttccctccaaattatgatgaagttcctgtaaataactagatttcctacagcctggtcctctgcccatgggaaggaggggaaatggatgtgaaaagcaatgtggtctgccctcctgtcattcatagatccagttctgagcacagctcgtgtaatctaccagttcctcag

SEQ ID NO: 101951 - DNA, 2011 bp, Homo sapiens
ccgaagaacatattggctaagatcaggctggtggaaatcggacgaggcggctgacattcacgtttcattctgccacactcgggaacggtgatcggggaagcatggggatccgggagaagcacccacaaaactagcatcctcctggaggagctcggtttctttgttggaacgaagctcaactcatataaggagtttggaaccccctaccggacttacaacctccaacttctctctaatgaggctcttgggagctgtacaaaaaggctggatcaggtgcaacaccaccataaggaagagtggattcggtggcatcacgatgctcttcacaggatacttcgtcctgtgttgtagctggagtttcagacgtctgaaaaaattgtgccgacccctgccctggaagagcacagtacctccatgcattggtgtggcgaagacgactggggattgccgctctaaaacatgtttggattaggaagcacgtttaagtaggagaagccttcgtgacttctctctagtgccttcgtgccctgtgttgcccactgaattgccctgtaacacctaagtgtagtggtagcattaagggatagcttttcagccctcaaggttatcaggagcatttgtatcactgctataaataaagtagtatcacttgtcataatcagggtgctgaaacataatgaaaaggtttaacttagtcacagtaaatattttatatccctgaaaataagttatttaatgagaatagaactatttaatgatccatgagtcctaaaaggatatctgccttgtattgccaagtttaaggcaaaggtgagatcctgtattaataagaagacagcttttttgtttgacattggtaagtaccaagaattctaactcacatatagtaggaaacaacaaaaagtctccactgacttctttgaattagatactgagaatccacaatacagtagtgtggataactttcaagaagccattggaaacatctccacattctgggatgacttgtaaatgtctacagagtaatggaaggaaaggcttccttgtctgctcattgctgccacctgggttgggaaaataattgaagatgttttctcaagtccttcaagaatctcttcttaatgttcagaatagtttaagagcgttgttgaggtaaagtgatagctgattattttctgagatttagatctaaacaaactcagcatgacgaggaagcacacttcacagctccagggtgcaatactgatgtaaagttgcctcgtgaggatacatttttcgctcatgtatgcaaaattcctatcagttcatttgcacagccagttccaatcatgtatgtgatcaccagattaaaagcttcatccagaaagacaagactcctcagaacgaatagtagacaagtaagactgctacccacagaagccagtacgcttcaggtgtgaggcggggtaactactcatctcttcacagagccaaggaaagaaaaagaacgtctctaacatgatttaccattttaaacagccttataagttttgtctcttaaaatcatgctgcagaaggagggggtaaaagtcgtgttctgccctgtctgtggcattggagtgccccgctaggtaagaagcaatgcttagatcttgcttccaggcagcagcttgaattcccgaatcttcctgcaaggtgcatacaaatgcagcgtgagaatccatacacgtaatccatattcaccttcccatccatcccgcagaagaggcatggtgacacccaggctactgtccatgcttgagaggacgtatttgaaggttctgttactacaagttgggaatattcacggacatgcctgaataccccggctgtaactcacacgtggtctgtgtaagtggattaacctcggggcggccttgtttaatcctgaataatatctgaaagactgagtttacttgggaatgtgtagtttttctaatgcacattaaaatttattttagctgttaaaaataaaatcattttattatcagca

SEQ ID NO: 101952 - DNA, 656 bp, Homo sapiens
ccgaagaacatattggctaagatcaggctggtggaaatcggacgaggcggctgacattcacgtttcattctgccacactcgggaacggtgatcggggaagcatggggatccgggagaagcacccacaaaactagcatcctcctggaggagctcggtttctttgttggaacgaagctcaactcatataaggagtttggaaccccctaccggacttacaacctccaacttctctctaatgaggctcttgggagctgtacaaaaaggctggatcaggtgcaacaccaccataaggaagagtggattcggtggcatcacgatgctcttcacaggatacttcgtcctgtgttgtagctggagtttcagacgtctgaaaaaattgtgccgacccctgccctggaagagcacagtacctccatgcattggtgtggcgaagacgactggggattgccgctctaaaacatgtttggattaggaagcacgtttaagtaggagaagccttcgtgacttctctctagtgccttcgtgccctgtgttgcccactgaattgccctgtaacacctaagtgtagtggtagcattaagggatagcttttcagccctcaaggttatcaggagcatttgtatcactgctataaataaagtagtatcacttgtcat

SEQ ID NO: 101953 - DNA, 473 bp, Homo sapiens
ccgaagaacatattggctaagatcaggctggtggaaatcggacgaggcggctgacattcacgtttcattctgccacactcgggaacggtgatcggggaagcatggggatccgggagaagcacccacaaaactagcatcctcctggaggagctcgggaataggatgagtgataatccacccagaatggaagtgtgtccttactgtaagaagccatttaaaaccggaatttaaaaatccccaacctgtggccatacctgtaagaatgattggacccaacacattacccttacctggattccaaaaaagttttattcaggtcccaaaggcccaggcttaccaactcccccacggttggcttaaaaaaaaggaatggaacaggggacccaaattccacaaaggaattttttaattttaaaaaggccttaaagggggacacgaggttagagaccagagaatgaagaaagacattctag

SEQ ID NO: 101954 - DNA, 3632 bp, Homo sapiens
ggcctggggggcttccctggggggcttgtcgccggggccgcctgggctttcaggtcttccgaggctgacattcacgtttcattctgccacactcgggaacggtgatcggggaagcatggggatccgggagaagcacccacaaaactagcatcctcctggaggagctcgggaataggatgagtgataatccacccagaatggaagtgtgtccttactgtaagaagccatttaaacgattaaaatcccacttgccatactgtaagatgataggaccaaccatacctactgatcaaaaagtttatcagtccaagccagctacactcccacgtgctaaaaagatgaaaggaccaatcaaagatttaattaaagctaaagggaaagagttagagacagagaatgaagaaagaaattctaagttggtggtggacaaaccagaacagacagtgaagacctttccactgccagctgttggtttggaaagagcagctactacaaaggcagataaagacatcaagaatccaatccaaccatccttcaaaatgttaaaaaatactaaaccaatgactactttccaagaagaaaccaaggctcagttttacgcatcagagaaaacctctcctaaaagagaacttgccaaagatttgcctaaatcaggagaaagtcgatgtaatccttcagaagctggagcgtctttactggttggctcaatagaaccttctttgtcaaatcaagatagaaaatattcctcaactctacctaatgatgtacaaactacctctggtgatctcaaattggacaaaattgatccccaaagacaggaacttctagtaaaattactagatgtgcctactggtgattgtcatatttctccaaagaatgtcagtgatggggttaaaagggtaagaacattattaagcaatgagagagattccaaaggcagggatcacctctcaggagtccctactgatgttacagttactgagactccagaaaagaacacagaatccctcattttaagccttaaaatgagctcattaggtaaaatccaagtcatggagaaacaagagaaaggacttaccctgggagtagagacgtgtgggagcaaaggaaatgcagagaaaagtatgtctgcaacagaaaagcaggaacggactgtcatgagccatggctgtgagaacttcaacaccagggattcagtcacaggaaaggagtctcaaggggaaagaccacatttaagtttgttcattccgagggagacgacttaccagtttcattctgtatcgcagtcaagtagtcaaagtcttgcctctctagctacaacatttcttcaagaaaagaaagcagaagcccagaatcataattgtgtccctgatgtaaaggcattaatggagagtcccgagggacagttatctctggagcccaaatctgatagtcagttccaagcatcacacactgggtgccagagccctttatgttcagcccagcgtcacactcctcagagccccttcaccaatcatgctgcagctgctggcaggaagactcttcgcagctgcatggggctggagtggtttccagagctctatcctggttaccttggactaggggtgttgccagggaagcctcagtgttggaatgcaatgacccagaagccacaacttatcagtccccagggggaaagactctcgcaagtttctttgttggaacgaagctcaactcatataaggagtttggaaccccctaccggacttacaacctccaacttctctctaatgaggctcttgggagctgtacaaaaaggctggatcaggtgcaacaccaccataaggaagagtggattcggtggcatcacgatgctcttcacaggatacttcgtcctgtgttgtagctggagtttcagacgtctgaaaaaattgtgccgacccctgccctggaagagcacagtacctccatgcattggtgtggcgaagacgactggggattgccgctctaaaacatgtttggattaggaagcacgtttaagtaggagaagccttcgtgacttctctctagtgccttcgtgccctgtgttgcccactgaattgccctgtaacacctaagtgtagtggtagcattaagggatagcttttcagccctcaaggttatcaggagcatttgtatcactgctataaataaagtagtatcacttgtcataatcagggtgctgaaacataatgaaaaggtttaacttagtcacagtaaatattttatatccctgaaaataagttatttaatgagaatagaactatttaatgatccatgagtcctaaaaggatatctgccttgtattgccaagtttaaggcaaaggtgagatcctgtattaataagaagacagcttttttgtttgacattggtaagtaccaagaattctaactcacatatagtaggaaacaacaaaaagtctccactgacttctttgaattagatactgagaatccacaatacagtagtgtggataactttcaagaagccattggaaacatctccacattctgggatgacttgtaaatgtctacagagtaatggaaggaaaggcttccttgtctgctcattgctgccacctgggttgggaaaataattgaagatgttttctcaagtccttcaagaatctcttcttaatgttcagaatagtttaagagcgttgttgaggtaaagtgatagctgattattttctgagatttagatctaaacaaactcagcatgacgaggaagcacacttcacagctccagggtgcaatactgatgtaaagttgcctcgtgaggatacatttttcgctcatgtatgcaaaattcctatcagttcatttgcacagccagttccaatcatgtatgtgatcaccagattaaaagcttcatccagaaagacaagactcctcagaacgaatagtagacaagtaagactgctacccacagaagccagtacgcttcaggtgtgaggcggggtaactactcatctcttcacagagccaaggaaagaaaaagaacgtctctaacatgatttaccattttaaacagccttataagttttgtctcttaaaatcatgctgcagaaggagggggtaaaagtcgtgttctgccctgtctgtggcattggagtgccccgctaggtaagaagcaatgcttagatcttgcttccaggcagcagcttgaattcccgaatcttcctgcaaggtgcatacaaatgcagcgtgagaatccatacacgtaatccatattcaccttcccatccatcccgcagaagaggcatggtgacacccaggctactgtccatgcttgagaggacgtatttgaaggttctgttactacaagttgggaatattcacggacatgcctgaataccccggctgtaactcacacgtggtctgtgtaagtggattaacctcggggcggccttgtttaatcctgaataatatctgaaagactgagtttacttgggaatgtgtagtttttctaatgcacattaaaatttattttagctgttaaaaataaaatcattttattatcagcagactcttttatactttatggggcatctacatactacttccgccactcttcataataaaattatttgtaaaatataaaaaaaactccc

SEQ ID NO: 101955 - DNA, 357 bp, Homo sapiens
tctgggccataggttggcaaacttgtcttataaagggccagatggtaaatattttaggctttgcaggccatacggttgccgtcacaactactaactctaccattgtggtgtaaaaccagccatagacagtaagtaaaataaatgagcatggctgtgttccaataaaactttatttacaaaagtaggtggcaagatggatttgacctataggccataatctgccaacccctagtttaagcatttgctgtccacttcctaaaatgccagctccaggagagtaaggattttgtcttttttgttcaatactctctggagcaactactaatgtgcctggcacatggtaggcaatccataaat

SEQ ID NO: 101956 - DNA, 585 bp, Homo sapiens
  misc_feature (1)..(1): n is a, c, g, or t
  misc_feature (15)..(15): n is a, c, g, or t
  misc_feature (24)..(24): n is a, c, g, or t
nagtcatcccccagncaaacaggnttacggcccttcaaggcaacaagaggctccatccctcatgctcagctgcctctgcggccacggacttctgcccttcatctgctctctcttactctcctgagcctagcccgtccgtaagctccctcccctgcctggttcccagggcaggctgactcagttgactgcttggtccaagcctggccctggcacttgtcagggtcagcctaaggagatgggaataaagaggccagagagcaccaagtgagctcatgtttcaccagaggtggataaaaccaagttctgggctgggcccagtggctcacatctgtaattccagcactttgggaggccgaggcgggcagatcacaaagtcaggagtttgagaccaacctgaccaacatggagaaaccccatctctactaaaaatacaaaattagctggatgtggtggtgcgtgcctgtaatcccagctacttgggaggctgaggcaggagaattgcttgaatccaggaggcggagattgcagagagccaagatcatgccactgcactccagcctgggtgacagcaagactctgtcttgg

SEQ ID NO: 101957 - DNA, 2690 bp, Homo sapiens
gtgacgcgtgggtcgacccacgcgtccgctggaggttggtggatgggcggtgagcgcagcggcgtccgaggcaacaagatggcagctgcggagccgtctccgcggcgcgtgggcttcgtgggcgcgggccgcatggcgggggccatcgcgcagggcctcatcagagcaggaaaagtggaagctcagcacatactggccagtgcaccaacagacaggaacctatgtcactttcaagctctgggttgccggaccacgcactccaaccaggaggtgctgcagagctgcctgctcgtcatctttgccaccaagcctcatgtgctgccagctgtcctggcagaggtggctcctgtggtcaccactgaacacatcttggtgtccgtggctgctggggtgtctctgagcaccctggaggagctgctgcccccaaacacacgggtgctgcgggtcttgcccaacctgccctgtgtggtccaggaaggggccatagtgatggcgcggggccgccacgtggggagcagcgagaccaagctcctgcagcatctgctggaggcctgtgggcggtgtgaggaggtgcctgaagcctacgtcgacatccacactggcctcagtggcagtggcgtggccttcgtgtgtgcattctccgaggccctggctgaaggagccgtcaagatgggcatgcccagcagcctggcccaccgcatcgctgcccagaccctgctggggacggccaagatgctgctgcacgagggccaacacccagcccagctgcgctcagacgtgtgcaccccgggtggcaccaccatctatggactccacgccctggagcagggcgggctgcgagcagccaccatgagcgccgtggaggctgccacctgccgggccaaggagctcagcagaaagtaggctgggctctggccatcctttcctgcctctgtgcccctgcctctccctgtgtcccttcccctgaggactgcggctccctccctcctgcatgagggtctcctactgctccttctccccttgcacagggaaatgcagggggcaggacttgggaggttccagcaggcgggggagccccgaccagtggggacactcctccctccccagtgagcagaaggcaccgtggtggtggctctgccccttgctgcagtgagcccaccttgctgcaacattggttctgaggggcccaagagatggcgtcttggtcatttgcccgcatggttgggcagttggttgaggccatgaacagaacttacggtaacaggcacggctggcccaatgcctggtctggagctggagcttgcctttggctttccaggtggctccgtgcagctacagccaggccggctgcctcatctcagctctagggggcacgagccatatggggtctgcacaagagaccctctcccctgcagtaaagccaggggccctggcctgatggggcccccatggggagctggagcctgccctgcagcctggagaagagggtggctgtggtgggcgtgctcatcccctgctaaggagcaggagctgctgggccaggtctgcggcagtgctggggtggcaccaggtgggcagtggtaggtggggtggcttgaggtctgggagggtggccctggccagccaggacacatgcagacccctggctttagtctggatacaggctccctctttcctcccaatcctaagctcctgacaagtggccaggtggctctgggccctcctgccccgtgcctaggtcaggggtcctggaataccccgtagctctggcaccaccacactggcctctgatggcaagacttggcccctccacctgtccctaacggacggcaggtcaggaaagccaggactcaggggagaagcaaacccccaggattgaaggctagggttctagggcctttgggtggggagggcccgggccggacagcctcagctccgtcccctgccccacaagattcacctgggcctccagtcccacgctggccccaactgctgcagctctcggcttccgcccaacagcctctggaggtgaggcgggagcatgccctcagcgaggctgggcggcgggtcctgctgtgccatctccctgtgcgcctgagcagatcaatccaccagtgcaaaacagggctaacggcacctgcaggacagcagcacgctccatccctcatgctcagctgcctctgcggccacggacttctgcccttcatctgctctctcttactctcctgagcctagcccgtccgtaagctccctcccctgcctggttcccagggcaggctgactcagttgactgcttggtccaagcctggccctggcacttgtcagggtcagcctaaggagatgggaataaagaggccagagagcaccaagtgagctcatgtttcaccagaggtggataaaaccaagttctgggctgggcccagtggctcacatctgtaattccagcactttgggaggccgaggcgggcagatcacaaagtcaggagtttgagaccaacctgaccaacatggagaaaccccatctctactaaaaatacaaaattagctggatgtggtggtgcgtgcctgtaatcccagctacttgggaggctgaggcaggagaattgcttgaatccaggaggcggagattgcagagagccaagatcatgccactgcactccagcctgggtgacagcaagactctgtcttgg

SEQ ID NO: 101958 - DNA, 2368 bp, Homo sapiens
gtgacgcgtgggtcgacccacgcgtccgctggaggttggtggatgggcggtgagcgcagcggcgtccgaggcaacaagatggcagctgcggagccgtctccgcggcgcgtgggcttcgtgggcgcgggccgcatggcgggggccatcgcgcagggcctcatcagagcaggaaaagtggaagctcagcacatactggccagtgcaccaacagacaggaacctatgtcactttcaagctctgggttgccggaccacgcactccaaccaggaggtgctgcagagctgcctgctcgtcatctttgccaccaagcctcatgtgctgccagctgtcctggcagaggtggctcctgtggtcaccactgaacacatcttggtgtccgtggctgctggggtgtctctgagcaccctggaggagctgctgcccccaaacacacgggtgctgcgggtcttgcccaacctgccctgtgtggtccaggaaggggccatagtgatggcgcggggccgccacgtggggagcagcgagaccaagctcctgcagcatctgctggaggcctgtgggcggtgtgaggaggtgcctgaagcctacgtcgacatccacactggcctcagtggcagtggcgtggccttcgtgtgtgcattctccgaggccctggctgaaggagccgtcaagatgggcatgcccagcagcctggcccaccgcatcgctgcccagaccctgctggggacggccaagatgctgctgcacgagggccaacacccagcccagctgcgctcagacgtgtgcaccccgggtggcaccaccatctatggactccacgccctggagcagggcgggctgcgagcagccaccatgagcgccgtggaggctgccacctgccgggccaaggagctcagcagaaagtaggctgggctctggccatcctttcctgcctctgtgcccctgcctctccctgtgtcccttcccctgaggactgcggctccctccctcctgcatgagggtctcctactgctccttctccccttgcacagggaaatgcagggggcaggacttgggaggttccagcaggcgggggagccccgaccagtggggacactcctccctccccagtgagcagaaggcaccgtggtggtggctctgccccttgctgcagtgagcccaccttgctgcaacattggttctgaggggcccaagagatggcgtcttggtcatttgcccgcatggttgggcagttggttgaggccatgaacagaacttacggtaacaggcacggctggcccaatgcctggtctggagctggagcttgcctttggctttccaggtggctccgtgcagctacagccaggccggctgcctcatctcagctctagggggcacgagccatatggggtctgcacaagagaccctctcccctgcagtaaagccaggggccctggcctgatggggcccccatggggagctggagcctgccctgcagcctggagaagagggtggctgtggtgggcgtgctcatcccctgctaaggagcaggagctgctgggccaggtctgcggcagtgctggggtggcaccaggtgggcagtggtaggtggggtggcttgaggtctgggagggtggccctggccagccaggacacatgcagacccctggctttagtctggatacaggctccctctttcctcccaatcctaagctcctgacaagtggccaggtggctctgggccctcctgccccgtgcctaggtcaggggtcctggaataccccgtagctctggcaccaccacactggcctctgatggcaagacttggcccctccacctgtccctaacggacggcaggtcaggaaagccaggactcaggggagaagcaaacccccaggattgaaggctagggttctagggcctttgggtggggagggcccgggccggacagcctcagctccgtcccctgccccacaagattcacctgggcctccagtcccacgctggccccaactgctgcagctctcggcttccgcccaacagcctctggaggtgaggcgggagcatgccctcagcgaggctgggcggcgggtcctgctgtgccatctccctgtgcgcctgagcagatcaatccaccagtgcaaaacagggctaacggcacctgcaggacagcagcacgctccatccctcatgctcagctgcctctgcggccacggacttctgcccttcatctgctctctcttactctcctgagcctagcccgtccgtaagctccctcccctgcctggttcccagggcaggctgactcagttgactgcttggtccaagcctggccctggcacttgtcagggtcagcctaaggagatgggaataaagaggccagagagcacca

SEQ ID NO: 101959 - DNA, 2241 bp, Homo sapiens
ctggaggcagaggccccagggatctgtgtcctcaccaatgaggaaaagtggaagctcagcacatactggccagtgcaccaacagacaggaacctatgtcactttcaagctctgggttgccggaccacgcactccaaccaggaggtgctgcagagctgcctgctcgtcatctttgccaccaagcctcatgtgctgccagctgtcctggcagaggtggctcctgtggtcaccactgaacacatcttggtgtccgtggctgctggggtgtctctgagcaccctggaggagctgctgcccccaaacacacgggtgctgcgggtcttgcccaacctgccctgtgtggtccaggaaggggccatagtgatggcgcggggccgccacgtggggagcagcgagaccaagctcctgcagcatctgctggaggcctgtgggcggtgtgaggaggtgcctgaagcctacgtcgacatccacactggcctcagtggcagtggcgtggccttcgtgtgtgcattctccgaggccctggctgaaggagccgtcaagatgggcatgcccagcagcctggcccaccgcatcgctgcccagaccctgctggggacggccaagatgctgctgcacgagggccaacacccagcccagctgcgctcagacgtgtgcaccccgggtggcaccaccatctatggactccacgccctggagcagggcgggctgcgagcagccaccatgagcgccgtggaggctgccacctgccgggccaaggagctcagcagaaagtaggctgggctctggccatcctttcctgcctctgtgcccctgcctctccctgtgtcccttcccctgaggactgcggctccctccctcctgcatgagggtctcctactgctccttctccccttgcacagggaaatgcagggggcaggacttgggaggttccagcaggcgggggagccccgaccagtggggacactcctccctccccagtgagcagaaggcaccgtggtggtggctctgccccttgctgcagtgagcccaccttgctgcaacattggttctgaggggcccaagagatggcgtcttggtcatttgcccgcatggttgggcagttggttgaggccatgaacagaacttacggtaacaggcacggctggcccaatgcctggtctggagctggagcttgcctttggctttccaggtggctccgtgcagctacagccaggccggctgcctcatctcagctctagggggcacgagccatatggggtctgcacaagagaccctctcccctgcagtaaagccaggggccctggcctgatggggcccccatggggagctggagcctgccctgcagcctggagaagagggtggctgtggtgggcgtgctcatcccctgctaaggagcaggagctgctgggccaggtctgcggcagtgctggggtggcaccaggtgggcagtggtaggtggggtggcttgaggtctgggagggtggccctggccagccaggacacatgcagacccctggctttagtctggatacaggctccctctttcctcccaatcctaagctcctgacaagtggccaggtggctctgggccctcctgccccgtgcctaggtcaggggtcctggaataccccgtagctctggcaccaccacactggcctctgatggcaagacttggcccctccacctgtccctaacggacggcaggtcaggaaagccaggactcaggggagaagcaaacccccaggattgaaggctagggttctagggcctttgggtggggagggcccgggccggacagcctcagctccgtcccctgccccacaagattcacctgggcctccagtcccacgctggccccaactgctgcagctctcggcttccgcccaacagcctctggaggtgaggcgggagcatgccctcagcgaggctgggcggcgggtcctgctgtgccatctccctgtgcgcctgagcagatcaatccaccagtgcaaaacagggctaacggcacctgcaggacagcagcacgctccatccctcatgctcagctgcctctgcggccacggacttctgcccttcatctgctctctcttactctcctgagcctagcccgtccgtaagctccctcccctgcctggttcccagggcaggctgactcagttgactgcttggtccaagcctggccctggcacttgtcagggtcagcctaaggagatgggaataaagaggccagagagcacca

SEQ ID NO: 101960 - DNA, 507 bp, Homo sapiens
ccccacccaaaggccctagaaccctagccttcaatcctttgggtggggagggcccgggccggacagcctcagctccgtcccctgccccacaagattcacctgggcctccagtcccacgctggccccaactgctgcagctctcggcttccgcccaacagcctctggaggtgaggcgggagcatgccctcagcgaggctgggcggcgggtcctgctgtgccatctccctgtgcgcctgagcagatcaatccaccagtgcaaaacagggctaacggcacctgcaggacagcagcacgctccatccctcatgctcagctgcctctgcggccacggacttctgcccttcatctgctctctcttactctcctgagcctagcccgtccgtaagctccctcccctgcctggttcccagggcaggctgactcagttgactgcttggtccaagcctggccctggcacttgtcagggtcagcctaaggagatgggaataaagaggccagagagcacca

SEQ ID NO: 101961 - DNA, 2217 bp, Homo sapiens
gtgacgcgtgggtcgacccacgcgtccgctggaggttggtggatgggcggtgagcgcagcggcgtccgaggcaacaagatggcagctgcggagccgtctccgcggcgcgtgggcttcgtgggcgcgggccgcatggcgggggccatcgcgcagggcctcatcagagcaggaaaagtggaagctcagcacatactggccagtgcaccaacagacaggaacctatgtcactttcaagctctgggttgccggaccacgcactccaaccaggaggtgctgcagagctgcctgctcgtcatctttgccaccaagcctcatgtgctgccagctgtcctggcagaggtggctcctgtggtcaccactgaacacatcttggtgtccgtggctgctggggtgtctctgagcaccctggaggagctgctgcccccaaacacacgggtgctgcgggtcttgcccaacctgccctgtgtggtccaggaaggggccatagtgatggcgcggggccgccacgtggggagcagcgagaccaagctcctgcagcatctgctggaggcctgtgggcggtgtgaggaggtgcctgaagcctacgtcgacatccacactggcctcagtggcagtggcgtggccttcgtgtgtgcattctccgaggccctggctgaaggagccgtcaagatgggcatgcccagcagcctggcccaccgcatcgctgcccagaccctgctggggacggccaagatgctgctgcacgagggccaacacccagcccagctgcgctcagacgtgtgcaccccgggtggcaccaccatctatggactccacgccctggagcagggcgggctgcgagcagccaccatgagcgccgtggaggctgccacctgccgggccaaggagctcagcagaaagtaggctgggctctggccatcctttcctgcctctgtgcccctgcctctccctgtgtcccttcccctgaggactgcggctccctccctcctgcatgagggtctcctactgctccttctccccttgcacagggaaatgcagggggcaggacttgggaggttccagcaggcgggggagccccgaccagtggggacactcctccctccccagtgagcagaaggcaccgtggtggtggctctgccccttgctgcagtgagcccaccttgctgcaacattggttctgaggggcccaagagatggcgtcttggtcatttgcccgcatggttgggcagttggttgaggccatgaacagaacttacggtaacaggcacggctggcccaatgcctggtctggagctggagcttgcctttggctttccaggtggctccgtgcagctacagccaggccggctgcctcatctcagctctagggggcacgagccatatggggtctgcacaagagaccctctcccctgcagtaaagccaggggccctggcctgatggggcccccatggggagctggagcctgccctgcagcctggagaagagggtggctgtggtgggcgtgctcatcccctgctaaggagcaggagctgctgggccaggtctgcggcagtgctggggtggcaccaggtgggcagtgtgcctaggtcaggggtcctggaataccccgtagctctggcaccaccacactggcctctgatggcaagacttggcccctccacctgtccctaacggacggcaggtcaggaaagccaggactcaggggagaagcaaacccccaggattgaaggctagggttctagggcctttgggtggggagggcccgggccggacagcctcagctccgtcccctgccccacaagattcacctgggcctccagtcccacgctggccccaactgctgcagctctcggcttccgcccaacagcctctggaggtgaggcgggagcatgccctcagcgaggctgggcggcgggtcctgctgtgccatctccctgtgcgcctgagcagatcaatccaccagtgcaaaacagggctaacggcacctgcaggacagcagcacgctccatccctcatgctcagctgcctctgcggccacggacttctgcccttcatctgctctctcttactctcctgagcctagcccgtccgtaagctccctcccctgcctggttcccagggcaggctgactcagttgactgcttggtccaagcctggccctggcacttgtcagggtcagcctaaggagatgggaataaagaggccagagagcacca

SEQ ID NO: 101962 - DNA, 711 bp, Homo sapiens
gtgacgcgtgggtcgacccacgcgtccgctggaggttggtggatgggcggtgagcgcagcggcgtccgaggcaacaagatggcagctgcggagccgtctccgcggcgcgtgggcttcgtgggcgcgggccgcatggcgggggccatcgcgcagggcctcatcagagcaggaaaagtggaagctcagcacatactggccagtgcaccaacagacaggaacctatgtcactttcaatctcttactctcctgagcctagcccgtccgtaagctccctcccctgcctggttcccagggcaggctgactcagttgactgcttggtccaagcctggccctggcacttgtcagggtcagcctaaggagatgggaataaagaggccagagagcaccaagtgagctcatgtttcaccagaggtggataaaaccaagttctgggctgggcccagtggctcacatctgtaattccagcactttgggaggccgaggcgggcagatcacaaagtcaggagtttgagaccaacctgaccaacatggagaaaccccatctctactaaaaatacaaaattagctggatgtggtggtgcgtgcctgtaatcccagctacttgggaggctgaggcaggagaattgcttgaatccaggaggcggagattgcagagagccaagatcatgccactgcactccagcctgggtgacagcaagactctgtcttgg

SEQ ID NO: 101963 - DNA, 293 bp, Homo sapiens
ttttttttggtttagactaagaaatggattctggttgtcaagttggacatatataatcataaaccattttgtaacctctcaatgaacattagaaatcactgggaaaatagaagtagaaaatgaatcctgcatggacaaagccatcagaaaacatttacctcaggaaaagaaaagcagttaccacctatatagtccccctccacaacttcttctagtactttctgtctgcatcacgtattctagcactcaatcacatgtcgtactgaataatactaggtgtatattttatcacc

SEQ ID NO: 101964 - DNA, 545 bp, Homo sapiens
attttttttcacttaaaaatttttttgcatagacagggtcttgctatgttgcccaggctggtctcgaactcctgagttcaagcagtcctcttgccttggcctccctaagcactgagattacaggtgtgagccacctcgccggcttaataatatttattaagcccttgctgagtggctggctgtgtactaaaagggctcccagaaagatctctgcaaaagtaggccactccatttatgagagtttttaacccgaagggcctccttcctgatggttaggccccttcctaatggtcagtgaatcttctcaacgctcctatcaggtagctaacatgatcatctccattttacagatgaataaactgaggcacagagcagcaaaagtttggtgggtctgggatgggaatgcaggtctggctggcgccggcgcccaggactctgcagcctcccttctcgcgcggcggtcacgccaccgtgtgccaggactgcgctgggccgcttccagccctgggccgcctgggggaggggtgacctcccgctgccgcgcc

SEQ ID NO: 101965 - DNA, 317 bp, Homo sapiens
tttttgagatgtagtcttgctttgtcacccagactaaagtgcaggggtgcaatcgagattacaggcacccaccaccacacccagctaatttttgtatgtttcgtagagacagggtttcactatgttggccaggctggtctcgaactcctgacctcaagtaatccacccacctcagcctcccaaagtgttgagattacaggcaggagccactgcacccagccacattcttattacatgtgcatgaaacattccacagaatgcaccatattctggggcttcagacaagcctcagcattgaaatcacagaatatgttctc

SEQ ID NO: 101966 - DNA, 325 bp, Homo sapiens
ttgttttccaaaattttgtttggagctctgaatgtttattcctaaatatcaatgtcttaaatagtggcccgctccctagggctcgtccccaaaactgacttgcttggctttttcattgcatgactgaaacatgatgaaaaatactaggaaataatagtataagaccaacgattaaaccaagtagaataggagattcaggttagtagccattccatcattttgctaaaaatggctccgcagaagtgtgaaggttgttgatcctaattttttatcttgtcttagttagggccccgtatgtgggtgtgctgtgcagaccatggggacg

SEQ ID NO: 101967 - DNA, 757 bp, Homo sapiens
  misc_feature (15)..(15): n is a, c, g, or t
  misc_feature (20)..(20): n is a, c, g, or t
gcttcttgtgaccgngcgcnggccttctcgggctaacagcttgaccttgatgttcagcagaacctcgtactcccgggcctggtgttacccctctgctcctgtctgtgtcagctccaactccaggtgcagcaggatccagttgagaagctccatctgcagagcacagggggcctccacctccctcagactggtctccaagctggtcttcagatttctcattgagtccaggttgatctccaaggactggactataagtctcagctctgtgagcatcatctcaacagctccaacctcagcggactgcgtggtgaccactgtggtgctctcttcaatctgctgagaccagtacttgtccagctcttctcaggtcttctgagtcacctcgtcgtattgggccaggatgcctgccatgatcttggcaaggtcctgagacttgggggcatctacttccagggtcaacccagagcctgcaatctgggcttgtaggccttttacttccctttcatggttcttcagaaagaacagctcctctttgagagcctcgatctctgtctccaggtacagccgagagacatttctgtcgtcagtgaccctgtggagcccatgtgagagacaggactagctggatttcctaagccgactaagaatccctaagcctagctgggtgcgtgactgcatccacctttaaacacggggcttgcaacttagctcacacccgaccaatcaggtagtaaagagagctcactaaaatgataat

SEQ ID NO: 101968 - DNA, 247 bp, Homo sapiens
gaaagccaaaatttttaggtgaattttaaaacacagtaaaaaattcagtggtagtttagatcttatgagattaaaagtctctatacaatctacaaagaaataaggagtgatgaaactgctcctgtgaattctctaaaccatgtccaaactgcatatcacatgacaaataaaatctcagtcaaaactgaaaagtctgggcgcagtggctcatgtctctaatcccaggactttgggaggccaagacagg

SEQ ID NO: 101969 - DNA, 2560 bp, Homo sapiens
  misc_feature (2529)..(2529): n is a, c, g, or t
ccttcagcctcctgttgatttatgtacacttatgcttatatgtttaacttttagccaccactaataatgcaggaatataacttttggaccagttttagtagttctgaacttttgaattagataagtattgttactatagtaattttgcatgtaaatatttaacccaaagtgtggcacttgaaattcagttaaacgaaagtatacttggactcatgcctccacttttgccttggttacagtggatacgtccaatactgggagtacttttcatgggattcttggggtgttgctttgccagccggaaacttctgtggctggtggcaccttctgcctgagtattgcctgtgtctgctgggctccttccacccacttggccaggcaggctgcactcagttctcactactggcctggatcccacacctgccaagtgtgagttagacatggagcagcacacggtgtgtgggtgagcaagcacccgctccaatcactgcacacagccaggcatgctggctgctgcagtggggcaagtagctccaggtgccagcacaggcgccagtacaggcaccagctctgtgcgaggctgcagctggaccagatgtactgcatgtggcttccactgtgggcacctgcacctggatgaggggaacaaggtggcgcccggaagcttggagacaccaggaaccacagaaccccaaagagggtgtcacagccctggctcaaggagcccataggtctaggctcctcaaagggctgcagctcttctctcttcaccgcccacaacgtggcaagtggcaaggggtgcgtttcagccctgtttgtgttacagctcttttagtcctgccatttggtggatcctgagttcttgtcccgcatccaggaagaatgaggtatgcagacaactggagggtaagcaaggtgtagaggagcttcattgagtggcagaacagctttcagcagacccaaagtgggtagctcttttctgcaggcaggtcctcccgacatctgtgcagccctcggtggagaggagacctggagtgagtagctcctatctgcaggcaggttgtcctgtcctctgcctgagtctggcagagtctgaggtttttaatgggtttcagaggggagaaagcacgtgctgattggtccatgggcagccatgagctggcctggaaaaagcaccataagttctcactctagtccctggaactggcagcccagcctccaggcctcaggccattccaggcttgaagttggggatttaccggggacccacccctttctgcgcagaagcctgcttcctgatgccatcaacttgccatccatggtgcccacggcgctcaggttgttcgtgccaaggggcacctgcaggtctgcgccaagctgctctcagcccccctcggcttccccctcgtgcttgttggtgcccaaagtttgaagggggctgaggtggcagggggctggtgtgtcagcattgccccaagcatgtgcacacctggtcaggtcacgacagtgcctgggctcagcctcaactttactctgataacggacaaagcaccaggagtagggagatgccaggaagtgggagcagtcacttttgaggctgtgggggcagggggccttcccagtccttgagagtgcagggatgcctgggtccgcagccatggctgggcggctgcagctgttcctggaagggcgagactcctgcccccacagctcagaatggggtggggctcctgcctgttccaagctccgtggagtgtgcagcccctgctgctcctcctccactgcagcccacctcatggcagtgattgctccagacgggctgctgctgccatcagtatgacatgctggtttattgcctgttaccttgtaagtgcccagtcaatgtcagttagtgttagtaatttcttggagtagtcaacttcattaacatttgccatctggttatagcatcacttgtgattccggtacccaacagagtatactttaaaaactgagcaacataaaatctatgatgtttagaaatctgaaatagttgagtcattgtagtacttctttgagtctcttggcctaacagtagtctgggcaatgctactgtgtgtggaagagccaaacctaagtcacagagatcgggtatcttcctgctctgcctcctctcaggcctttcttttgtgtgtcacaatcttcctcctaccaaaaggaaaaagagagaatgaattagtggctaatcttggagaaatagcacaaaataggagtgaattttaaagagcccaatcaggctgggtgtggtggctcacgcctgtaatcctaggactttgggaggctgagaccagtggatcacgaggtcaggagttcaagaccagcctgggcaacatggtgaaaccccgtctctactaaaaatacaaaaattagctgggcatggtggtgcatgcctataatctcagctactcgggaggctgaggcaggagaattgcttgaatctggacccggggggccgaggttgcagtgagctgagctcatgccactgcactntagcctaggctacagagggagactccatctc

SEQ ID NO: 101970 - DNA, 443 bp, Homo sapiens
  misc_feature (389)..(389): n is a, c, g, or t
aaaaaaaaaaaaaaaaggttagtcacccatcgctaccgtatttctaactgtcattttggggaatgttctgagtgcgtttatgcttcacgattactttttatcactgcccacaggtcagaatctgagaggcagggagtttttattcctctttctgaggcctggataaaactgtaataatccttatttacaacttaaggggccaaatcttggttgcctcagtgtgtgagattttatctaatcctctttcagtccttataactacacccggcctccagtcttttttttcttatgtgtagactttacctagttgtaagcagacatttcaggaaccaatgtctttgcctaagggaacataaatgtgggatgtattaaaacgggctaaagttttnaaaaaacaattatttggcttaggatattaatttactaggaattctttgctccat

SEQ ID NO: 101971 - DNA, 924 bp, Homo sapiens
tctgtgctaagctgccttaagctgggggagtgtgccgcatgcggtgtggcctgtgttgggtcatatctgaagctagcacagcactgggtctcacccatagccatggcaaccattgcctggctattgcctatgtttactcaaggtcacagggctctacaatcagcaggtggtgaagctagctaggtttgtgtccttcccctcagcaagttcccatgaatgcctgtcaggttcagaaatgctgtctgggaggtagggcctgtcattggacaccctaggaatctaaccggtgccctattctactgtggctgagctggcacccatactgtcttgtggcacccaagcaacaaggcaaagtccttcccacatttttctcccctttccgcaagcacagcaatctctatccatggccaccaccacaccagactggtgttgtgtactacctggctactgctcaaggcccaaaggctcttcagtgagcttgtggtgaatgttgccaggcctgggactcttcctttagggcagcggtaatccctctggcccagggcaggtccagaaataccatccaagagccaaggtctggaatcagagaccccaagagcccactttgtgctctaccccactgtgtacaagctggtgcctaagctgcaagacagggtctcatttactcttccttctccttttctcaagcataaagagtcccttccaataggtaccatagttgggaatgtgctgggtcacacctgaagctagcatgtttctaagtctcccccaaggctcacagcaagaactgcctatgtatcactgctgattatccagggccaagggctctttagtcagcagtcgtacaatcaactgccagactgtattcttctcaagacagcatgttcccttctggtccagggtatgtctagaaatgttgtccaa

SEQ ID NO: 101972 - DNA, 900 bp, Homo sapiens
aacattttaggaaaaacagccaaaatgtttaacttagcgtttttgctcaactcaatatttaaaataattttcagagatactttttttttttggagacaggatctcactgtcacccaggcgggagtgcactggtgcgatcacaggctcactgcatcctcaacctttcaggctcaggtgatcctcccacctcagcctttcaggtagctgggactataggtgtggcccaccacgcctggctaattttttgtagacagggtttcaccatgttgcccaggctgagagagatagttaaaagtactaaattaaaaaaataagctagaaagaacttaagtcccgttccttcagtttaccagtgatgactttgaacccaaggagttagtgtagagataatatcaaggctgggattacaggcgtgagccacagcgtccggccccaggaggaaaccttttattttttagcacaagaccacttcagtcaaactgggcgcccctttattttgttgggaaaaaattattgctgtctagattctaggaagtgaaactaatcgttatacagttatattgccatgttttaaaataactactatttaaatggtcttaattgtaggtctttgaaacactttagatgaagagatcacaggctgcttaagagtgttccaactaggtattgcagttttcaggtgcttcttaggtgttactattatttgaattgtgtatctgttcagttctgtgctaagcaaggcgatcttcagggagatttcccttccagctacctttggttggagtgttctaggtcacaataaaatgacttagaaaatgaactactcaagaaactaaatattagctccactgaaagagtaaaagtccgtgctgctatctcttacactgggattcattgggg

SEQ ID NO: 101973 - DNA, 185 bp, Homo sapiens
gccccgcttcctgacctctgtccccaggttgtattccagaggcacctcaaaaccctttaaataccctgtgtattgttgagaccagcagaatcttgtgtgatgtttcttcaggagtcttcattttggggcataaagaattaagatagtccagcctgggaaacacagtgagactccatctctacaaa

SEQ ID NO: 101974 - DNA, 415 bp, Homo sapiens
ttgctctgtgaactgtcttcttctccctaagaagccaaaacactgcccataacctccagacaccagggagggtccagggagtactgctgagagcctcaagggagccaatgcagaaacagcagaagtcccttcaataaataggagctcaaggatacactgaagagcatggctggatcctggaaaaggccttgctccgaccgggaagatgtgagactggcccaataggagcaacaaagggcactgcagtgcttccaccacctgattaccagccagatctaaccctaggaagacagaggtccagtccatcccccaaccagccacctacacaacctatgtctcactccttccccaccactttcccaactcagtgctaagggactagaagggaaacagagacttgagttttaggaccatc

SEQ ID NO: 101975 - DNA, 427 bp, Homo sapiens
ctgacctcaggtgatccgcccgccttggcctcccaaagtgctgggattacaggtgtgagccacggtgcccagccacagcaaggctttacataattcagggaacggtctctgggcagcttgaggcctgtgggcggggaggagatgtcttttgcctcacatcatgaaccccttatctgtggccagtggaacaccattaacctgtgggcagtgatggctgagtgtccccaggcttttgcttatagctcaagtctgaccatccagttttccagccttcaggctccccctcctggaatccccactcccttggtccctcctgtctagtttgtgctgactcaaagctggccctcttggacctccagtctgttttggggaaatagctggattctggcaccagtggccctcttggctctgaggcagaggtgagggc

SEQ ID NO: 101976 - DNA, 846 bp, Homo sapiens
taagtgacgcgggcgctggggtccgggggtcccgggggcgcagggtaggggcggcgggaggctccgtggccggccccgggttgaagttggtaattgagcggcaactcaggcgggcgcggagtgacagctcgtgacggcctccgagacgccagctgccccttctcggctgtgtggcttcgacctcctgattctcccacgacgtccctggccgggagacgcgctggactctgcggctggccaaaaggggagggggagccccgcgtcctgggggcccctagcaggggaaggggcgggggttgcgccgggcatcctgtctggggcatctgtctgggactctgccggtgcctctcacctggcgaggggcctgtggtgggggtaggggggaagtccctggcgccaggcttggccaagccctgctctgctggactgcgggctggcggcgctcacccagctcctcacctgtcccgcatcttcctgtttttcttccctttctggttgggcagcgagagttgagaggaggcagatggcttccatcccagaaatcgctctcctctttccatccctacagagagggacagagaggcaaagttccttgcatcccccggggcgctgtccctgtgagctcccggtgtcgtgcacacgtgagcccctgagtcaccgggcttgtgtgtgtgcgatggggctccgtggccagcctggcctcctggggttcactttctgctttcctaccccagctcttcctgtgtggcttagctggccttccactgaggaggcacatgggtttggagggcagatgacagcccactggagagctgtacccctcagtgagggccgccaccttgatgg

SEQ ID NO: 101977 - DNA, 864 bp, Homo sapiens
tgctcactgaattattcttaaaggcttagttttgcttttccaatactgtagataaaatttaaaaaaaaaaaaaaacacagatgacctaaatgttggccttcttcatcttgatttctggatttaaagttactcccaatcttattcctttcataaattattgctttttgaaccattggctattttatgaaaattactcaagagaattaagagattaaagtaattttatattttattaaatggaaagaaatttgatagtactgatggtagaaaaattatcagggtagcaagttgtcactttgatttcaaagcactatccttgcaaagcagtacaaataattaattaactttcccagtttttagtgaaatgaaggatacctgagcttaagcagtttaactcctcagaaaaggatcctgctgtagggtcaagagaacaggggaagtgacaaaggcctccctgggatgggctgtacaaagtaccacaaactggtggcttaaaacaacaaacatttgctttctcacagctctggaggctagaaattggaaatcaaggagttggcagagccgtgctctctctttaggctgttgcctcctcctagattctggttgttgccaacttggaaacttattactccagtctctgcttctgtctttacacagccttctcccctgtgtgtctgggtctctgtggccaaatttccctcttcttataaagataccagtcgtattggatttaggactcaccctaatccagcatgacttcatcttaatttgactacatctgcaaagatcccatttccaaataaggttgcattcacaggttccaggtggacatgaatttggggagacattattcaactcaataca

SEQ ID NO: 101978 - DNA, 391 bp, Homo sapiens
taatcactagaggaaaaggatagtgtctggtcacagaattttgacctgcccagctgcctgcagcaagtttggggtgagggttatcctcttactttgattagactccccacttctgctcccttttgctagtatctaagcgcattacggttttcttcaggtaaatcctacccatcactaattggaagttaacaaggagctacacctgagaggtccctcaccggtggaatgataaggcaggtaggggatggtcacaggggtggtggcacctatgagaaagtcccatggcttggaagagagaggaataatcattcaatccttattcacactgaaggacagatgggtgtatcttttgtctggcaaatggagggcagagaaatagtgctatagcata

SEQ ID NO: 101979 - DNA, 474 bp, Homo sapiens
tttgccggtaaacagtttcaaatggcaaatttcccctaaaattggaaaaaaggctaatacggactggggttggagagcccgggattctgattaaacatggaatctgagaactggcagaaagcctggaactgatggaagagagggctctagggcctccatactaaatggtgaactaggaactataaaagagataatgtggtgaagagcttcagccatcaagttattctaaaaatgaagtagggcattttatatgtggagagaagggcactgattattatctgactattgctaatatgtcccatagaacttatttggaataattttttactattaatttgaacaacagcagtgagactctttatatgtataataaagctaattttacatttaatagagatgattttattttttaatgttagtaaaatcagaatcttattaaattgtaaaagtgaataaaacttttataacttttgg

SEQ ID NO: 101980 - DNA, 450 bp, Homo sapiens
tttttctttttacacaaaattgaaataactacgtttccttagaagacagctttacttctaaggttgttactcagaacaagttttcagtgtgaattataaaacttcatttttttctaatagtaaatgaatcattctagtctttcttcctctatttaatattcacttttacttgttatctaaataatctaatattcatttttacttattatctaaataacaattcatttaaatttccattgggtttccaaaatgaaacatttaatataatttcattaactttaaaaaacagagagggagaaaaaaataaataaataacagtcaatgagcaacacctatggctgagttgtcccaaaacttcacccttagctaaaatgccaaaacaaagccactgcccctggatatttaacatctatatcacacaggaataatacggtttacttaactgtaact

SEQ ID NO: 101981 - DNA, 435 bp, Homo sapiens
tcagacactgaatctgctggtaccttgacttggatttctagtctccagaactgtaagaaataaatttctgtagtttctaagctctctagtcgatggtattttgttatagcagcccaaagaaaccaagataacccttcacaaatatgtaacgtagataccactatgatccttcaatgacctaaaatacaaagtatagggcactggttttatgtaagatgtttttgcaataacaaagcagagattaaagtggctttagtaagtaattcaactttctttactgttcactgactcaactctcttcttcaaacataactgcagaaaaaaggggggaaaagggctgggcacggtggctaatgcctgtaatcccagcactttgggaagccgaggtgggcggatcataaggtcaggagatggagaccatcctggctaacatgg

SEQ ID NO: 101982 - DNA, 572 bp, Homo sapiens
tgggctcaagcaatcctcctgcctcaacctccccagtagctgggactacaggtgcacaccaacatacctgggtgatttttatattttttgtagagacagagttttgccatgttgctcaggctgatctcaaactcttgagctcaagccatctgtctgcctcagcctctcgaagtgctgggattacaggcctgagccaccacacctggccagtaatttcttaatcctacctccctgcttctattgcctagcccgtacatttgaggcttccatggagctttctgtggtactgaaacacttggagtgaactgcaaacttggagtgaactacatccaacctttctaaggtggctggggaaaattcttgtacagcaagttgggacaaaatagccatatagaaacagccatataagatcccaatatagaaaaattgggatattagaggaaatacatgatttccatttatggagtgctacatgtttgcaaaatgtatttctgcttttcatcttcttgacatctgaatattaaaagcagttgttgataatttcatataataaattgagacatatcattaaa

SEQ ID NO: 101983 - DNA, 290 bp, Homo sapiens
tgagatggggtcttactctttcacctaggctggagtgcagtggcacaatcatggctctcaacctcccagcctcaagcaatcctcccaccccagcctctcacacagctgagacaatgggcatgtgccaccatgccttgctaacttaaaaaacattttttttagagacaggagtttcactatgttgtccagactactcttgaactcctagactcaagcaatccccctgccttggcttcccaaagtgcgggattacaggtgtgagccaccatacccatccctaagtatttttt

SEQ ID NO: 101984 - DNA, 488 bp, Homo sapiens
catgagagggagagagaagaaaaagagaatggtggggtctacatttcaaagaggatgtaagtcatatttatttccccagagacctaataaactggtcattccataatgcttagaatactttgagaagaattaagaaacaatttcattttatagtcagcattcccaactatttcattccacaagtgaaatgttaacgggcaaacaatcacaatgctgcaataaattctggaagcataggggttattttccttttgggctgggtcatgatttgagtgatttttcactggttaagttccactattatctgggtgacaccttttgtaataataaccttgctttgctccacatcttgtcatatttatctttcctgaccagctgccattcacactctgaccctgtgatagtagctagtctgccctgacctttgcagctgggaaactcaaaggggctaatgagctaccagttcacacctatcctaattagctatc

SEQ ID NO: 101985 - DNA, 364 bp, Homo sapiens
tgtccgtagaaacaacttttctattctcttaagtttttataatacttaaattacataattgcagcatcaagtacaaatgtcataaatatttttggaggctgggagtagtggctcatgcctgtaatcccagcactttgggaggccaaggcgggtggatcgcttgagctcaggagtttgagaccagtctgggaaacacggcaaaactgtgtctctacaaaaaatacaaaaatttagctgggcatggttgcacatacctgtagtctcagctactcaagaggctgaggtgagagaattgctggagcccaggaggtcaaggttgcagtgagctgtgatcgtgccactgcactctagccttagggacaga

SEQ ID NO: 101986 - DNA, 414 bp, Homo sapiens
tttaagcagtgatattccctgcttaatgaaggtggaaaagggagtgcatttgcagccatttagccaaatctttccctgttaccacatcactttcccaaacacttagaagagatggaggctgacagttccattagagcgagaatgcttgtagactctacaaccttactattcaaggtgtggtccacagaccagcagcctcagcagcaactggctgttggttagaaatgcagaatctcaggccctgccctaatctagacctactgcatcataaccttcattttaccaaaattccaggtgactggtatactcattaaagtttgagaagcactagtagatgagattcattaacattggtcttaaaacgttaatgattaaaaggtactgaccaataggccctggagaaagcagccaaaa

SEQ ID NO: 101987 - DNA, 370 bp, Homo sapiens
aggcagccgtcgcgctgaggcggtggccggggaggggcgcccctcggggtcagcactcagggggcccgaggggagagtgagaatcccgaggctggaagcgcgggcccccacattcgtgtcctctgagagggttcggaattgagccgaacagccgaggtagaacaggtgtcgggccgtttcagctccggcgtcaccctcgtgaccactttctgatatttcctattcccgtgtgctgcagcccaaagtcgcgttccccggaggtgcgaatcgctgttggaacctcggcgccgacgccggcagcaggttaaccgacgtcttcggcagcgtgatgttgactggctccgcttccttctacgattgctacacatcg

SEQ ID NO: 101988 - DNA, 377 bp, Homo sapiens
gcagatgtactaagtccatacatgagtgcagtatttgacagtttgcaaagcaccttcatacccactatctcaccaggtcctgctagctcagtgatgaggtgggacacctaacgtcctcacttccaggtgatgaaatggaggcctggaggagtttctaaagtcgtacaactcctaagtggtggagccaggattagaatgagatattttgacctctggacactgctctttccaccataaactgatatgttccaggagcattgaagaaagcttcctagcatattgggaagaaaactcatggttggggtgtggctgggtggatggatgggcggatggatggatggatggatggatggatggatggatggatggatggatgg

SEQ ID NO: 101989 - DNA, 757 bp, Homo sapiens
gatgggccccctcccctgacccctgtctacactcagccagaagctgatttgagctggtcccacagtgctgcctgtgggaacccaagcccttcctgctcctatctgcctctggctggatgacgccccgggcaattccgcccactgttttgaccccaggccccaaacctaggtgaggaacgccctcctcacagtccttccctgcttccagttcagtgttgacagtgagcagtgctcgctttgctatggctaggccctcactctcctctcttttcaaggccccaagagagtaagccatttattcacaccctatcttgacagcaaagccggggccttgaacctggggcactgctttcagccattattcttgcagaggccccagagctcccagcctgcatttttggagtctgagcagggcccacagctgttttgcttcagctaggagtgaaggctgacaaagagcaaggtctctggagaaggaggaaatgttttctggatgccaaactggtgactgtggggaggtgtggggcagcggggagggaggagctctcacttgtgcctagggaaaggtcatggtcaatgagaaagcctttgatggggagagtctgagatgggacccaggaacatcaccatgaagctgtccaggatggatgtgggaccctctgtcagaccaggccagttctcttaatgtaagatcagcaggccaaggtcctgggatatgggagctcccaggaagtggactgggatgcctgagggatcc

SEQ ID NO: 101990 - DNA, 450 bp, Homo sapiens
ttcatcttcaagtatggcaatgactaataccacagccccaaatttaactcttcaaatcactttcacacatagtatttcacagaaaaacaacactttcaagttaacaaggcagatattattatctggatagataaggaactgaggcccagagatattagaaattcacatgcgtaacaatactcaaatctcccaatgcccagccagcactttgtctatcatatccctgtcttgccttggtgtttgcttactctagagtcaatctgacaaactcaaatttaaacaacaacaaaaaaaacctatgaagggagggacagacagggtttcttaaaaggacataaaaagattgattcaactcagtcctattaacattttctgttcatcaaaagccactgttgaccaggcatggtggctcacgtctataattccaacactttcagaggccaaggtgga

SEQ ID NO: 101991 - DNA, 1576 bp, Homo sapiens
cattgggcacataagaggttcttattcatctgtagagaacaaatttccagtattttcgattttttgcttattttatatatcaaatagaccattaaagaatgttctataaacatttttaaattccaattttcaccaggggaggaatatgtgatatgagtggaatggcaaaaggaaaataaatccacctcaaattcattgattccaatgagaaatgtctatcttttaaatcaagagtaatactattgttaactataccttatgtttttgtatagtttgtttttaaatttagaatattttttccatcttgctctgagcttcctgaccgatagtatataagtaaaaaaaatgcatttatgctacttatttatatcttgtaattcctacacattgaacccttttccccttcttaaccttgtccgtctgcctgagtctttcccaaaacagatagttcctaggcctgtatggtgttaaataacacggtgaggaatttcagtaggttatctccagcaatctgtcttttgggagctatagtgcaaaggccaaagcccattactataaagaccctcttggaggactaagaaggaagatactaattatgataaaggaactataaaacttttaacctcaacagaatttgtaatgtcagaactggagaaattaaaatcagtattaaattttttaattcctaaaataatatatgcatggttgaagagttaaaaacaagtaactttgagagcacagtatgagataaataaaaaaggctaagaatacatgatgaggcacattccccttctgaggagaaagcgaaataacatgtctgtgcattgacccattcattacatttcatgtatcttaagcaaaagagcatgattttctctcattgctaaaaagagttgctttaactcatccctggatttggtggggaaagggtacaactcctgatttgctgtttcactttgaaacaacacaatttgttagatacttagggagatatactgttgaatttgcacaggatgtgactctgtttatacatattaacaaatttccttttggattccttagcagttcatcaaattagtattaaatttttaaatttaaaactagcatgaagggacatgaaatatttgcagtaggtggatctatgtaagatgtttgggtatggcattaatagcttgacaaagatttggggaaaggtgttaagaatgagtccatctcagccaatagtgcttggtgtataattcaagaacagagagttttccatcttgaaaaaacatggaaagtaatgctctatacccatatgtattaataagagcattttccttcttgccgttgatcatttcagatgataccacaatatgagtataattttttattaatcttttttctggtaaaattttagcaatattgtacaaatgctttttttaggttttactgtaaatattaatcaccacgtcacttcagagactagccttttattgctgaattaaatgacatgcatacattgataattatatatctgtattttattaaaaagtacttaaaattatattaaaatatgttattaaaccctttatga

SEQ ID NO: 101992 - DNA, 363 bp, Homo sapiens
ttttttgagatggagtctcactctgtgtgttgcccaggctggagtgcagtggtgcgatctcggctcactgcaacctctgcctcccaggttcaagcgattctcccacctcagcctccccagtagctgggattacagccactgcgcccagctaatttttttgtatttttagtacagactgggtttcaccatgttggccaagctggtctcaaactcctcacctcaagtgatctgcctgcctcagcctcccaaagggctgggattacaggtgccagccactgcaccaggcacaactaattcttataatgattttagataacagtgggaaactgtaacactgaactttagcccagagatgctgattca

SEQ ID NO: 101993 - DNA, 322 bp, Homo sapiens
accagactaatttaaaattataagttttttttcagtgcttatacacatttaaaccatatgcctatgtgcaggagtacacctccaagctgaagtatattcctctgtttaatctttcactagggtctggggtctggaaaattacttcagagccttgaaacaattacttcattttttttctttcttattttagagggagggtctcactatgttgcccaggctggtcttgaactcctgggctcaagcgaccctcctccctcagcctcccaaagtgctgggattgcgggcgtgagccgctgctcctggcccaattacttaatttaaa

SEQ ID NO: 101994 - DNA, 926 bp, Homo sapiens
ggaagttgcagaagtcataacacttgcttgatgcctgataatcttaacatgtatcttctaaaaaccattttctatccatgaaaccatatcacatccaagaaactgaacatcatagaataatgttacctaatgtgtgggccttgtttacatttccccaattgtccacatagatttttttccttaaaaaaatatatatattccatgatctaaggttcacacattgcattaagttgtccgtctctttagtttcatttagctaaaacagttacttccttgtttgaattttttaagatggacattttggaagagtccatgtgaattgttgtatagactgttttacaatctaggttcattagatggtcttcatgattagatttagattaaacatttttggtcagaacgctacctacctaggtgacgtccactcaccagtacatcacatcaagagacactgattgtcagcctggctcagtggctcacacctgtaatcccagcactttgggaggctgaggcaggcgtatcacctgaagtcaggagttcaagaccagcctggccaacatggcaaaaccttgtctctactaaaaagtcaggcgtagtggtgtgtgcctgtaatcccagctactggggaggctgaggcacgagaatctcttgaacccaggaggcagaggttgcagtgagccaagattgcgccactgcactttagcctgggtgacagagcgaggctttgtctcaacaaaaaaagagacattgaatgtcaatttgtatcttcattgataatactaagtttgatcatttggtgaagatggtgtctatgaaaactctactgtaagggtatctgcatcctctctttactaccaagtttgatcatttggtgaagatgatgtctatcagaactctctactgtaagggttcctgcatcctctgtt

SEQ ID NO: 101995 - DNA, 2695 bp, Homo sapiens
  misc_feature (1676)..(1676): n is a, c, g, or t
  misc_feature (2033)..(2033): n is a, c, g, or t
  misc_feature (2042)..(2043): n is a, c, g, or t
  misc_feature (2066)..(2066): n is a, c, g, or t
  misc_feature (2083)..(2084): n is a, c, g, or t
  misc_feature (2089)..(2089): n is a, c, g, or t
  misc_feature (2106)..(2106): n is a, c, g, or t
  misc_feature (2119)..(2119): n is a, c, g, or t
  misc_feature (2123)..(2123): n is a, c, g, or t
  misc_feature (2144)..(2144): n is a, c, g, or t
  misc_feature (2152)..(2152): n is a, c, g, or t
  misc_feature (2165)..(2165): n is a, c, g, or t
  misc_feature (2167)..(2167): n is a, c, g, or t
  misc_feature (2194)..(2194): n is a, c, g, or t
tgggcatagatttcctctttgagaacatcaacctgatttttgagactttttgaaaaaattctttgtgaactacggagggtagaggtatcacacccaactatgaagatcagcatcctgctcatgttcctttggggattatcctgtgctctcccagtaaccaggtatcaaaataatgaatctgaggattctgaagaatggaagggtcatttggctcaggcaccaacaccacccttggagagcagtgagtcatcagaaggcagtaaagttagctcagaggaacaggcaaatgaagaccccagtgacagcactcagtcagaggagggcctgggctctgatgatcatcaatacatttataggctagctggtggcttctccaggagcacaggaaaaggaggagatgataaagatgacgatgaagatgacagtggagatgacacctttggtgacgatgacagtggcccagggcccaaagacagacaagaaggaggaaactccagactgggaagtgatgaggactctgatgacaccatacaagccagtgaagagagtgccccacaagggcaagacagtgcccaagataccaccagtgagagcagggaacttgacaatgaggaccgggtggacagcaagcctgagggaggtgactccactcaagagagtgagagtgaagagcactgggtgggaggtggcagtgatggggagagcagccatggagacggctccgagttggacgatgagggaatgcagagtgatgacccagagagcatcaggagtgaaaggggaaactccagaatgaacagtgcaggcatgaaatcaaaagaatctggagaaaacagtgagcaagcaaacactcaagattcaggtggcagccaattgctggagcatcccagtaggaaaatttttaggaagtctcgcatctcagaggaagatgacagaagcgagcttgatgacaacaacacaatggaagaagtcaagagtgactctacagaaaacagcaactccagagacactggcctcagccaacccaggagagacagcaagggtgactctcaagaagacagcaaggagaatctgtcccaggaagagagccaaaacgtagatggtcccagcagtgagtccagccaagaggccaacctgtcatctcaagagaacagcagtgagtctcaggaagaggtggtgagtgagtccaggggagataaccccgaccccacaactagttatgtagaagaccaggaagacagtgactccagcgaggaggacagctcgcacacactctcccactcaaaaagtgaatccagagaggagcaagcagacagcgaatccagtgagagcctcaacttctcagaggaaagcccggagtcccctgaggatgagaacagctccagccaggagggcctccagtctcacagcagctcagcagagagtcagagcgaggaaagccattctgaggaagacgacagtgactctcaagacagcagcagatccaaagaagatagcaactccacggagagcaaatcaagcagtgaggaagatggccagttgaaaaacattgagatagagagccggaaattaacagttgatgcctatcacaacaaacccattggggaccaagatgacaatgactgccaagacggctattagcatcagctgtcctaagaagcagttgtcacataaangagtcttagggacttgaaaatgtatcatgataactataatttattgatgttttgatcaaaagaataaccagatgccatatttttcctgaaaggaattgctggacattacacttgtttttagggtgtcatcatttcacagaggtttaaatactgtggagtgacaccagtaacacagccaaagaggctagtaagcaagaaaggatctgcatgataactttgcagctgagatagttcctaattcatcaacgtaacaaacaaagctattgggtgtccatgtatataccaggcactatgctaggtgttgagaatgtaaagcaggttaagacttgtttcttgctcctgaggagcgtatagagnggacccacnnagctaacagagttaacagagggntatgtataagagaaacnngaatngttacaacccagtatgntgagtgccaaggncagngaggctatgaacacgatatcnatctgggnacactgagaaggntnaccaatgcgttggagaacgagggaggncttcatagcagaagacattggagttggaaggttgcatagggtttcctcattggagaccggggaattctattcttgggataaataatagtaaattctataggattcaatacttagtttgcaaaagcactttgaaattatggcacagtgagttgttttggataagaaaatctttttctcccaattaatttaccaattcatcattttttttttttgtagaactcccataaacatcaccttactaatcactggtgatgataagaaggattgggtcaggaagagtgggagaaagaaattcctctttacgtagatactttttagctttattttttctaaaatcagtttgcgtgcaatgctagaaaaaaactgttctctgagtcctttacagagcaaaattctgtatgtaagattcaattgatttttgacaaataccatttgaaatattacctcaacataaaatacttgttttgtaataaagattataatacccagaagaaatatgtg

SEQ ID NO: 101996 - DNA, 2647 bp, Homo sapiens
  misc_feature (1628)..(1628): n is a, c, g, or t
  misc_feature (1985)..(1985): n is a, c, g, or t
  misc_feature (1994)..(1995): n is a, c, g, or t
  misc_feature (2018)..(2018): n is a, c, g, or t
  misc_feature (2035)..(2036): n is a, c, g, or t
  misc_feature (2041)..(2041): n is a, c, g, or t
  misc_feature (2058)..(2058): n is a, c, g, or t
  misc_feature (2071)..(2071): n is a, c, g, or t
  misc_feature (2075)..(2075): n is a, c, g, or t
  misc_feature (2096)..(2096): n is a, c, g, or t
  misc_feature (2104)..(2104): n is a, c, g, or t
  misc_feature (2117)..(2117): n is a, c, g, or t
  misc_feature (2119)..(2119): n is a, c, g, or t
  misc_feature (2146)..(2146): n is a, c, g, or t
tgggcatagatttcctctttgagaacatcaacctgatttttgagactttttgaaaaaattctttgtgaactacggagggtagaggtatcacacccaactatgaagatcagcatcctgctcatgttcctttggggattatcctgtgctctcccagtaaccaggtatcaaaataatgaatctgaggattctgaagaatggaagggtcatttggctcaggcaccaacaccacccttggcaaatgaagaccccagtgacagcactcagtcagaggagggcctgggctctgatgatcatcaatacatttataggctagctggtggcttctccaggagcacaggaaaaggaggagatgataaagatgacgatgaagatgacagtggagatgacacctttggtgacgatgacagtggcccagggcccaaagacagacaagaaggaggaaactccagactgggaagtgatgaggactctgatgacaccatacaagccagtgaagagagtgccccacaagggcaagacagtgcccaagataccaccagtgagagcagggaacttgacaatgaggaccgggtggacagcaagcctgagggaggtgactccactcaagagagtgagagtgaagagcactgggtgggaggtggcagtgatggggagagcagccatggagacggctccgagttggacgatgagggaatgcagagtgatgacccagagagcatcaggagtgaaaggggaaactccagaatgaacagtgcaggcatgaaatcaaaagaatctggagaaaacagtgagcaagcaaacactcaagattcaggtggcagccaattgctggagcatcccagtaggaaaatttttaggaagtctcgcatctcagaggaagatgacagaagcgagcttgatgacaacaacacaatggaagaagtcaagagtgactctacagaaaacagcaactccagagacactggcctcagccaacccaggagagacagcaagggtgactctcaagaagacagcaaggagaatctgtcccaggaagagagccaaaacgtagatggtcccagcagtgagtccagccaagaggccaacctgtcatctcaagagaacagcagtgagtctcaggaagaggtggtgagtgagtccaggggagataaccccgaccccacaactagttatgtagaagaccaggaagacagtgactccagcgaggaggacagctcgcacacactctcccactcaaaaagtgaatccagagaggagcaagcagacagcgaatccagtgagagcctcaacttctcagaggaaagcccggagtcccctgaggatgagaacagctccagccaggagggcctccagtctcacagcagctcagcagagagtcagagcgaggaaagccattctgaggaagacgacagtgactctcaagacagcagcagatccaaagaagatagcaactccacggagagcaaatcaagcagtgaggaagatggccagttgaaaaacattgagatagagagccggaaattaacagttgatgcctatcacaacaaacccattggggaccaagatgacaatgactgccaagacggctattagcatcagctgtcctaagaagcagttgtcacataaangagtcttagggacttgaaaatgtatcatgataactataatttattgatgttttgatcaaaagaataaccagatgccatatttttcctgaaaggaattgctggacattacacttgtttttagggtgtcatcatttcacagaggtttaaatactgtggagtgacaccagtaacacagccaaagaggctagtaagcaagaaaggatctgcatgataactttgcagctgagatagttcctaattcatcaacgtaacaaacaaagctattgggtgtccatgtatataccaggcactatgctaggtgttgagaatgtaaagcaggttaagacttgtttcttgctcctgaggagcgtatagagnggacccacnnagctaacagagttaacagagggntatgtataagagaaacnngaatngttacaacccagtatgntgagtgccaaggncagngaggctatgaacacgatatcnatctgggnacactgagaaggntnaccaatgcgttggagaacgagggaggncttcatagcagaagacattggagttggaaggttgcatagggtttcctcattggagaccggggaattctattcttgggataaataatagtaaattctataggattcaatacttagtttgcaaaagcactttgaaattatggcacagtgagttgttttggataagaaaatctttttctcccaattaatttaccaattcatcattttttttttttgtagaactcccataaacatcaccttactaatcactggtgatgataagaaggattgggtcaggaagagtgggagaaagaaattcctctttacgtagatactttttagctttattttttctaaaatcagtttgcgtgcaatgctagaaaaaaactgttctctgagtcctttacagagcaaaattctgtatgtaagattcaattgatttttgacaaataccatttgaaatattacctcaacataaaatacttgttttgtaataaagattataatacccagaagaaatatgtg

SEQ ID NO: 101997 - DNA, 247 bp, Homo sapiens
actgcactctagcctgggtgacagagcgaggctccgtcaaagtgaaagaaaagagagagagagagaaagggaggaaggaaagagagaaagagaaagaaagtcagtccatggtttccaaaacatacttctgtttccattaatttattaggaatgctcttccatctggctgttgatctgtgtcctgtgtaacatcctttataacaaatggtacacctcagtaaattgtttctccaagttgtgtaaatca

SEQ ID NO: 101998 - DNA, 717 bp, Homo sapiens
gtttaaatgattaatctgggaataagttttttttaattttgttatctgttttctttttttagtttttttttctaattttcttaagtttttgtttgtttttgagacagagacactctgtcacccatgcttgagtgcagtggctaatcagagctcactgtagtcttgatttcctgggctcaagcaatcctcctacctcagcctcctgagtagctgggaatacaggtgtatgccaccatgtctggctaattttttttttttctatagagataggattttattatgttgcccaagtgggtcctgaacttttggccttgagtgattccccccacctttgcctcttaaagtgctgagattacaggtgtgagccattgctcctggctgggtatataggttttgagaggaagaacatacatgtaaaataacattttcatcacatcataacaagggtacatactgtcaacacaacttaccactataaagttgaccttcatcacctgccagtgatagtgtttttcaggtttctccaccgtaaagttactttctccccacatcttcccacccaaccagttcatactgtgccttttggaaggaagtcactatgcacagaccacatctaaggaatgggaattatgctccccttttttgaggttggagaatatatataagttatttggaattcttctgcaaagaagatttgtttcttctctcatttattta

SEQ ID NO: 101999 - DNA, 413 bp, Homo sapiens
ggaggctctcaaaggaattaattataagcaggggatataggggtattgtgaaagaagaacagataaatcccattgtatgaaacagtatgtagaacaagtgaaaggaaaagatgagacaagacaaaacattaaggttttaaacttacatacctcagagaatgaggtcattatcagaaagaggaaacattaaaggaagagcaagtatcaagaaatgatgagcttgctttgaagcactcagaggacacgatggggaatctcagcaagcactgggagatgtatctggagtgatgcagagataatagtgatagagatatttgggagtctgtattctacactaaggtaatacctgatgctaagaatgaataaccaccatcagagcatgtagagaaaacaaaattccaagagcataacct

SEQ ID NO: 102000 - DNA, 217 bp, Homo sapiens
ccttggccatttttctataaaggcattttttgtcttattgatctatagaatgttaatatattctaaataacaattcagatttatcttgcaagtatcttctgccagcctgctgtttgccttttttattcttgagacagggtctggctctgtcatccatgcgggagtatagtggtatcatcttggctcaatgcaacctccgcctcccaggctcaaacga

SEQ ID NO: 102001 - DNA, 336 bp, Homo sapiens
ttttttttttgaggtggagtctcggtctgtcacccaggctggatggagtgcagtggcacgatctcggctcactgcaacctccgcctcctgggttgaaggaattctcctgtctcagcctcctgagtagctggggctacatgcacatgccaccatgcctggctgatttttttttgtatttttagtacagacagggtttcaccatattggtcaggctggtctcgaactccctcggcctcccaaagtgctgggattacaggcatgagccactgcacacatatttctatgtatttctaacagttactgagcatcactgagactctggactctgttttttca

SEQ ID NO: 102002 - DNA, 1004 bp, Homo sapiens
agcgcccactccaccgcgtggtttccagctggaggctgggagcgttcgtggcttcctcttttcttgctgacccttcggagctctgggaagtggctgcaccttggcggctccccagagcgcgcggtgctaatcgtgggtcgtcagcctgggtggctgggcccggcttagggcagggtttggcatttccaatggtagggggctcggaccgtccctccgcgggaccctcccgttgggacaaggccgatcgcctgggcggttggagccgctatcctggcgcgagacggtggacaagtcctatattcaagagaagataactttgaacagtttcgaaggatctaaaacgtatgtgtctgcagacatcaatgaggatgaagaattagtagaagagattaatagatcaaaaacgtttgctggctttgcaggtggtgggcctgcctgggcatcggcgcgttggaggagacgccctggggggccttagctgccctgaagcggtagacaggtggcaacgtgggggctcaggagttgacaaacacaagaaagcagcgccgaattgcaggtttatccgcagcttttattttgaagacagtgccacgaaacctgcaaatcctggtgtcccaaatagtcaataccaagttgaaaaccatctgggagaggaaaagcgttgtgctttagacaggccgtctgagactcgtgcagaccggcttttgagagctggacaggtggtggatagatcagactccatacacccgaggagccccgcatgcatagtgaagaagctagataacagtcgtttcacaactggccagcctctgcgccacttgaccccgagagagctggccagtgctgggctgtactacacaggcactgatgaccaagtgcagtgcttctgttgtggcggaaaactgaaaaactgggaacctggtgatcgtgcctggtcagaacacaggagacattttcctaattgcttctttattttgggccacaacgttaatattcgaggtgaa

SEQ ID NO: 102003 - DNA, 765 bp, Homo sapiens
agcaggacaagaggccatatgcagttttccccttggctgatcttttcttcttgtggcttattccacaaacaagatgcagaatggcatatacagaaccctgcaacggcccagcctcatcacaagagaggaacagaccatagaggggtggggcagaaagaggaatgatttttttttaactgcgccttttaaactgcgaagcagctaagctccatatatacagaagagccccatggaagtctgggtgtatatagggttatgttttccaggtatgctaagtttctagtgcccagattagccaactgctagctagaatatttttcccactgtaattgcatttaaaaggggaaaatacaaaaggggaaaataaatttgaagagtttcaaatgtatgggataacaaagagaaaaaatacagctctattaagacccaatgataggagctgtctccattgcacatttttattctttctccgaggtcaccaatgtctcaaataccatgtcaaaggaaggagacgggtatataggaaatgttttctctcaagtatgctaagttcccagtgcccaaattagatgacttcttgctggaatattgctctcattgcaattgcatttaaggtcacaggtcatatgttttggacaactgatatcaactgactggcttcctggtgcaactgaactcttcctcttttgggactccacgcagttaccattgtatctctagcttgtgacaactcttaagtaaaatactgtgttctgggaacacaat

SEQ ID NO: 102004 - DNA, 763 bp, Homo sapiens
ttctccatgttggtcaggctggtctggaactccgacctcaggtgatccacccgcctcggccttccaaagtgctgggattacaggcacgagccaccgcgcccggcttgttttttaaatcttattttataatcatgtttgttccttatgttaccattattttagatgatgcttatcttttaattgatattcttagcctaaaaagttgcttaactttattatgcatttgtaaaataggactacttatttgttatttgctcttcatttattaccaatttttggttaataaatccatgactatctgcctcatacatcattttatagatgccaatcatattcttgctcagccttgtctgtccagaaaacaaaaggcttctttaaataaaatttttcctcatatagttatcctcatacccctgttttcttgaatcactttacttcttagacctgatccagaatgaagtctttcctgagggttcagtgatcaaccaataaccccagggtggaaacattgtggttttgtacaaagacagaatgctttggtgatgacctgatcatcaactgccttctcaatgccacttagaataaatgactctagctaatacatcttgtccctaacagaggcctggagcaagagaggaaaagtaacattggagccctggagacatttgcccaactctatggctaccttacccctagtctgtagccctaagatctatcaggacctgtggtctcatttctagagatctcactcttgttgagaatt

SEQ ID NO: 102005 - DNA, 435 bp, Homo sapiens
agaagggaggtcagcctcacaggtcccaaacccagggatttctcgtaagaatcagtttcccgagagtctcctgaccctatttttccccttacaataactccccatccaaaggtaaattctcagtctcatcccctccacctaaagatggagggagagggaggtaaaaattcccacctgttcccaccccacctgggcttccactactaccctgcttctatggacatggtgaagataccaaaagaggaagaatcgtgggcccagagcctcaaccccagcagatgccctttctcccttcattccagacaagccccaggccaaggcacacatgcctgctgtggggaccaaggggagtgagaagcaacatacaccaccaccaggtcaagagcctgacctcagcccacttgccattagtgcatccataccacacccagccca

SEQ ID NO: 102006 - DNA, 247 bp, Homo sapiens
tccttagaatataagctccatgacaataaagatttttgtctgctttacatggtgatgtattttaaggcctgaagcagtgtctggcacataatatacaataaatacttggtgaattatataattgaaagaatggaaaaacaatataggaactcatttgatttaatctaatccacaaacctttgaaataggtgattattattcttaatttataggagaggaaaaggaggctctgcataggcaggaaata

SEQ ID NO: 102007 - DNA, 696 bp, Homo sapiens
tgtattggttgctttatttcatttcataaatcaaattacggatgtagtatagtacatgtattttatgtttcagctaaggaaaaatccttaggtaattcacatattctgatgtgaattttatttacatttttttttttcagatggagtctcactctattgcccaggctggagagcagtggcaggatcttggctcactgcaacctccacctcccaggttcaagcaattctcttacctcagcctcccgagtagctgggattacaggcacgtgacaccatgctcagctaatttttgtatttttagtagaggcgaggtttcaccatgttggccaggctggtcttgaactcctgacctcaagtgatccacccgtgttggtcttctgaagtgctgggattcaggcgtgagccatcacgcccggcctattcacatattctgatgtgaattttatttcacaaatgccaagtatttgtgaaataaaatgattggatgggctgagctccacagccgactatgatctttaagattacctctacctctgatattctatgacattaaaaaaaaccttcatttccctaagaaaatttctatggtagagtaggaatagtaacacagcaatatccttcttaatgagctttcctcagtggaaggtcacttagagtttaatgggattaatttggctgacatgttcaattttaaaa

SEQ ID NO: 102008 - DNA, 750 bp, Homo sapiens
tgggattacaggcatgagctaccgtgccttgccggcattatataatgttcagaggaaccaggatcttttcatttaaaatggttctgattttatttgacaaatttgagtggactagaatctttaaatattttgcaacgtctttctagttactgttttcaaaaattagcttatttttcttattgattagtgtaagaatgacataatggtttgagaaatgaccataagtccaccaaaagttttccctgtgagtactgaagcataaaaagtaaaacctaaagaagaaatctggcatctttagaaatcttgctggtgctaaagagagaggaaataattttttatacagaaggcatgtctcaagtgaaaccaaaacaccaaagcacattccttcagtgtatattcacatggggtaaatatgatgctgagtaatgtgcacaaaggaaactcttgacaaaaacacagtcatcttttgagtatgttaggtcatttgttatttcatttgaaaataacctggctggggcgtggtggctcacgcctgtgatcacagcattttgggaggccaaggtgggtggatcacctgaggtcaggagttcagaccagcctgggcaatgtggtgaaaccccatctctactaaaaatacaaaaattagctgggtgtggtggtgggtgcctgtaatcccagctacttgggaggccaaggcatgagaatcacttgaacctggcaggtggaagttgcagtgcactgagattgggc

SEQ ID NO: 102009 - DNA, 307 bp, Homo sapiens
ctgcctgagggactgctatctgtcttgcctgactcagtactgatgggaacagctgcatcatttggatatcaggttggaagctgcggaaacaggtggttggtaccactgaatgtgagaggtgtagtgagtccacagaactgcaggaacctggtggcaaaaaattatgggcagaggaataaaatacagcatctaaatctctgagaagaagtagtgagatttttaggtaattaggacatttaaaagaagccgtgtgtatggaaaactggaattaaaacacacaggcccaggaaagacacaaccccagaaa

SEQ ID NO: 102010 - DNA, 677 bp, Homo sapiens
gtggcaggcacctgtagtcccagctacttgggagcctgaggcagaagaatcacttgaacccgggaggcggaggttgcagtgagcctagatcacgccactgcatttcagcctggtgacagagccagacatcatcaaaaagaaggccgatttcatgtggtttttcctggctgtcggtgagtccacagctaagaaaacactaattcagtacaacctaaagtgtaatctgctagtatcttttacagctggtggtggtaaaaatatgtgtacagcggaagaataattggacaaatttacaaaacttgtgaaaatgtaaggtggtttattcattgtgttattcatcagcaggtactttgcagaaaatatcttaatttatcatgtgttattgaactcttagcatcagtaattttacttggttttgtgaatcatcatcagttccataagtttttgtcagaaatagaagctgaatattctgatgtgccctgccgcgcagtagtttgatggcttagcagtggtagttttctttcaactttttgagctcagggctgagattgaaaattttctgaatgaggagaatcgctcccaaccactattgaatgctgaatggctttggaaattagcttttgctgcagactaggtaatgtttgttaatgaattcaacctaaaactccaaagtaaaa

SEQ ID NO: 102011 - DNA, 331 bp, Homo sapiens
gagacagggtctcactctgttgcccaggctagagtgcaatggcatgatctcagctcactgcagcctcaacctcctggactcaggtgattctcccacttcagccttccagatagctgggataaattcttaaaggtaggatttgggactgcgagtgttaattcttcaagtgtaatttaagaggcatcccatacttgacaacctcatataataggtactaaaggtaaggtcccatgggagaagaggctgtgtcccatttatctctctgtatcatcacagaacataagcctggcacagagaagttaataacagcggacatatataggcaacacac

SEQ ID NO: 102012 - DNA, 257 bp, Homo sapiens
ccgagttccgccagtcggacgaggagaacgaggacccactggtgcccacatctgtggccgccctgaagtcccagctcacccctctgtcatccagccaggagtcctacctgccaccaccagcatacagccctcggttccagccccgcgggctggagggccccggtggcctggaaggtcggcttcaggccacaggccaggcccggccacctgccccccggcccttccaccatggccagtattatgggtacctcagcagc

SEQ ID NO: 102013 - DNA, 354 bp, Homo sapiens
ggctttaaaaaacaaagcttcaggagacgaagtaagatactcaaagtcacatggctaataggtggcagggctaggatttgaatgagactgactcaaaactataatgcttaacagttacacccaaatgaaatctttctgaataatagtttcttatataattatgcgaatgttgatatttagtgttgtttgaataagatatatgtaaaagcctgttgcaaattagaaagtagaccactatacccatgctcatttatgtaataaatattttaccatttcctatgtgccagaaattatgctgagtatgggagacaagacagatcctctgcagtcccaagtctgaagatgcaggcagta

SEQ ID NO: 102014 - DNA, 598 bp, Homo sapiens
acacacatgtaagttattagaggaaaatctttcagaatttgtatttctgcataagtattaccaggctaccaagtgctaactctcagatgtcaaatcttcaaactagcattgcattcatttgtaatttcttaactctcagtgttcggtagtgtagcagttacattagcagtgtaattaggcttataaaattcatattctaacagttgatatttcttctgtagtgatgcttatttataatttttataactaaaaatgtaacaaaagtcactagaacttggaaaatatccttttaaggttttttttattttgctttttttttttttctttgagacagagtctcactctgtcacctaggctgtagtgcagtggtgcgatctcagctcactgcaacctctgcctcctgggttcaagcaattctcatgtctcagccttgtaggtagctgcaattacaggcgtgtgctaacacgcttggctagtttttagtagagatggggtttcgccatgttgcccaggctggccttgaactcctggcctcaagtgatccacccacctcatcctcccaaagtgctgggattacaggcgtgagccactgtgcctg

SEQ ID NO: 102015 - DNA, 457 bp, Homo sapiens
agtgtgatatatcctttaggtctgctctaaggccacagccatgagaaaataggaaactttacattttaagatgctaggacagtggtccccaacctttttggcactagggatcagttttgtggaagacgatttttccacagatgggagcaggaggcgggggatggttttaggatgaaactgttccacgtcagatcatcaggcattagttagattctcatgaggagcatgcaacttagatccctcacatgcgcagttcacaacagggtttgcactcctgtgagaatctaatgtcaccattgatttgacaggaggcagagctcagctggtaatgctcactcactgttcacctcctgctgtgcaacctggttcctaacaagccatgggtcagtaccgccccaggggttggggacctctgtgctagaacgcaaaagcttttgagttcactaattggaaaaga

SEQ ID NO: 102016 - DNA, 147 bp, Homo sapiens
cttgacctcctgggcccaagtgctcctccccatctcagcctctcaggtcactgggaccacatgcacacaccagcaggcctagctaatttttattttttttgtagagacagggtctcaactatcttactcagactggtctcaaattcc

SEQ ID NO: 102017 - DNA, 1457 bp, Homo sapiens
agcatttcaaaagaaatcttttactgaatggtggacttaacgtcttcagtaaaccatgattttaaaagatgtgctgtcatccaggcatagtttttctatctatagagtctatagagcacaggcagagtacatttagcaaaattcttaaggaccctaggatttttggaattgtaaatgagcattggcttcaactttaagtcaccagctgcagtcctttgaagcttggaagccaggcattgattcccgttctacagctatgaaaatcctagatggcatcttctttgaatataaggctattttatgtacactgaaaatctgttgtttagtgtttagtgcatccatcttatctagatcttctggataacttacagcttcatcttgcacttttatgttatggagatggcttctttccttaaacctcatgagccaacctctgctaccttcccactgcagtttcccactgcagtttccctctgcggtttctctcagccttcgtagaatcgaagagagttagggcccgctctggattaggctttggcttaagggaatgttgtaactggtttgatcttttatccagaccatttaaacttactccatatctgctgtaaagctgttttgctttcttattcctgtgttcactggagtagtacttttagtttcttttaagaactttttctttgcattcgcaacttggctgtttggcacaagaggcctagcttttagtttgcctcagctgtcaacatgctgtcctcaataagcttaatcatttctaacttttgatgtaaagtgagagatgtacaactcttcctttcacttgaatacttagaggtcattatacggctagtgattggtttaatttcagtgttgctgtttcacgaaataggaaggcctgaggagagagaaaaggaaacagcagatgtgtggagcagtcagaacatacacatgtatccattaagttcactatattatatgggcatagttcatggtgcctccaaaacaatagtaacatcaaagatcactgattgagatcgctataacacaaataacagttaagaaaaagttcagaatattgggagaattaccagaatgcgacagaatacatgaagtgagcatatgctgttgggaaaatggagttgatacacttgctaggtgtgggattgctacaaaccttcgatttgtaaaaaatgcaatatatatgaagtatagtacaatgaagtacaataaaacagtgtatgcctgtagtattatctgactggatgtttactatctacagaaacatctgaattataccatttgatctttgctttaaattaagttggtgtcttaaccacttaggtctggttgccttcctctctatacaaatcggccctctatgtctgtgggttctgcatctgtgggttcaaccaattgtggatcgaaaacatatagaaaaaataaaatgtgtggttgcacctgta

SEQ ID NO: 102018 - DNA, 1531 bp, Homo sapiens
agcatttcaaaagaaatcttttactgaatggtggacttaacgtcttcagtaaaccatgattttaaaagatgtgctgtcatccaggcatagtttttctatctatagagtctatagagcacaggcagagtacatttagcaaaattcttaaggaccctaggatttttggaattgtaaatgagcattggcttcaactttaagtcaccagctgcagtcctttgaagcttggaagccaggcattgattcccgttctacagctatgaaaatcctagatggcatcttctttgaatataaggctattttatgtacactgaaaatctgttgtttagtgtttagtgcatccatcttatctagatcttctggataacttacagcttcatcttgcacttttatgttatggagatggcttctttccttaaacctcatgagccaacctctgctaccttcccactgcagtttcccactgcagtttccctctgcggtttctctcagccttcgtagaatcgaagagagttagggcccgctctggattaggctttggcttaagggaatgttgtaactggtttgatcttttatccagaccatttaaacttactccatatctgctgtaaagctgttttgctttcttattcctgtgttcactggagtagtacttttagtttcttttaagaactttttctttgcattcgcaacttggctgtttggcacaagaggcctagcttttagtttgcctcagctgtcaacatgctgtcctcaataagcttaatcatttctaacttttgatgtaaagtgagagatgtacaactcttcctttcacttgaatacttagaggtcattatacggctagtgattggtttaatttcagtgttgctgtttcacgaaataggaaggcctgaggagagagaaaaggaaacagcagatgtgtggagcagtcagaacatacacatgtatccattaagttcactatattatatgggcatagttcatggtgcctccaaaacaatagtaacatcaaagatcactgattgagatcgctataacacaaataacagttaagaaaaagttcagaatattgggagaattaccagaatgcgacagaatacatgaagtgagcatatgctgttgggaaaatggagttgatacacttgctaggtgtgggattgctacaaaccttcgatttgtaaaaaatgcaatatatatgaagtatagtacaatgaagtacaataaaacagtgtatgcctgtagtattatctgactggatgtttactatctacagaaacatctgaattataccatttgatctttgctttaaattaagttggtgtcttaaccacttaggtctggttgccttcctctctatacaaatcggccctctatgtctgtgggttctgcatctgtgggttcaaccaattgtggatcgaaaacatatagaaaaaataaaatgtgtggttgcacctgtactgaacatggtagactttttttttcttgtaattattccctaaacaataaagtataactatttatataaggttta

SEQ ID NO: 102019 - DNA, 486 bp, Homo sapiens
gacttaacgtcttcagtaaaccatgattttaaaagatgtgctgtcatccaggcatagtttttctatctatagagtctatagagcacaggcagagtacatttagcaaaattcttaaggaccctaggatttttggaattgtaaatgagcattggcttcaactttaagtcaccagctgcagtacccctaacaagatagcctgtcctttgaagcttggaagccaggcattgattcccgttctacagctatgaaaatcctagatggcatcttctttgaatataaggctattttatgtacactgaaaatctgttgtttagtgtttagtgcatccatcttatctagatcttctggataacttacagcttcatcttgcacttttatgttatggagatggcttctttccttaaacctcatgagccaacctctgctaccttcccactgcagtttcccactgcagtttccctctgcggtttctctcagccttcgtag

SEQ ID NO: 102020 - DNA, 830 bp, Homo sapiens
gttgcccaggctggagtgcagtagcatgatctcggctcaccagaacctctgcctcccaggttcaagcgattctcctgccttagcttcctgagtagctgggactacaggcacgtgccaccatgcccagctgatttttgtacttttagtagaaacggggtttcactatgttggctggtcttgaactcctgacatcaagtgatccgcccacctcggcctcccaaagtactggcattacaggcatgagccaccacgccaggctggtagcagtctttcctagaatgtggatgccttggaaaacaggggctctgccttgtttccctagaacctagaatggcatctggcacacagcagatgctacatctattgtaaatgaatgaatgaaagaagtgtccttgcagccacactggcagccgtaacatagtggttataaatctagactctggagtctcaagtgcaaatgtcattggcctctcctccagcctcctcaaggggcactcaatgactggaagcgccttgatatgactgtggttggactgacatgactgccagatggtgggacttggtctggagcagagactacttggaatggtagaggcaaaactcaacagcccctggagctgcgcttgtggtggagctggaccctgattttagctggaccttgtttttagagacagggtttccttctgcagtctcaatctcctagccttgattgatcctcctgccttggcctcccaaagtgctgggactacaggtgcatgcaaccacacctggctaattttcttctcttctttctttttttttttttttttttgatggagtcttggttctgt

SEQ ID NO: 102021 - DNA, 191 bp, Homo sapiens
tattctcaaataggaattttattttaaatagcctttgagcagtacctgggtgctgtcttgcatttgcctatgatagatttgcctggaattaacaataggtgtttagggagtgaggctcctgaggtgtttgtcctggcatgtacattcattcctgtggaggggtcctgtagccttggagctctttgaggctg

SEQ ID NO: 102022 - DNA, 212 bp, Homo sapiens
cataaacaaaaagcagttattatgagtaatatttcaaaataatcagtagcaatgatctttactcattttagaaagtaaaaaacatatttttcaaagccatttaagagattatcagaagtcaacagagttgccatactattttgttgttaaatggggatctcttttatctgagcacataatagtttggtcacaatacaaaagaaaaccccaag

SEQ ID NO: 102023 - DNA, 407 bp, Homo sapiens
gcttggcacaggcaatctcagggtacaacagatacaaggagcagaggaagaaaaggaattcactactctccagcacccaaagggtgcttcacatctcacaatgagcccacaagatagatattattattcccattgtgcagaaagtgaatatgaagcaaaggccaagcttccatgaatggacttaaaatactgtggctgcacacaggacctgtaatcccagctactcaggaatatcagatctgactgcgtgttctcacttcgctttctggaacttgctctcattttcctgggtgcatcaaacaaaatagaacacaaacaatccagttcccgcctctcactctgaactcctcccaagactcgtggggtgcggcagcccctgggaacacccagcccttcaaggtcaaaca

SEQ ID NO: 102024 - DNA, 500 bp, Homo sapiens
cttttatgcttttattttcttggacacattaaaatggagagactttaaataagatttggagagcctcttgaaataccacaatataacgacatatatttattgtttgacctatttccccctataatctgactcacttttaaattcttaacgcttcttaagtgacctttagtcactgtcagattgccttttaaaggagtttactgtatgataggaaagaaagtattaaaaatgaactagagcaatttggctacatactacgactcagatgagagatcctagacttcagggtcaatcagaattaatttcttttctaaaatggtatgaatttaatgccacctattgagaagtaagacgtatgtgtggaaaagaggactgtgatgaaagtaaaacataatctagggccagacatggtggctcagacctgtaatcacagcagtttgggaggtcaagttgggaggatcaatagaacccaggaaattgagaccagcctgggcaacatg

SEQ ID NO: 102025 - DNA, 186 bp, Homo sapiens
agagaacgagaactgagaaagtggagacagtgcctctaaacagcactttaaagacatgttgtatggaaaaaaacaagattgtaacaggagggagaaggtcagggaagagttttttttggctttggttgacttggtttttaagatgcaagattccggcacctttgtatgcctttggagttagagaga

SEQ ID NO: 102026 - DNA, 854 bp, Homo sapiens
gatctcactgtgttgccaaggctggtctcaaactcctggcctcaagcgatcctcccacgttggcctcccaaagtgttgggattacaggtgtaagtcactgcacctggccagttattttattttcaaacattttcttaagaaactcctatattatttctattaaaatattttgactgtttaaaataaaacactgattaaatattttaacatttaccatttaatttaaaatttggaaagtactcttggagcctgcaaatgaggcggttaaaaacatgaagaacccttctaacttgcactagtgcttctgcgtctgttcagaatcgcactggagcttatccagcagttcataaacccacaaaactctgtcttcgcaaatagaggacactatgtgttaagaagcataaggcctcaaaaatacataccacacagcttcacagaggcacgcaaaccaaaggaaatgcacaattggaagccacattttttggaatgtaataaaaggttgtttagtgaatgtttctaagcctctcagctgagtaggtagcacactccccgcagaggtgaggccttctgacgccatcacagggttcaacgctggtatctcctcagggcttcagtcactgggctagggcagacatctgtgctcctgcacctgtaaagatggcaaggcagtaggtgctgcagaattttaggggttgtcagggagatgcttttgaaatcattatagctttgggaggccaaggcgggcggatcacgagttcaggagttcgagaccaacctggccaacatggtgaaatcccgtctctactaaagagacaaaaaatcagccgggggtcattgtgggcacctgttgatcc

SEQ ID NO: 102027 - DNA, 858 bp, Homo sapiens
gaatcctctattttgaaaaaaaaatcagatgcatcaaatgactcttctgtgaacaactgtttgagaacgatactaatgtcacacataggaatactacattttctaggatttgacattttcagtgatcgagaattactacattttgtaaatgaaaataccactactaaaaacagaatgatatacatagaatgatgtcttttgtttccaaagtcgatatactacagcaatgcagaaacaatcatgaaagcaacattattttgtggcaaagttgtcttaaggtaaacactgcagccacaagcaccactggtgagtattctcagtgcagacaggaaagagttaaagcaataggtcttccaggctttgctgagcagctctctgtggaatgggatatgacttcaatacctgttcaggcagttacaactctgccttagccttcgcttcttgcttttggcctgaatctctctcctttgtgactctgctcagctgtgacaaagggatgtggccactgcacaccccactgtgacccacctgcacaggtgcatgtctgtgccgtttgcctgggtggccttcactctgatccagagcagcatgcaaggacattgtcctggccaagaggtcatgggcgagacttctctgagctcttggagagtttggtctctttgctgagatccataacattttgcaggtatttctcaccgcctttcacactttgcccagataccattgtgttggacacttttcatcacaatccaaggtttatggttacggttgtctctggtctcattggatgtgctttttttcctctttatgttttattccttttgttgtttgtatttggctttacttggaaatggaata

SEQ ID NO: 102028 - DNA, 451 bp, Homo sapiens
gttttcacttgtctgtattgtctaaattatttttgtaataaactatttttaaagtgcctttgtgcagatgagatacacaggaatatgttactgtttctgagggaaactatctgagcatttaacttattctcatgatttccataccaataagtctattgttgttaccaaacacatatatcaaagccatgtctaaaagagttagcacccttctgagaaaaaaagcaaattcttaaaatcaaaatgcaaacacttcagttcacagcttactaacccaagaaaccatcttacaagagaacagatgtgattagtgaaataaattgtttaagttacggggaaaaacatagtcgctggaagtttaagtagggacatgttccagcagttaactgaaatataactgatgtcccatctctccatttctctctataaataagtctttaccctgactctctcc

SEQ ID NO: 102029 - DNA, 445 bp, Homo sapiens
gacccttctcatgtatttccttaacttccttagagaagtgacataggctacccaggaggcagcagggacatcctttactgttgactgaaatggtgatgaatctgccatgggagtggaccataacctggctccatgtccggatttaaccctgtctctagttaatccctgctggagcccctgttcacacagtctgatttcctgggctctcagctgtcccccaaggggtgttcctccctcccggtctcattcaagctgaccctgtgctgggaactcagccccttgccctcctctatcctcctcatcctttggatttgggacctggttctgctgccccgtgaggccatccctgatggcttctcttctccctgagttctcgtccttcatcctgccttcctgtgccgtgcaggacgtgccttttcttgggtccactgccacacgcctttct

SEQ ID NO: 102030 - DNA, 907 bp, Homo sapiens
ggaatcagagaggtaaaaaatgccatgcctgagcgttagtgccggctgacacttggccttagcacttgggagacataggaatagttggaagcatctatggggcctgggctttgcctcccattggctaaatggttagtatacacaatctcatcagatctttataaacaactctgtaggatgaatattttatttccattaaaaagatgagaaaattgaagctttgctagatgtcagtaattggtgcaagggggcagggttgttaaggtagagcagaatacctgtttcaaagaccattcctttcggggagagcatggtatttgtccttcatgaaatctgccttaaagttcaggaagttgcctgcaacttcttgacttccccttaacaactgactgtgaatctgtcacttaaatattgttctaaatgtgtctttagcttgtgttttcagtaactgtggcccacagtttcttaatgagagtctgataataaacaagttaaacaatgaaaaagggttctctccttagggcccttgcctgagcttgtttctatttcctctgggaggaaaaaagaaagagatgtgtcagaacagaggtggaacttctcagagattgagagatccgtctactgtaacttagtcatcaccatcaattttgttacctgaggcaggcagagctgctacctcccacagcctgtggttatcctcacaacagagttactaagcacggagccctccaggcccctgccaagcgcaccctgcatgtgccttacgcaaggtgtccctgagcattgaatgttgggtggggtgggggttgcccaaggttatagcaataaagaaaaaacatagtgccaggtgcttctctgaaatcatttaccccttcttttgtagttaggttttggctttcaaaagaca

SEQ ID NO: 102031 - DNA, 317 bp, Homo sapiens
gaatctgtacagtggtgcagtgttaagggcaaagagcactttggagccaaggcagacaaaactgcgcagagctcccaggcctgggtgatgatccctcttcccagacatctgaggagttgccatattgatgttctctcattgtttcggctgagctggaatgatcgaaataattctgggactatgacaagtctcaccagacctcgttatggatcagggagaggtgaactttaaaaataatcaagttcaaaggagagccctgtcacctgtgatcagtttcgttagcagaatcccaccagccttgctccccatatccaaaa

SEQ ID NO: 102032 - DNA, 264 bp, Homo sapiens
agaacgagaatgttaatcccaggcagcctcgctgacttctccccgcctgctccagcccaggggctgggtttccaagatgatccgccccctccccctttccctcaagtgacagtgcagcagtgactttgttctctcttaacctccagagaagctgcgggaggaccccatctccgcttttccacctatcttcctagctttgcggccttcgaagctggtggatttattgctaccgtgatggttgcttagcagtaccttcctctccca

SEQ ID NO: 102033 - DNA, 432 bp, Homo sapiens
agtgtgccaattgtgcaaatataatgtaattcataccttatttaggtcacaagcctattctgtcaatccagaagaaagaacagctcctgaccaaattgtttttcaagaattgtttgtcttacctgaaatgtctcagcattgaaactactctcggcctatcatgttcaattaagctaaggatttaaaagttaaaattgaactctattcagcagattacatcagtgcagttgtattcttgtccagtctgaggtccagagtccccaaaagctggctgcttacatgttgtgccctggtaccttccatggaagtggggagactgctaaacgcagtgctcaaaaagtcttattatgcttcccgctgaatggcatgggtccaacttgtagaagtgtttttagtcatccatgctgcattaatgattcagagagcctttag

SEQ ID NO: 102034 - DNA, 396 bp, Homo sapiens
tttggttataggaccttttcaaatgggttacgtaggttgtatattctttgacacccatcatgacaaaactattaatacctttctttctgaaatgtgagtcatattttgcctagctttctgactcatatcagagttcttttctctccgacatatagaagttattctacagttttctaagttctggttttgcaaatgagaattcaacttactttccattgtaaactttacatttctcattctggaagagcatttgattttcagtttatccttgaaagtaaaaaatttgaaaaggatacgtcttgttgtatgtgtgtgttcctattaatcacactcagtgagccctgtaagtctagaggactcaaatctagtgattgtaatatgggagcaaaatgatgt

SEQ ID NO: 102035 - DNA, 236 bp, Homo sapiens
agaaaatgagagaaaaaaatggatggaaaagacagaaaagagtataacaatcatctgagatatggtgaaaaggttcactgtacacgtaattggaatcccagaaggagaaagaatggggcagacgtagtgtttaaagagatagtatccaagatagtccaagagtctcccaaaacgaatgaaaaacatcaagagcagggggaaaacagaataaaatggaacctttttttctttttttt

SEQ ID NO: 102036 - DNA, 170 bp, Homo sapiens
gtgtgtcctgtatctttagatagggtggatgggagtagcttctcagatgcagtgccatttaagcagagacatgaagtgagagcacacagatggccagaaaggaggccccctgcatgcagtagagaggtgagcacaagccgagaagccacaggaacccaaaagaggggtgg

SEQ ID NO: 102037 - DNA, 363 bp, Homo sapiens
agtctcagtgtggaaacggtggcacttgccctggctgggtttgactgtgtgagttttgtgttttgtaattagaagggaggtgtgcctctgctttatggacaatgcctggcaaatgctgccctccctatttttgtcgcatctgcaagtgtggtatgcatcttgtaaacaggtcactaattccaggctaggggctggaaggcagctataatctcgctcacgtggtttcacccgctccatgtgcgctggatgccgacagcacgaggggaagcctccggagccccactcctcctcggctgctccacacactggaaactgcatctgacagaaagattaaacgtctgcattttatcacctttgttgaac

SEQ ID NO: 102038 - DNA, 146 bp, Homo sapiens
tttgtttattaataatgaaattggtgctgacatgtaatgacttcacaagttttacgagggaaaactgaaaaaggaagtaatataaattttgtggggtttttttgagatggagtcttactcttttgccaggctagagtggtgttgca

SEQ ID NO: 102039 - DNA, 363 bp, Homo sapiens
cttaaaatttctgggaggcctctacaactaaacagcccacaatcgttaaatgtatattacttgtagaaggcacaggtgtggaatataagaacagggcagtttaagagcacccctcctctatgtggtttcagtttacgcaggaagataaggccaggctctgtttgtttttgaacctgaaaccggacagggcagtcagtggcaacagcagatgggctatgtggacagctcaggtattggaagatctcactaagggcaggtggggagggaggcttccaccaaaggggagatttgacctaactcccgaaaggtgggaggcctcagaccagaggtctgccatggcctcctcccactcccttacaatct

SEQ ID NO: 102040 - DNA, 431 bp, Homo sapiens
tgagatggagtcttgctctgctgcccaggttggagtgcaatggcgcaatctcggctcactgcaacctccacctcctggattcaagctgttttcctgcctcagcctcctgagtagctgggactacaggtgcccgccaccacgcctggctaatttttgtatttttagtagagacgaggtttcaccatgttggccaggctggtgttgaattcctgacctcgagtgatccgcctgcctcagcctcccaaagtgctgggattacaggtgtgagccactgcgcccggccaaaatcaggaaatctttcccaaaacatcctgtatatagcaacactcataactactactttatggcagaataatggacccgattacaggttcacatggaaaaagttgatatttcagccacgaccaaaatataaacaggatttttcatag

SEQ ID NO: 102041 - DNA, 1548 bp, Homo sapiens
tccaccttagaccaaagagtcactagcactttctacacattgcaaatattcagtaaggatttatttctcatgctttacttgtatcaattaacttgatcctcacaacaatactgtgtgaggtaggtgaaaaactggaggcatagagatatggagtcaattgcctgagtgaaataactggggtatcaatcaagggctcaaacccagaaggtcttcttccaggacccctctcttaatcactattcaagcaactctcccaacagtgattttccacacttttttgatatatataccatggattcttaaattttttttctctttaaaaattgttccttccttttgaaattcatcctcacttttataattttagcttgtcaatattagtatgacacatttgggaaacttgctttataatgctccaaattctgaggagtaactattctatctagggatgtggtctgtattttaaatatgcatgcagtttggagctagactgagagagtagtcaagagcaaaggggagtccagagactaattcctcttttgggtttctcacaggctacatggcttctcactgagatatctctcccactctttgcaagtctctgcataaccttccttgcatatgggactttaaggttgccaccacctctctccacatagtaacctgttacacttatttctcagtgtgcagcacctcattgtctaggttatttcttagatcaggtttctgaaggatggaaaatctaattatgttttattagtttgagccacactacttatagatcactgcttaacctatgttgtctgtccttagttcttatgcctgccctggttcagagaatcaaacccagaggtaaagctggggctggggttccttatgcaaagagagctgtctctttagtaggaactctggattggctcattttgctttaaagaagttatgggcaggaggagagtaactgagaaactgtaattgagatataattaaaataagataaaattgatcaaataagcagaaaaagtgggagaattgaatggctgagtagaagtaatttttcagcgttggaagagatctctgaggcatgataacgccagcagtggtgctatattctggcacattagggagaagggttttgagatgtgagtgaaggtattgaccatatcctgctaagtaatgctgtgactgattgacaatatcgtggttgaatctaaagctagatgaccctgtcagtagggaggcaatagtggggagaaacatttctgccctagaaagatttcctgtctattctaccaagttactctgtgttgctcaaagtaggataattccaggtgaccaggtcatatgaaattatatgttaaagaatttgaattttaatggcataaaatgctagattatattatgtacataacacttttatctacactgtaaaaataaaggtatttgataatatttatcagtgtttgattcttcaaggaggggcctagctgccatggctaatgcctgtaatctccgcactttagtagactgaagtgggtggatcgcttgagg

SEQ ID NO: 102042 - DNA, 402 bp, Homo sapiens
ttttttttttttaaaaagagacagggtctcattctgtcacccaggcttgagtgcagtggcacaattataactcactgtagccttgaactcctaggctcaagggatcttcctacctcagctttcagagtagtggcactacaggtatgtactaccatatctggctaattttaaaaactttttttttaagagacgggagcttactttattcctcaggctgatcttgacctcctggtctcaagtgagcttcttacttcagcctcccaagtaatgtcttagttacctattgcagcataacaaatcacctcaatgtatgcattttttttaattgaaaacaaattttttaatttttgtgggtgcatggtgtatatatggggtacatgagaagttttgatacggtcatgc

SEQ ID NO: 102043 - DNA, 413 bp, Homo sapiens
ctcctgatttgaaagtaggtatcttgcaataccaatttgaaaggtatgttttgccttgtctgcagctgaaatttattggagacagtgaaatgtgttcctaaatattgctgccactgagaacacaaaaatcgaataagatgtttactgtatggttgatattgaacctaaaatgggaagtggcccaccacataatgtcaatcagtattatatggacattatccaaactcagaaattttggttgcattaattctagttaacaattaaggccgagtgcagtggctcacgcctgtattcccaatactttgggtggctgaggcaggaagattacttgagcccaggagttggagtctgcagtgagccatgatcacaccactgtactgcagcctgggctacagggcaagacagcatctctt

SEQ ID NO: 102044 - DNA, 296 bp, Homo sapiens
tctgttgtggagatgtgtcagaaatgtttggtacataacaagtatccaataaatgctacttaattttaaattatctctcaaatatgtcccttctctccaataggatccatccatccgtccaagtaaatattttttgagtgcctgctcctgcctaccatcatgctagtggcagtctagctcatggcagcaaatctagggccagcactattcctacagcctcccatctggcttctccatcttcagtttctccagagactacatagcctctgggctccacattttaatatcattgttaa

SEQ ID NO: 102045 - DNA, 467 bp, Homo sapiens
agacaggacagtgcttggctatgagccatcggtcttggtgtggtagatggcatacgtagagaacaagccgtgaccagcatgtcctcttgttcccttcttgcctggtagcttcctgatgtatcatccaggttgaactttattccccttttttcaccagctttgctcttcctcttggccctgctctgcatccattgggaccacttacttcccatccccacttcgctagctccagtccacagctgctgtagcagaggatgctaatggcccaggcttactgtatggggtagcggttgggggtggcctgggctggggccagccagctttcgggcatagagagggtgggggaattcgagtgtccaaccaggacaggaagggaaatgctgagctctgagatctcctcccttttccacccccagctgcctctgtttcctccctcattcccctgtactcctgcctggcttcctgcc

SEQ ID NO: 102046 - DNA, 324 bp, Homo sapiens
tcctcctactgatgtctttcagtagattcagaagtgattgtggcaaacatagtatcttgaaggaagagatcgtgttttgattagcatctcccgagcctagttttgtgtttatgttcatggtattgaggaaataaagatcaatttggacttcttgcacctgttaatacatcctagttcctgactgcagcaaaatgactctcagtgccccttctcttcttagtgattgcctaagatgacagcttcattccctttattattatccaccttcttcccatcttcattgttttctcagtgaggactggactctactggactccactggag

SEQ ID NO: 102047 - DNA, 287 bp, Homo sapiens
ctcaggaggctaaggcaggagaatcacttgaacccgggaggcggaggttccagtgagctgagatcgagccactgcactccagcctgggtgacagagtgagacgccttctcaaaaaaaaaaaaaaaaaaagatatttcttagacaaacagcactataataaatcattgctgcatatgtgttcaatattggtcttcccaaataatacttcatactttctttcttgtattatagtatcacccataatgattcctttaatttagcatttatttactttccttttttttttc

SEQ ID NO: 102048 - DNA, 390 bp, Homo sapiens
caagactagcatgtgaaatattcagtgactaccatccttcaatatactttaacgccaaaactatctggggagacagtaatcccagcactttgggagcctgaggtgggcagatcatctgaagtcaggggttcgaggccagcttggccaacatggtgaaaccctgtctctactaaaagtacaaaaattagccgggtgtggtggtgcaaacctgtaatcccagctactcgggaggctgaggcaggagaatcgcttgaatctgggaggtggaagttgcagtgagccaagattgtgccactgaactccagcctgggtgacaaggaagactctgtctcaaagtaagcctgaccaagaatgatggtgattgtccccactcccaaccccaatctattc

SEQ ID NO: 102049 - DNA, 426 bp, Homo sapiens
ttagctccctggagttctcttggttagaaagttgagtcccattgtttcttggagttaccttccagtgaagagagcctccctatcccacttgactctgaacttgctgagttcagggtccatgttgtctttggctttgtttattttgtgcacctggcacagccctgcagagtaggtgctcagcaaatgttgctgacctatcagaaacacagtctactgtgggaggtgctaatcaaacaatcatggtgcaaggtgctatgggtaacatctgtgttcagcagagtgggtaaagtctaggatggaggtggggttggggaagcattgggaagccctgcctagagtggccgtgagattagttgctgtagactctcttaatttgagaaccctctatcatggggcaagagactctgatgattccctgttgcattt

SEQ ID NO: 102050 - DNA, 154 bp, Homo sapiens
  misc_feature (63)..(63): n is a, c, g, or t
  misc_feature (77)..(77): n is a, c, g, or t
  misc_feature (91)..(91): n is a, c, g, or t
gctgggaaggcccggcggggaaggtggctcggggggccccgtccgtccgtccgtccgtccgcntttaactacatctntttggttggaccanatttcccctccgtggaacactgaagaaagtggatgagttgttttcgaatatgtataaagtaaa

SEQ ID NO: 102051 - DNA, 523 bp, Homo sapiens
actttacaaatgctgaaaccaccctccactcacgctgcgttgtttcagcatttgtaaagttaggaagacttttgccgattaaaggacaaggtcagcctcacgattctgacttaaaatgtgaaactgagcacgtggcttagacttgagacttgaagctgcgctctgagaaactttggaaacagtgctggaattcaccacatctgtaattcaatgtgttagacgcacaaaagatgtgcttcagtctgtagcgaggctggtttctcagttgggccgtggaagtacttacaaaggaaactgaatcgattaagtttatttatgcagttcaaaatgtttcaaggagctccatgaactggttttgtaaatgggaccaaacagtaaggaaatggtccttagaagggattgttctgatgtgctggattttaaatagaataagtaacatgtgtaaagtgaacttaaaagcttaagaaagaagaacatttttgaatgcgtaacattcatgaaacaaatgttaatgtttaaaatc

SEQ ID NO: 102052 - DNA, 289 bp, Homo sapiens
  misc_feature (167)..(167): n is a, c, g, or t
  misc_feature (254)..(254): n is a, c, g, or t
ctatgatggctttaaataattttacaattaaaattgggtttattacatgttgaaattgaagggacaatataagcccatcacttacttttctcctgattgtcaagtacattctatttatgacttttaaagctggagttaagattattactaaactggccatgagccancccccctggcctatttgtagttttaaatcagtattaacagaagccaaatgtgtaagtaaagtcagccatgaatagaaaagttcattnaaaatccatttcatagcttcttggcgttcagtgta

SEQ ID NO: 102053 - DNA, 575 bp, Homo sapiens
gtgtttggcggggtctggttttatttactgtatattcgggaagtatgtgtagttagggaagtaaaaacttggaagttactttgggttttgtgagaatgtttgattcattatacatatttgttaaaagtttactttgaaacttcaactttgagaatagacaaatttcttgacgtcctgtaaattcagtggtattatatagcattttaaaatttatcacttaggtgcaattacagtgtgaggggaaaagttaacttttttgaatagttacattgcagtgacagcaagagagtatttttatgtgtagacaggctgtgggttcccctcacttaaattgaagctctgttgaacttgagacacttaagaatcttgcaagtgtgaaaagtggagtgaaacaaaaccatttctaaaacgaaaatgtgtaactgcgttcagttttacacagtgaagaaataagtattaaacaagttagtctcaaacgtttatatcttaaggtcattttattcctgttatcattaactagacatatcttggtttagagagcagcacacaagacattgtgtacttttaatagctaa

SEQ ID NO: 102054 - DNA, 159 bp, Homo sapiens
ctcctaaccagaaacacagattcaacagtaaaaggtgaaaacatcactggcttaaattaaaaggcttagctaggtacaacctccgaccaatcactgactgaccgctggagttgacaaggacaagaaacaaaatggaaactgccatagaggggctcaaca

SEQ ID NO: 102055 - DNA, 509 bp, Homo sapiens
agaggtagaagttgcagtgagccgagattgcaccactgcactctagcctaggcgacagcgagactgcgtctcaaaaaaaaaaaaaaagaacgttccaaggtcaggactaggcctcccctcagaagcagcaagtgacatatgtgacatcctctccactccctatttgcatttctaggttatataactgtactactatccatgcatgcctactcttgttcccagggtgaaggacccagacatggagagccgaatccctgcaggccattataaatgagattatgccatttgctcccatttcttcttattctttcatttttggggctctccatcttgatgtgttctttggatcgtgaacagatccaaagaaaaggttgttctgccgtgctgtttgtcaggatgaaaaactcttttttaagtgtttaggtctgcccccagtgcccagcccaatcaagtaacgtggtcacccagagtggcagataggagcacaaggcctgggaaagcactggaga

SEQ ID NO: 102056 - DNA, 445 bp, Homo sapiens
aaaacaaacaaaaaaacctgtctcttaaaaaaacaaaacaaacaaaacaaaaacctgtaatcctaagtgtagcactgtcctgagttctgtgagttgttctaatgaattactgaacctgaggtcatgagaacccccatacacagagtctgttggttagcagtgcacaagtgaggccggacatggtggctcacgcctgtaatcccagcaatttgggaggccaaggcgggaggatcacttgaagtcaggagtttgagaccagcctggacaacacgggaaacctcacccggcccggacacggacaggattgacagatggctacgctctttctcgattccgggggtggtggtgcctggccgtacttagtgggcggacgcgattggtctggtcacttccgataacgaacgagactctggcatgctacctagttacgcgacccccgagcggt

SEQ ID NO: 102057 - DNA, 626 bp, Homo sapiens
  misc_feature (1)..(1): n is a, c, g, or t
ncttatcagaaaccccttatgtaaattgcctgtttagcgggccatttacggatgctttgcaattagccaaaccactcgtttgtgtctagatggatacaactcagatacagaagggtagacactgcaggaatccatttatgtgaagttccaaaataagcaaaaactatctgtggtgaaaaatcaggaatagcaatggcctgggtgagggaggttaatgtgggtggactggataaggaaatgagagaacttccagaatgtggtggtaaggttctgaattgtgatatggctttgtgttacacatataaaaacatttgtcaaaactcttcaactgaaacatttggtgcattttattctgtggctttacttacataaatgtaaacaccttttagactgtatgtaatgatatgcaagttgaattatgtaggggttgtgtgatgattttttgaaattcaagaaaatataagggattaacgtatgaataaacatatgacaaaatagcacaaaatgttaattgtggaacccaactagttgtttgctttaaagtctttcaacacttttgtatgtgtcagaaaaagtatgcagtagaaaggacttaaggttaaaaataataaagggaatgtcctgaa

SEQ ID NO: 102058 - DNA, 340 bp, Homo sapiens
ctgcccaggcctcttgctcatagaataattcttaatgttcacttggcagtaacgatttctcacttcccaatccgacagtgaagtacatactcacaatgagaaaagaaaattggtgctacttttagaataatcaggtctgtctttcttatacataatgtacttacggatatacaagttattatttccagcgtatactgtgtaagaatgaagatttcactttagtagatagtaatgaagtataaatatcttgaagtttctcagtgaaacttatcaaaaacagtacagtttttatgatacaggcactgtctctgaaaacatggaaagtgacctaattacagta

SEQ ID NO: 102059 - DNA, 376 bp, Homo sapiens
agagtaatcacccttaaccatcacttctcccactgaaagggagaatagacagaagccaactatctaccctttttctacataaaacctcttatcgagcctccagttaataaaataatagttctgaaaccccaaaaaatattagcaattgttgaaatcatgctagtttgaaaatagttgagttttcctaacaaaatatgtctcaggatcccagggtcaccaagcttatattaatatagtctagttgggactaatggtaatcatcagtgaactagtcattttttagcttcttgggctcttaaaaaatttgttatcattaagcccacacttcatagagtcacagctattttatttttataggagactcaacagtcaaagt

SEQ ID NO: 102060 - DNA, 549 bp, Homo sapiens
aaacccaaaaaataaaataaaattattttttatttttgtagagacagggtctcactatgttgcccaggctggtcttgaactcctgggctcaagtgatcctcccgccttggcctttcaaagtgttgggattacaggcatgagccactgcgcccagctcctcacctcatttctgtgtcttttttctcaagaaacttagctagggggaaggaattgcccacagaaattttggtttgtatttcttttcttctggcacttcagaaagcaaggatactgcagtttagacctactattttagcttatataggactctttgcttttgtcatcttgtccatcactagttttcaaattgccatgaggaaaggcttcatgtgggaatgagattgtaacttttttttttttttttgagacagagtctcgctctgttgcccaggctggagtgcagtggcatgatcttggctcactgcaacctccgcctcccaggttccagtgattctcctgcctcagcctcccgagtagctgggactgcaggtgcatgccaccacgcctggc

SEQ ID NO: 102061 - DNA, 350 bp, Homo sapiens
agtgatctagaggatgctttttgcgttcctttccactgctgcctcctgccttcccaggggacaccaggcctgaccaaagagacttggagcctggttgtgagatggagttccccggggaacattcagctgatggccttctgcccggcaggaatgagacaaagggggccagggaccctgggagccctgttcacacgctccagagagtctgcgtggaaattccaggagggtcacaggaaagcttcagatttagaaccacagtgctttatttttttccccttttctcttctgttccatcctttccctcatggtcggtgggggtgtcatagaagtctgggaaaggaaagcaagca

SEQ ID NO: 102062 - DNA, 623 bp, Homo sapiens
tactcagcagaaccagggaagtctgaaagatcactggtccgcaccaatgtcaatatcccaggtatgagattagactgtagttttacaagatgctattgtcaagagaagctgggtagagagtgcacaggccctttctatattatttcttacaaccacatgtgaatctacaattatgtcaaagtaaaaacgtttaaaagggagaaggggacagacgtctttgccgcggtaggactggctgggcctggggctgggaatgaagaatgaactccccagggcactggtggccagccaggactgagaaccgtcatccacagcactgaccccccgaccccccacagccatgtctgtctcctctcctcccgtggtgggggctgagaggcagcagcttcccgggaatgccttgagtaaagcaagcacggtgcccctcagctgtttctaactcactcgggtgaatgactcccttcatctacaccacctggcttcttaaaggagcttccaaacattttaaccatcacacaaatcaaaacgcaggcagagcagtctcctccacagtgaccctccttgcttaattaaaccacatctaacaagtgatctggacaggcggtgctgtgctgcttccccga

SEQ ID NO: 102063 - DNA, 391 bp, Homo sapiens
ctcacttaacctcctctcaagtgcctgactcagtctcacagggaaccagggtcagtttctgcaagagttcacacaaatccatcaccattactgaaaaggtcactcaaaggtcaggatctgtggagcagggttactggtatcgtctttaaccatgaaggacagtttactctatgacactaaagttcatctgtcagataaatccattcctcttgcaggcaagtgggtctctttggagtacttctattttacagttgctcagttcttatgggtaacccctcctttgctcaagggcaagtcagaaaggcttggaggggcccactgtattacaaagcacctgggaatgccctggaaatcattcaggaagcagtggttcagaaacatttagagagga

SEQ ID NO: 102064 - DNA, 750 bp, Homo sapiens
gcaaattgaaggaataaagtgaatgtattgatagaaaaccttcaatgtgactacagcttttttcacaattatcctttcttaaaaataaagtatttatattatgaaaatgcagccatttaaaattgatgtttggtgattggtaaagtcaaacagaaccaccaatgccttcaagtgtggctcagatgtcaaaatcaagtctacagaataagataaagaacaaggtccatggaattggaaagaacattaccaaagacggtctgcttctttaatcttaactggttttgaaccataatattccaatctatttacagctcctccagctgctcaagaaccaagttcaaacttctctttgttgcactcgaaaagatctcttgaaccaacacacaataagcttgactgagcctgcttcttgagaacttgtatggactagactgtataagccacttaatttaatcttcataatgtaagaaaatcgttttgttatcatggtataaaaaatgtcctagtttataaaaccagggctccaaaatcagtttaatttgtatatggtgaactaataaatggatgtacttggagtttagcagggtaggtatcaccacggagggaaaataaagtaactttctcagcacttaacaggtatttgcatttaattaatttttattataagtaatacacaaatatattcctaagaaaattcaaaccttatagataatgcaaaaaaggaccttttgatcatcattcctaatccca

SEQ ID NO: 102065 - DNA, 129 bp, Homo sapiens
tctaggttggtaaaaaatgagatgccgtacctcctctggaccatcaagagggacatcattgactatcacagcctgacctacgaccagatgctgaaccactacgcaaagacagcctccttcaccaccaag

SEQ ID NO: 102066 - DNA, 388 bp, Homo sapiens
attgcacatgtttcctcctcatccgggattggcttcatcctcagcccacgtgagatgacagtgaggcaggcagcactcgtgcctcccagtcctcagctttgagtgcaccaaggaggaggaactgcggtctcagcacacttcccggccccgccttgcccaattgggtgctgagtctggcttccaaccaatcacaggaccaggggaacacttgccgaagattggattggatttcacgcaaatcatgggtagagaatagaggaggagtgggttcccagaggaaattctgggcgctgttttaccagatgggcgataccccctactctgttgtagggaggcaggagagggaacactgggctgagaggcgacctggattccatttctggtttag

SEQ ID NO: 102067 - DNA, 382 bp, Homo sapiens
tctgtttcatgccaggtgaggtcaagtactgagaatacagtggtgaataaaagaaacaaaatctctaatttccaggagcttatattgaaaatgagattgaacacatacaaaaaaaataataacaataatgaatactatatttacaaataatagctgtaagaaattttagtacctgttttaaattagaaaaatataaaaattattaaaactaaaatggccagatgtgatggctcacacctgtaatcccaacactttgggatgccaaggtgtgacaatcaactgagcccaagtgtttgaaactagtctgggcaccataggaagaccctgtctacaaaaaataaaaaattagctgggcatggtggtgcatgccgtaatcccagca

SEQ ID NO: 102068 - DNA, 658 bp, Homo sapiens
gaggcatttgtagtgccgctgaagactgaatttatgccttttgtaaacatgataggtataaatgtcttataaacattctggagtatgtatagctttaatgaatgaaatttaatggacctgattaaaatgaagggatttaatcgttgttaaagttaagttagtcaaataaattacctactggaatatagcccaagccagtaaaggtttattatttgcattttcatgcttttattttctccttccattcataagtatatacttgaaagtacatctgtagcctatgatttgagtctattgaagttctaggaagaggcaaactacaaactactaggattctgatttcagatgtagtcattccagaaccttctctttatgagttcacctgctagtacaatctccacaacttgaatggcattggttgttctataattcctgccacaagcatcacaagttgtacatcatcaaggctccctttgcactcccaagaagaactggtaattttaaacaaaagtatgtgtctttatttgtattggaaaatactgtctttaaattgtttcttgttgacactccccacaatggaaaaattaccgaattaaacctgttttatggatggcagcttggagcatagcaagaagttggaggatttgaattccattcc

SEQ ID NO: 102069 - DNA, 398 bp, Homo sapiens
atggaaccagcaacagtgaacatttctgaagcctttgcaagtatagaaagtgcttagaacgttcctttttcttcaagcagatgttcctcttgaggtgcatacccaattaaatgatatagatgaacattcagcgactactgcaacacaaagtattttgaaaagccaagttcctagttttctccttaactacgaagttgtgaaaatattgattttataaagtctataaaatagtaagcttaatgaatacttatactggccaggtgtggtataagtatacaggcatgggatcatgcctgtaatcccagcactttgggaggcagaagcaggtttgctttgttgccaggagtttgagaccagcctgggcaacatggcgagaccccgtccctaccaaaaaaaaa

SEQ ID NO: 102070 - DNA, 360 bp, Homo sapiens
gctgccgcctactactactaaattcacccccgctcgacaaaagagaattttatttagtaacaagacgcaaatccccagtggcacttggcacagccacctcccctgaagccccaaaagcctatagtgggggcaaatgatataggacagtttcttaagacttaaaaggcaaagtggcatctcgaacctgcatggctgttaggtggttctagctgtggccgtccagcccaaggggagtctagcaccactgctaaggaggattgcgaggtgtttcttgctgatggtgaagagttggttcgtggaggtcacaatcaacctttatccaccatccagatcccagagccactggggattttcaacttg

SEQ ID NO: 102071 - DNA, 495 bp, Homo sapiens
agtcaggtccgaagcaaaaggaatacacagaagaagatgattatgagtgttttgaaaacctgccccttcctgcccgcccgggacaatatttacaaagcagacatgcaaacaagcagaccttcttttcaggtttaaattgcctactgagccaggcggttcccgtgctggggtgcttgcccagcactaagttaggtgtttaaaaaacgcatttgccagccagctgcctgccttccctttggtggttaccgtgtggttaggaagctcaggagtagtgttgttcttacctgagtaagatacagactctttttaagggaaaacattcccaaggatgtctactgttgaattaattaactttattattatgttatttaaatatatacaaacataaaactaggtataaattcctcagcttatagttcttacacatctataaatctaaaacaaatttacaaatgatatgcaaacaaaactctaacatgaatcaaatttaaattg

SEQ ID NO: 102072 - DNA, 423 bp, Homo sapiens
ccccaaaatgcagttcattcacagatcactaacccggggctatccctgcaagttaacaacccctggttacttttatttattttcttccttgacaagaaggattaaaccttcccttctcttcctaacacccagcacacagctggactaggcaaaattcttaaattagagtgtggattttaagaggctgaggcaggaagatggcttgagaccaggaatttgagacaagcctaagcaagaccctgtctttacagaaaatacaaaaattagctgggtgtagtgccgtgcacctgtagtctcacctacttgggaagctgatgtgttaggattgcttgaacttaggaagtctaggctgcagtgaaccgtgatcatgccactgctctccagtttgagcaataaaatgagatcctgtctcttaaaaaaaaa

SEQ ID NO: 102073 - DNA, 276 bp, Homo sapiens
taatagaaagagcacagcctttagaatcaggcagtacagagtccatgttatgtcttggtttcctcagagctgcaactattacacattattattccaccttagaaggtttgggtgaggacgaaatgagataatgagtgtaaagcatctatacatgtatagcatgctgccaaatacctcacagatattcagccagtgctggtatctttccctctccaggttacaaatatttcgggttcattgccttacctcaggtcctctgttcacacagaactggag

SEQ ID NO: 102074 - DNA, 409 bp, Homo sapiens
ttacccaggctggaatgtagtggtgcaatcatggctcactgcagcctcaacttcctagacttcagtgatctttccacctcagcctcccctagtagttggggccacaggcatgtgccacctcactgggctaatttttgtacttttggtagagatgaggtttcgccatgttgcccaggctggtctcgaactcttgggctcaagtgatctgcccacctcagcctaccaaagtgctgggattacaggtaatcacctgtatgattaccatgtccagcctgaaaggcaattaatttttgatactaactttcttagaacttctgagttattatcaattttaaaaatttgcctgcagatttcagattttctaaataggtgattgtatagtattccaataatgatagtttatttcttt

SEQ ID NO: 102075 - DNA, 370 bp, Homo sapiens
gcctcccataagggtctgaagtggcaggtggatgggaaactgcactctctgacctctgcaaggggactgctgctttcccatgagcttctcctctttccgttgctggtttcttctttgttatctttgctgctggagtggccagaccctgggaagcgggctggagagaggagagaagccatcgagccacatggacccctacagcccggaatctgagctgtggtaggattggctgcgattgggattggcagacacactgggtttgtacaggaggggaccctgaaggatgggctgtggtcaaagtgggatcccttcactgtccatagtccttggatctgaaactgctgacaggtgcccctgggaactgctgtgg

SEQ ID NO: 102076 - DNA, 407 bp, Homo sapiens
ttttggcatggtaagggcttgcatgtattaattcatctaatcctcacaccagctctatgagattgatgccattattaagaaaggtaaaacaagtattcaattatgataccccgcatttcaattacattgccatgacttacctcattatagcctcatataggttaccatagactagttctaaatttcaaaggcaaaaattgccaaagatttgaatccaaagtagcatgcagactacagtcctgattatattttaagtcttttgttaagtataaaagaagatagtgaagcaaattctggataatttgctgcattagtaacttaataatacaactttttcttgaacctgaaatcatgtgttgatcaaggagtcttaccaacagtgtcttacatctctttagagagtgcct

SEQ ID NO: 102077 - DNA, 258 bp, Homo sapiens
ccatatttcatacttttatatgttccacactatctactgtggtaggtacaccaagcacattataggtatttcaatcaatgttaaagcaaatactaaaaagagttatagttgcaaaggagacaggatgctccagtgaagtgtgtaagagacagaagattacatggaccttctgattactttgagaagaaagtctcagttcctaatacctctctaacattttgctaatatttaaacataaccaatttttaaggtaaacac

SEQ ID NO: 102078 - DNA, 135 bp, Homo sapiens
gctgtctctacatttttgattttgacatacatggtgtcagcagtgggaccaagcactgaaccactttggggagaatctcacactggggccctctgacacccttctacctttgtgagtcacctcttctcccacctg

SEQ ID NO: 102079 - DNA, 550 bp, Homo sapiens
gaggacatttgaaaaaggtggaggaggtggaggtgtggctgtcactagggaagataggagctgggcctgaggggaaaaaacagtgaagagaaaatgtaacaatgtgaaagtgagtgctagaaaagtctaatgagagaagagaataataaagaggagaaaagaagtgtttttaccacacagatgctacccattttactggtgagaaagctcgagccacagggaaataacatgctcaacatgaagctcctcttttttcaaacactatattttcctgtatgtcttattggctggaaaataaaataacagtaacagagaagcttggcttctttaagagagtatcggccaggctcgatggctcatgcctgtaatcccagcattttgggagaccaaagtgggaggatcatctgaggtcaggagtttgagaccagcctggccaacatggtgaaaacctgtctctactaaaaatacaaaaaaattagccaagcgtggtggtggatgcctgtaatctcagctactagggaggctgaggtgggagaatcacttgaacctg

SEQ ID NO: 102080 - DNA, 1281 bp, Homo sapiens
cttggcaaggctaataagaaagcagcttttccaagaaacaatacaatattactggccagatagtattattgattaattcaacaaacagttatgtagcatctactggtaccctggaactgtgctgaactttatagctacacagatgactaagacgcaatttggccttgccagttcatgactgagttatacatgaacagaacaagatcctcatgaaacctctgatatggacatggtcagatgttgaaggccagaggccggctctgctcatctgcacagctgcagcaggacccacgcagggagttaagggttatggcaagccctttgagccaagaagtgtgaaaaacatacactctactcctgcttacccagatgccacaatgcacagacaactcctggctccggtggaaggaaggatggcagagacattgaatcagaaactccatgttgccaatgtgctggaagatgaccccggctacctacctcacgtctacagcgaggaaggggagtgtggaggggccccatccctcagctctctggccagcttggaacaggagttgcaacctgatttgctggactctttgggttcaaaagcgactccgtttgaggaaatatattcagagtcaggtgttccttcctaaaaaaaaaagtctattttggagaattgaaataattcatggaagggaatcactattcagggatttttcccctttgctcttcttttccctccttaaaagaaaaattaccttctagtcctaggatgaggacacactattagtttgaattaaatgctttgatattctcagatcagccatcttgaaccaaagcaaaaccacaagttacactttcttaaaatttgatttgtcatattttctagagaaacttgaatttaattgtgttattcttagcttccactggcagcctagctttgagggtaaatgaaaatataacccatagattacccagccacttgggaacagcaggtaatactgaagaaaaataaaaatagattttgaaaacgttacttacatttctatgattatgattctgcttccatttaagggaaaacttaggtaaatagagaaattttttctataacatttgtagtcagtatttgaagtgattttttaaaaaataagtattggtccctgttcactttttgattagataaatagataaaatatgttatcttgagaaaaatgattatgctgaaagctttataaacagtatactctttaaaaaatgaagagctgacataatttaacttgtatgtattatgtaagt

SEQ ID NO: 102081 - DNA, 1683 bp, Homo sapiens
ccaggcctgggaccctgttgggaacttttaatgccatggatccagacagccagataagatatgaactggttcatgacccagcaaattgggtcagcgtcgacaaaaactccggagtggtcatcaccgtggagccaattgaccgagaatcccctcatgtaaataacagtttttatgtaatcatcattcacgctgttgatgatggcttcccaccgcagactgctacagggaccctaatgctcttcctgtctgacatcaatgacaacgtcccgactctccggccacgttcccgctacatggaggtctgtgagtctgctgtgcatgagcccctccacatcgaggcagaggatccggacctggagccgttctctgacccatttacatttgaattggacaatacctggggaaatgcggaggacacatggaagttggggagaaattggggtcaatcagttgaacttttaaccttgagaagcctgccacgtggtaattacttggtgccactcttcattggagacaaacagggactttcccagaagcaaactgtccatgtaaggatctgcccctgtgccagtgggctcacatgtgtggagcttgcagatgcagaagtggggcttcatgtgggggccctgttccctgtctgtgcagcatttgtggctctggcagtggctctgctttttctgttgcgatgctattttgtgcttgaacctaagaggcatggatgctctgtatccaatgatgaaggccaccaaacactggtcatgtataatgcggagagcaaaggcacttcagcccagacatggtcagatgttgaaggccagaggccggctctgctcatctgcacagctgcagcaggacccacgcagggagttaaggcttacccagatgccacaatgcacagacaactcctggctccggtggaaggaaggatggcagagacattgaatcagtctaaagagagaaatcgcttcagcctcagcaggggctgcatcatcccccagggaagagccacagctgggcgaggattgccacaagacatttacaaggagatgatgccacggagactaacgcagactggtaaacggaaacacggggctttggctcgaacaccctctttcaagaaagttgtttatgaccacaaggaagatgaggagaacaaggctgggagaaagcaaaggagccacttgtttaaggttatgcagctgagaaatgaacaaggtggggttcgagtccagagtgcgcattccccatcaccccttaacaaaaaggcatgtttcccaggagactacagaggagaatcggcaggtggtcacaattgcagggctgtctcaggctgagcagagagtacggtggaggggcatgggcctgctgttggcggtgagggccttggaaatggcttcctggaggagatggcaattatccaggtagacaagatgtgtgtgtgtgtgtgtgtgtgtgtgtgtgtgtgtgtgtgtgtgatcatgaagaagaaataatgtgcaaagccctggtcataaataacttttcctctgcaaactgtggatggcagttcaccatgtttctcaccactggcctggtcactgcttatccaatatgcatgtaagaattactttttctcttttttcccttctataaattctcatagaacttcctttaatgcattaaaaaagcaactagcatgttcaa

SEQ ID NO: 102082 - DNA, 1227 bp, Homo sapiens
cttggcaaggctaataagaaagcagcttttccaagaaacaatacaatattactggccagatagtattattgattaattcaacaaacagttatgtagcatctactggtaccctggaactgtgctgaactttatagctacacagatgactaagacgcaatttggccttgccagttcatgactgagttatacatgaacagaacaagatcctcatgaaacctctgatatggacatggtcagatgttgaaggccagaggccggctctgctcatctgcacagctgcagcaggacccacgcagggagttaaggcttacccagatgccacaatgcacagacaactcctggctccggtggaaggaaggatggcagagacattgaatcagaaactccatgttgccaatgtgctggaagatgaccccggctacctacctcacgtctacagcgaggaaggggagtgtggaggggccccatccctcagctctctggccagcttggaacaggagttgcaacctgatttgctggactctttgggttcaaaagcgactccgtttgaggaaatatattcagagtcaggtgttccttcctaaaaaaaaaagtctattttggagaattgaaataattcatggaagggaatcactattcagggatttttcccctttgctcttcttttccctccttaaaagaaaaattaccttctagtcctaggatgaggacacactattagtttgaattaaatgctttgatattctcagatcagccatcttgaaccaaagcaaaaccacaagttacactttcttaaaatttgatttgtcatattttctagagaaacttgaatttaattgtgttattcttagcttccactggcagcctagctttgagggtaaatgaaaatataacccatagattacccagccacttgggaacagcaggtaatactgaagaaaaataaaaatagattttgaaaacgttacttacatttctatgattatgattctgcttccatttaagggaaaacttaggtaaatagagaaattttttctataacatttgtagtcagtatttgaagtgattttttaaaaaataagtattggtccctgttcactttttgattagataaatagataaaatatgttatcttgagaaaaatgattatgctgaaagctttataaacagtatactctttaaaaaatgaagagctgacataatttaacttgtatgtattatgtaagt

SEQ ID NO: 102083 - DNA, 1717 bp, Homo sapiens
ccaggcctgggaccctgttgggaacttttaatgccatggatccagacagccagataagatatgaactggttcatgacccagcaaattgggtcagcgtcgacaaaaactccggagtggtcatcaccgtggagccaattgaccgagaatcccctcatgtaaataacagtttttatgtaatcatcattcacgctgttgatgatggcttcccaccgcagactgctacagggaccctaatgctcttcctgtctgacatcaatgacaacgtcccgactctccggccacgttcccgctacatggaggtctgtgagtctgctgtgcatgagcccctccacatcgaggcagaggatccggacctggagccgttctctgacccatttacatttgaattggacaatacctggggaaatgcggaggacacatggaagttggggagaaattggggtcaatcagttgaacttttaaccttgagaagcctgccacgtggtaattacttggtgccactcttcattggagacaaacagggactttcccagaagcaaactgtccatgtaaggatctgcccctgtgccagtgggctcacatgtgtggagcttgcagatgcagaagtggggcttcatgtgggggccctgttccctgtctgtgcagcatttgtggctctggcagacatggtcagatgttgaaggccagaggccggctctgctcatctgcacagctgcagcaggacccacgcagggagttaagggttatggcaagccctttgagccaagaagtgtgaaaaacatacactctactcctgcttacccagatgccacaatgcacagacaactcctggctccggtggaaggaaggatggcagagacattgaatcagaaactccatgttgccaatgtgctggaagatgaccccggctacctacctcacgtctacagcgaggaaggggagtgtggaggggccccatccctcagctctctggccagcttggaacaggagttgcaacctgatttgctggactctttgggttcaaaagcgactccgtttgaggaaatatattcagagtcaggtgttccttcctaaaaaaaaaagtctattttggagaattgaaataattcatggaagggaatcactattcagggatttttcccctttgctcttcttttccctccttaaaagaaaaattaccttctagtcctaggatgaggacacactattagtttgaattaaatgctttgatattctcagatcagccatcttgaaccaaagcaaaaccacaagttacactttcttaaaatttgatttgtcatattttctagagaaacttgaatttaattgtgttattcttagcttccactggcagcctagctttgagggtaaatgaaaatataacccatagattacccagccacttgggaacagcaggtaatactgaagaaaaataaaaatagattttgaaaacgttacttacatttctatgattatgattctgcttccatttaagggaaaacttaggtaaatagagaaattttttctataacatttgtagtcagtatttgaagtgattttttaaaaaataagtattggtccctgttcactttttgattagataaatagataaaatatgttatcttgagaaaaatgattatgctgaaagctttataaacagtatactctttaaaaaatgaagagctgacataatttaacttgtatgtattatgtaagt

SEQ ID NO: 102084 - DNA, 572 bp, Homo sapiens
aatcccctcatgtaaataacagtttttatgtaatcatcattcacgctgttgatgatggtgagtgtttacccaaaattggaaaaataaaatgctcattcttgcttcctgcgggaaaataaccctggtgagcgtctttcagcacagcagagaaaaggataaaataaaccttgttatcactctgcatccatgctggtgattatttttggtaataattcttaaaatggtaaacaagggaccaataccatcgaaagagggcagtattcattcagaagagacaattaaaccagcaaggaggctgcaatcaaacccagcatctttttcatctgttcatgagctaactctttagctctttgtcaaagccaatgatgtgtgataaatatttagcacagcttccctgtgcttgggatggcatacgagctcagataaatgggactgtaagggacacatttgtcataaaccagaatgggtggttttataagcctgtttcagcatttttctctacactctcctaaggctgaaactttaaacacaccaaagcagagttgaagaaataaaaatgttcaaataacttt

SEQ ID NO: 102085 - DNA, 753 bp, Homo sapiens
ccagttgattaagggctaccagaaatatgaggaaaccctgtgattttgctcctcaaaattcagtttgggggactatagtgatgatttcagcctgggggctgtgcaacctctctgcaaaatcatcatctttcatcctattggaggcctggaattttcaccttcaaagtgaactccccataatagtatgaaatttggagcccttgctgcctctagagagctgtaaaagtccccagaatctcctggaactctcagaaaattcccaagtggaagaataagattgtcttcctcagtaagctacatggctctgccagcatgggtctaccagcctctcactgcctcacaagggcttctccacgtgtccactccagttccccttgcttagcttccatcccaggatcacattcgggcctccctaccagattcctcccctggctgtgtacacccaggcctggccacggcttgaaaactatttttgcattccactcacaggagactgctgagccgttggttgcagactgcagtgtgcctttgtctctgtcaccctgacccactgcagggaaatgagcagagctgtggcggaacttctctagaacaccggggtagaggccccacttacaggggtctgcattccctggcaacctcaaacagatagcctccccatgacggcagaggctcagttggaaaatgaagaatttcttgctagccatgtctccccaccctattctagatgtggagtagccagttttctggtgc

SEQ ID NO: 102086 - DNA, 259 bp, Homo sapiens
acattgtgaggatgcattcctgggatgcttgctcttaatattggtgaacttgaagcttagaaaaagtcttcttgatttttatgtgttgtcaagtttgaccaattctaattatttggaagtaagaactcccaccactaactagtttgacaactgaaagtccaaacttctattctaaacaactgctaagtctctatgatgtgttcttagtgagtcacgtagccactgatactccactttcctactccattcattcactttc

SEQ ID NO: 102087 - DNA, 313 bp, Homo sapiens
aaaaaaaagaatcctactttgcacttgcagaatgtgagactttagcagttgaggtgtcttgctcacggactcgttgagggtaagtgcagggcaggcctggagccgatggattatatagcaaagcaggtcgatgtgaggtgaccagatttgtcccttggcaatttccttaagtgtccaccgcacatcataggcaacaagggctcagaggttcccaggggtggctttggagtcctgcagcctggctgcgagcacgagagccatgcaggtgaggtggcagatattcagctcttcaggacatttccccaaccatttg

SEQ ID NO: 102088 - DNA, 700 bp, Homo sapiens
catttgtgttgtttttgtgtattcaccatcatgagtcaggctgctatgaacactcgtatgtaagttttagtttgaacatatatttttatttctcttggatttacactcaggagtgaaattgttgcattatgtgattactatacatttagtctttgagaaactgccacgttgattttcaaagtggttacactggtcaggcgcagtggctcacacctttaatctcaggtatttgagatgctgagtttggaggattttcttagcccgggaattcaggacaagcctgggcaatatagggaaacaatatcttgattttttaaaaaaatcaaatgccaataaaacacccaaattgattacaccattttatattcccaccagtaatgtatgtgagttccaattattccacattgtcaccaactttttttttttttttgagacaaaatcttgctctgttgcccaggctgatgtgcagtggcatgaacatggccagtgcagctgtgaccttccaggcacaagtgaccctctcacctcagcctcctaagtagctgggacttacagttgcatgctatcatgtgcagctgatttttacagtttttggtagaaatgtggtgttgtcatgtagcccaggtttgtgtcaaactcctgagctcaagtgatctgcctgcttcaccttccggaagtgctgagattacaggtgtgtgcc

SEQ ID NO: 102089 - DNA, 452 bp, Homo sapiens
ggcacttgcaatgaatattagtgttcaataaacaatagattaatgaatgaatggttataaaaatgacaaagtactttttttacagcctttggatgaaaacatgattattaagacttgctgctggaaaaaaataaatcattcttttatttatcttcaaatccaagtagtttccaacatgtacacccaaatcaaaattatgagtattatttttaatagattcttttttcttcttgagtttaaacaatgagtcaaattttataggcaccccaaagctatccaaaaaaaatctgcccttgaaatgctgaagaccttcagtgtgaactaccagtcaaattgcaatcgtattttgaaatcttaatttccttcccaagataggactttaagcctttttctattttgatgatgaaatattggatttatagtatagaagggtaaacttgaattttcataat

SEQ ID NO: 102090 - DNA, 501 bp, Homo sapiens
caagggatgttcctctgcactcctgcatgtgccctggcctgatgccagttccaggcaggtccccatctggggagatctggatgctatatggacttcattaaggggaaggcagagacctcggccccagggagccagaaatggaaaggagacatggccttaacataaagtaagggttctgactccaacctgggagacgaatacagaacataaacatgtctttcctccaccacgctaagcagttcaagccagagtaggactgataataacagaaagacctacattctgtagggatattgttgcagtgaaagtgtttgtcttcaaatagggggaggccatgtgggcagaggcattgaactggttctctgaggtctctcgacacctcactaggacccacgaggagaaggcagaagcagaatgagttgggaacattttctcaacgttgattttatctgaaaatgtcacagtttcctatcactggaggtgtgcgggaatatactcgtt

SEQ ID NO: 102091 - DNA, 976 bp, Homo sapiens
ccggggcgcaggcgctgggcgcggcggggaagggactcggcactggggaaacccggagtttcagccagggtcccagggcttccttcccgggttcctgccggaaaacttttctcctccgcccggaagcctcgatggggcagtgagatcgcggggcgaggtgggagtgtgggagggggccgcgggcagagagcgggagtccggctgggtgggagatctcctgagccgaagctgggtctcgccccagcgtggcgccaccgacccgcaggcttttcctgctctgcagatggagagacacagggacgctcctcaggtggctgccctgggctgccagcctgtcagtgggaggggagggtgcagacaagaggcccctgtttccgaaacccctctgtccccaaagctgcgacagcagaagacacttaggcggcctgaggggttggtgaaccacagaggagctcagcttcgcctggtctccagctcccggtggcggtggcgtgtccttaatgctgctggctttgaactggactgagaactatttaccacacaaacaccaccatttcaatcccggagaatgcctgttttccctagggtgacctggccggggtaacaaacacttgttctctaattccacggtcagccttgacttaattgaggtacttgatttccaacttcctgtcttgctgccacagataatcactgatgaaaccaaacaggcaacaccttttggtggtcctgtggagagcgctgccccgtctgggtcttaggaaggcaattgaatatgaatgttctcccgagtgcttgtggaaaagagatggtgttggccactttttagacgaagagaaatgagtactagtgaacactaatcatagtgactaaacagtaaacggctcccatttgttgtcggctaaagcactgattcttcattttccatcccagcctgtcctgctctggcctgccctgtgctcaggaagctggcggt

SEQ ID NO: 102092 - DNA, 405 bp, Homo sapiens
tttttttttaaacagtaaatatttttagttataataaaggtaaggattgtataattttctctagaaaaagaatcaacatttaaaacatacatttgctcctatgctgtctaacagttcctttatttcaaacttagattttggcactctcaaatcataactactccaaaaaaacttatgggtgacattgtaaactagagctaaaaagaaaatctacagaaaattccctcaaagcactgaacaaattaagattatcttcatttcctttacccaggtatggacatctgacatactcttgctctttattacagtaggcaagtactcaatacagcctatgtaatgttctttttaaaaatgtccatttaataattatgaaacgctgctcactttgtaaccatttgtaatgca

SEQ ID NO: 102093 - DNA, 339 bp, Homo sapiens
tggggccaacggcagcaaggaggccttctggctcttggtatctcctttgattctccccaaagcctcaggagagtggctacaattcatctccccatttccagatgaggaactactgagatgcagggatccaagtcacacagcaggccaagatgacgctggagcccaggcctgcaggtcctgagccacagccattctttctgctccaccgacacacctgctacttcctgcacccgccatcgcctaggcacttccctctgcctgatgccctttctccgttcctgccaggcccagctgagggttccccagccccactcccctcatgcctgcagccccgccccc

SEQ ID NO: 102094 - DNA, 767 bp, Homo sapiens
acttttttcatagcaaaattcctgcaaggctgctactgctttatggaaaaggttcagaaccatacctggaaggttatccaaagactccaaagaggaaataatcaatctatttttataagtcttccaacccaactttgtctacttaagaaaaatcagtctcactccaaatgagatttattgaaatgttcctaaaatgcctcctatttacctatcacaagtgaaacattattcaaaatgtggaagtggtttgtggagatgggtcttttcaatttaagcctgcttgtacaatcttcactgggatcgtgtgactgcagaccctggtttcacgagcaactgtttgacatatcttctccagacagcatttcgcacttgcatatcagctgcagcctttccaaaagttggggaaatcctgcaaataaggaacatggcatctgattcttggaataacattctctctacactcttccagctgctgtggatacatgtaatgactgattttatttaataagaaagctcaaaatatttcccaattcagaacataaccctgcatgctgctccctctagtctaaccagaaatcccattctcctcctcctctaactcaataaaccaaatctaattggagaataattataaaatacactgatgtgcaatttgtttcacttgctcaataattaattaatacactacttatgattcagaagagctcttaagacacagcacaaattccactggatgaaggagaataccaaagatataagccaggggc

SEQ ID NO: 102095 - DNA, 552 bp, Homo sapiens
tctgcattttgtctttcaggcaagcagtaggggactcctgacgactttaagaaaaggagtgtcgtggacatttgagagagagagccctggcattgagttggaagatttactggaggaggagtgggcctaatggcagggaagagacccattggaggatgctggagggtctgggaggatggatcccgaatacctgtaccaaggcagggacagtggggatgggaagtcaaaaccaggttggagaggtatttaggaagagaatcaagaggacttgatgatcagctggatttgctgaatgctcgatgcctttttcccctgtgactccagccaactcagatttgtccttcaggaccaagctctctctgggaagcctcactacagtcctccgcttcatggacattgaagctgtcgtctcactgtgctttactagactgtttactggtgccctcccactgtgaggtccttgagagcaaggagtgtgtggattacacacttatttcctcatcccctagcctaccacttaggaaatgctcagtaaagtatgttggataaatg

SEQ ID NO: 102096 - DNA, 3891 bp, Homo sapiens
  misc_feature (199)..(199): n is a, c, g, or t
ccggctttcttccgtcctgccgtccccgggcccctagcccccagtcccctctcccccctccacctcttgtccctcggcctccgcgcctcccctcccccgactctctggcctcccattcattccgtccgctccctcccatttcctcttttccgctcgggccctctccccagagcctccccgcgcggaccccgctgcagtntcggggttctcagcacatttatggaagtttagggcctggacagtggccccgagtccggcctgagagcgcagcctgggctgctggcagggaagaggaagatgtctgtgctcaggcggatgatgcgggtttccaatcgctctctcctcgccttcatcttcttcttctccctctcttcgtcctgtctgtacttcatctatgtggccccaggcatcgccaacacatatctctttatggtacaagctcgaggtataatgttgagagaaaatgtgaaaacaataggtcatatgatcaggctgtacacaaataaaaacagtacgctcaacggtacagattatcccgaaggcaataattcaagtgattatcttgttcaaacaacaacgtatctcccggaaaacttcacatactcaccatacctcccctgtccagaaaagctgccttatatgcgaggattcctcaatgtcaatgtaagcgaagtcagttttgatgaaattcatcaactcttctccaaggatttagatattgagccagggggtcattggaggccaaaagactgtaaacccagatggaaggtggcagttctcattcctttccgtaatcgccatgaacatcttccaatttttttcttacatctgattccaatgctccagaagcagcggctggaatttgcgttttatgtcattgaacagactggcacacaaccttttaaccgtgcgatgcttttcaatgtgggcttcaaagaggccatgaaagacagtgtctgggactgtgtaatcttccacgatgtggatcatctacctgaaaatgaccggaactattacggatgtggagaaatgccacgtcattttgctgcaaagctggataaatacatgtatattcttccatataaagaattttttggtggtgtaagtgggctgacagtggaacaatttagaaagatcaatggttttcctaatgccttctggggatggggaggagaagatgatgacctttggaacagagttcactatgctggatataatgtaaccagaccagagggagacttaggaaaatacaagtcaattcctcatcaccatagaggtgaagtccagtttttaggacggtataaattactaaggtattccaaggagcgtcagtacatcgatggactgaacaatttaatatataggccaaaaatactggttgataggttgtatacaaacatatctgtaaacctcatgccagagttagctccaatcgaagactattaaaagaagtggctgtcgtggcaaggtagaccacaatgctggatcataaacttggagcgcgctcttagtggaggtcagtgattggctgtgtcacagtgcccttttctctgagaagagccagcagtccacagtgtttacagagtgggactatatacagtcacccttctctcacccgtcctccctgctctgagacacacccctgtggcgagcaccgcagaaatgggaagccactacttaagatcggaagttaagagagctccctccgaagagaaaatttttatactaaaatctataatttaattcaagagaatgcttttatttccgtttaaacatattttgtatatatgtgatataaattaatgtgtgcaaattgtttaaaaattagatgtgttgcagttttgcatgtaatcggttatacctttattggacttttatagacattttttatttgcatgaaaaaaactcactaaatttacatcactaaacaaaggttaacccttgtgtgaaatgaaggaactgtcaataattgacagccaactaatacagtaaactgttatactagttttgagctttagacctcagccttttgtgtggaagaagtcacagctttcttaggctttaaaaggaaaagaaggaaggacttaaatagcttttcttcctaccgggattacctatgtttttccttgcttgcaatctcatctgattttgctagaaatcacaaccatattgtttatgcatattgcatgagtattaccaagaaaaatcttaaaagttgtgatgtgacatgatataaaggatctctttatgttaaatgtctttccatgtacctctggtgtgtcagggattttgtgcctcaaaaaatgtttccaaggttgtgtgtttatactgtgtattttttttaaattcacggtgaacagcacttttattatttccagttcagaagagccaaaaaaaagtatcttcatttaaaaagaaatcaagtcagtttttttaaaagaatgatctatggaagaaaacccaatagtacttataatatacaaatgaattatactattagataagaattaaatattctatttttataaagataaatacttagtagataaaaacaaattttaagtttagttttcagacatagaatttcacttttggaggggacccttgaatgttagtttcattcaaactatattttgtttttttcacttttaagagattatatctctggtgttaattactaaaattttctttctaaaagtataatttaatagaattatcttaaaatacatgatcagtattcagtgcgctgatattataatgtcttctatatgtagtatctaaaagcataatttaatagcattgtcttaaaatacgtgatgagttatttggtgcactgatgccataatgtcttctatatgtaatatcttacatgtttgcatgagtgtcagggctttgtccagttatcttcatatgactgttctctgaaaaaaggtcttactacctgatatcaagtacatatcttaattttggatgaatttttccacagtaaagccgaacagtattcttttttgaaaattagcaattataaagattgtttaaaatatcttgatattttcacaaattttaaacaaaaaattaaatatctataaagtgaatgttcaacaacaatgatgagcaatagaaatctatatatgagaaacgtttggataatatttgcctcaaggattgtttacctaaaacagaactatggttatttatctcagattgtaagttttattttgaagtgtcatttttatggcaatattgataacacaaatgaccacaaactaaatcataaaataattgaatccttacactttgagaaaatggatagcttctgtgttatgataccaaacaaaatattttcatatttatttcttagaactatttccaaaatatttatatttcagtttttttatggtactcgaaaaatcaaaccttctgaaaattatgatatttgtacttcatttgtgtattagttcattttctgtttctattacatagtttttaaagtcaatgaaagagattgagaatgttaacatttgttgatcaatgtggagctgtccacattcggtatcttttcatttttatatatattttacagtttcaagaaaacttagtactactagtatctgccttattttcttaagtctgatgttaatttttgtttcaggagtgagatataaacattttgctttttttcagttttgaaatatagtttgtcatcctgtgaaaaccacctcgtttgctttttgtttgtttgttttgcttttttagtgtagacctaaaattatttttgcctataaacagtgaacttaatatgtttctgtgagagtgacagagctgtgcccgtttatcttcattgtattaattattacataaagattaacaaatacattgcaaatgcaaatt

SEQ ID NO: 102097 - DNA, 2196 bp, Homo sapiens
agagagtgactgcaaggagagatttctaaaaatatattttacaaatactcgaatggtgcttaccatgtaccagcctctcccatgctctttacaggcattaattcatttaatttaatcctcacaacaatggctgcaccgactaggcttgttttctggtacaacagataaaagtctactcctggggagagctaatcagtcttaacaagtaccgtgggggacacttgccgaacaagagaaatcaagagatagggttaaaattaggggagaaaccgatggcagtcatctatgccagctaggttcatctgtacagtcttcagatttcttatagatgaatcatcaaattctataatgttactacttctctctcagtttatagtaaactttcctttgaaaaagccaaccttgcctgagaagaatggtctaccactaggtcagcaaaggtatggaactctcttttgactagtggtatggtggtattagctttgtaaacaaccagtctaactgatgcaaataaagataaatgaacagtgggattggagaggggaaaatcacaatttttgcttcctcagcattcatgacttctttggcttgcatagattttgtttttctttattttacaaatgagtttccttttaatgttgttccactttgcatttcaaatttcccttaagcatctaaaaatgttacaaaatagtgtcattacctttcaaattaaacatcaaattagccagagaagttgagttgtgagtactccaacaagcaaaatattaaaaaatgaatttcaacttggtgatcccacctagtgaactaatgggatataaggaacctcttacgtcccagacaccatgcttagcattatgcacagttatccatttaatctcacagccttgcaagggggtattatatccactgtttgagggcggagaaaacaggctcacacaaagtagtagcttccaggggtctcacagttaatattaatgaaaggcttgggcttatacataggtgtttcaggttccacattgcaaagcattatctcagggacgatctatggcatgcgcatcccgataaaaacgtaccaaatttattggctatcaactacagttccatctggaaatactcagcaaataatggcagtaaggcatcccgccacttcctgcatgattagttgaaaaagaaacacctgcgcacacacatttgaacaatgtgatacagctaaggacctggacagtcagctagcaggaagaaacatttgaacgaagggtagaccacggcctaggaggtggatgaagacacccgtccgtttgcctactgaagcaagatggggctgaggcgctcaagggcctattggctgcccagaagcctttgcagcgccgcctgaatacagcgaggatgacccagggttcaccttcagcgttgaaggcaagtcctggtataagggacgcacataggtccgcgccacatcctgacactgtttccacaggaagtgcgggataggaggggggattcattaatccaggtcggaaatacaccttgttcctcgaggattttggaaggaaattccacccgcgaagtccccttttggagatgcccttttcctttcaggtacagcatccttcattatgtacccccagggtacaatgtatccggggctcgcaacgcgtccctcaacccccagcagcgcggtcaccgcggggtccccgggcgggcgggggcggcggtgacgcaggaggcggtggggccccggtgcggcgggcgcggggagggggctgctgggcgcgggcctatcaggacgcgcggtgtttcgggcgcggggagggcggggacctccaggtttcctcggggcccggcgcagcgccgcctgccgagttccgagcgagcgcgcgaagcgcgcaggggtctcgagacgttcccgccggtcccggttttcctccgcggctcccccgccccttcacgtccgcctctttctccaaccagacgcggctccgacggcgctcggcctctgctcttccggctccccggctctgcccgcagcgcgcgtcgcccggttgctcttcgcctggtgtccgcgggcccggcgggggcgcctcaccccgggcgcgcggcggtaatgccgctgccgcccttgcggccaggcaggcagctggcggcggccggagtcggagcgcgttcgtcgctggccgggacgccgccctggcc

SEQ ID NO: 102098 - DNA, 3869 bp, Homo sapiens
  misc_feature (177)..(177): n is a, c, g, or t
actcactatagggctcgagcggccgcccgggcaggttccacctcttgtccctcggcctccgcgcctcccctcccccgactctctggcctcccattcattccgtccgctccctcccatttcctcttttccgctcgggccctctccccagagcctccccgcgcggaccccgctgcagtntcggggttctcagcacatttatggaagtttagggcctggacagtggccccgagtccggcctgagagcgcagcctgggctgctggcagggaagaggaagatgtctgtgctcaggcggatgatgcgggtttccaatcgctctctcctcgccttcatcttcttcttctccctctcttcgtcctgtctgtacttcatctatgtggccccaggcatcgccaacacatatctctttatggtacaagctcgaggtataatgttgagagaaaatgtgaaaacaataggtcatatgatcaggctgtacacaaataaaaacagtacgctcaacggtacagattatcccgaaggcaataattcaagtgattatcttgttcaaacaacaacgtatctcccggaaaacttcacatactcaccatacctcccctgtccagaaaagctgccttatatgcgaggattcctcaatgtcaatgtaagcgaagtcagttttgatgaaattcatcaactcttctccaaggatttagatattgagccagggggtcattggaggccaaaagactgtaaacccagatggaaggtggcagttctcattcctttccgtaatcgccatgaacatcttccaatttttttcttacatctgattccaatgctccagaagcagcggctggaatttgcgttttatgtcattgaacagactggcacacaaccttttaaccgtgcgatgcttttcaatgtgggcttcaaagaggccatgaaagacagtgtctgggactgtgtaatcttccacgatgtggatcatctacctgaaaatgaccggaactattacggatgtggagaaatgccacgtcattttgctgcaaagctggataaatacatgtatattcttccatataaagaattttttggtggtgtaagtgggctgacagtggaacaatttagaaagatcaatggttttcctaatgccttctggggatggggaggagaagatgatgacctttggaacagagttcactatgctggatataatgtaaccagaccagagggagacttaggaaaatacaagtcaattcctcatcaccatagaggtgaagtccagtttttaggacggtataaattactaaggtattccaaggagcgtcagtacatcgatggactgaacaatttaatatataggccaaaaatactggttgataggttgtatacaaacatatctgtaaacctcatgccagagttagctccaatcgaagactattaaaagaagtggctgtcgtggcaaggtagaccacaatgctggatcataaacttggagcgcgctcttagtggaggtcagtgattggctgtgtcacagtgcccttttctctgagaagagccagcagtccacagtgtttacagagtgggactatatacagtcacccttctctcacccgtcctccctgctctgagacacacccctgtggcgagcaccgcagaaatgggaagccactacttaagatcggaagttaagagagctccctccgaagagaaaatttttatactaaaatctataatttaattcaagagaatgcttttatttccgtttaaacatattttgtatatatgtgatataaattaatgtgtgcaaattgtttaaaaattagatgtgttgcagttttgcatgtaatcggttatacctttattggacttttatagacattttttatttgcatgaaaaaaactcactaaatttacatcactaaacaaaggttaacccttgtgtgaaatgaaggaactgtcaataattgacagccaactaatacagtaaactgttatactagttttgagctttagacctcagccttttgtgtggaagaagtcacagctttcttaggctttaaaaggaaaagaaggaaggacttaaatagcttttcttcctaccgggattacctatgtttttccttgcttgcaatctcatctgattttgctagaaatcacaaccatattgtttatgcatattgcatgagtattaccaagaaaaatcttaaaagttgtgatgtgacatgatataaaggatctctttatgttaaatgtctttccatgtacctctggtgtgtcagggattttgtgcctcaaaaaatgtttccaaggttgtgtgtttatactgtgtattttttttaaattcacggtgaacagcacttttattatttccagttcagaagagccaaaaaaaagtatcttcatttaaaaagaaatcaagtcagtttttttaaaagaatgatctatggaagaaaacccaatagtacttataatatacaaatgaattatactattagataagaattaaatattctatttttataaagataaatacttagtagataaaaacaaattttaagtttagttttcagacatagaatttcacttttggaggggacccttgaatgttagtttcattcaaactatattttgtttttttcacttttaagagattatatctctggtgttaattactaaaattttctttctaaaagtataatttaatagaattatcttaaaatacatgatcagtattcagtgcgctgatattataatgtcttctatatgtagtatctaaaagcataatttaatagcattgtcttaaaatacgtgatgagttatttggtgcactgatgccataatgtcttctatatgtaatatcttacatgtttgcatgagtgtcagggctttgtccagttatcttcatatgactgttctctgaaaaaaggtcttactacctgatatcaagtacatatcttaattttggatgaatttttccacagtaaagccgaacagtattcttttttgaaaattagcaattataaagattgtttaaaatatcttgatattttcacaaattttaaacaaaaaattaaatatctataaagtgaatgttcaacaacaatgatgagcaatagaaatctatatatgagaaacgtttggataatatttgcctcaaggattgtttacctaaaacagaactatggttatttatctcagattgtaagttttattttgaagtgtcatttttatggcaatattgataacacaaatgaccacaaactaaatcataaaataattgaatccttacactttgagaaaatggatagcttctgtgttatgataccaaacaaaatattttcatatttatttcttagaactatttccaaaatatttatatttcagtttttttatggtactcgaaaaatcaaaccttctgaaaattatgatatttgtacttcatttgtgtattagttcattttctgtttctattacatagtttttaaagtcaatgaaagagattgagaatgttaacatttgttgatcaatgtggagctgtccacattcggtatcttttcatttttatatatattttacagtttcaagaaaacttagtactactagtatctgccttattttcttaagtctgatgttaatttttgtttcaggagtgagatataaacattttgctttttttcagttttgaaatatagtttgtcatcctgtgaaaaccacctcgtttgctttttgtttgtttgttttgcttttttagtgtagacctaaaattatttttgcctataaacagtgaacttaatatgtttctgtgagagtgacagagctgtgcccgtttatcttcattgtattaattattacataaagattaacaaatacattgcaaatgcaaatt

SEQ ID NO: 102099 - DNA, 5162 bp, Homo sapiens
  misc_feature (177)..(177): n is a, c, g, or t
actcactatagggctcgagcggccgcccgggcaggttccacctcttgtccctcggcctccgcgcctcccctcccccgactctctggcctcccattcattccgtccgctccctcccatttcctcttttccgctcgggccctctccccagagcctccccgcgcggaccccgctgcagtntcggggttctcagcacatttatggaagtttagggcctggacagtggccccgagtccggcctgagagcgcagcctgggctgctggcagggaagaggaagatgtctgtgctcaggcggatgatgcgggtttccaatcgctctctcctcgccttcatcttcttcttctccctctcttcgtcctgtctgtacttcatctatgtggccccaggcatcgccaacacatatctctttatggtacaagctcgaggtataatgttgagagaaaatgtgaaaacaataggtcatatgatcaggctgtacacaaataaaaacagtacgctcaacggtacagattatcccgaaggcaataattcaagtgattatcttgttcaaacaacaacgtatctcccggaaaacttcacatactcaccatacctcccctgtccagaaaagctgccttatatgcgaggattcctcaatgtcaatgtaagcgaagtcagttttgatgaaattcatcaactcttctccaaggatttagatattgagccagggggtcattggaggccaaaagactgtaaacccagatggaaggtggcagttctcattcctttccgtaatcgccatgaacatcttccaatttttttcttacatctgattccaatgctccagaagcagcggctggaatttgcgttttatgtcattgaacagactggcacacaaccttttaaccgtgcgatgcttttcaatgtgggcttcaaagaggccatgaaagacagtgtctgggactgtgtaatcttccacgatgtggatcatctacctgaaaatgaccggaactattacggatgtggagaaatgccacgtcattttgctgcaaagctggataaatacatgtatattcttccatataaagaattttttggtggtgtaagtgggctgacagtggaacaatttagaaagatcaatggttttcctaatgccttctggggatggggaggagaagatgatgacctttggaacagagttcactatgctggatataatgtaaccagaccagagggagacttaggaaaatacaagtcaattcctcatcaccatagaggtgaagtccagtttttaggacggtataaattactaaggtattccaaggagcgtcagtacatcgatggactgaacaatttaatatataggccaaaaatactggttgataggttgtatacaaacatatctgtaaacctcatgccagagttagctccaatcgaagactattaaaagaagtggctgtcgtggcaaggtagaccacaatgctggatcataaacttggagcgcgctcttagtggaggtcagtgattggctgtgtcacagtgcccttttctctgagaagagccagcagtccacagtgtttacagagtgggactatatacagtcacccttctctcacccgtcctccctgctctgagacacacccctgtggcgagcaccgcagaaatgggaagccactacttaagatcggaagttaagagagctccctccgaagagaaaatttttatactaaaatctataatttaattcaagagaatgcttttatttccgtttaaacatattttgtatatatgtgatataaattaatgtgtgcaaattgtttaaaaattagatgtgttgcagttttgcatgtaatcggttatacctttattggacttttatagacattttttatttgcatgaaaaaaactcactaaatttacatcactaaacaaaggttaacccttgtgtgaaatgaaggaactgtcaataattgacagccaactaatacagtaaactgttatactagttttgagctttagacctcagccttttgtgtggaagaagtcacagctttcttaggctttaaaaggaaaagaaggaaggacttaaatagcttttcttcctaccgggattacctatgtttttccttgcttgcaatctcatctgattttgctagaaatcacaaccatattgtttatgcatattgcatgagtattaccaagaaaaatcttaaaagttgtgatgtgacatgatataaaggatctctttatgttaaatgtctttccatgtacctctggtgtgtcagggattttgtgcctcaaaaaatgtttccaaggttgtgtgtttatactgtgtattttttttaaattcacggtgaacagcacttttattatttccagttcagaagagccaaaaaaaagtatcttcatttaaaaagaaatcaagtcagtttttttaaaagaatgatctatggaagaaaacccaatagtacttataatatacaaatgaattatactattagataagaattaaatattctatttttataaagataaatacttagtagataaaaacaaattttaagtttagttttcagacatagaatttcacttttggaggggacccttgaatgttagtttcattcaaactatattttgtttttttcacttttaagagattatatctctggtgttaattactaaaattttctttctaaaagtataatttaatagaattatcttaaaatacatgatcagtattcagtgcgctgatattataatgtcttctatatgtagtatctaaaagcataatttaatagcattgtcttaaaatacgtgatgagttatttggtgcactgatgccataatgtcttctatatgtaatatcttacatgtttgcatgagtgtcagggctttgtccagttatcttcatatgactgttctctgaaaaaaggtcttactacctgatatcaagtacatatcttaattttggatgaatttttccacagtaaagccgaacagtattcttttttgaaaattagcaattataaagattgtttaaaatatcttgatattttcacaaattttaaacaaaaaattaaatatctataaagtgaatgttcaacaacaatgatgagcaatagaaatctatatatgagaaacgtttggataatatttgcctcaaggattgtttacctaaaacagaactatggttatttatctcagattgtaagttttattttgaagtgtcatttttatggcaatattgataacacaaatgaccacaaactaaatcataaaataattgaatccttacactttgagaaaatggatagcttctgtgttatgataccaaacaaaatattttcatatttatttcttagaactatttccaaaatatttatatttcagtttttttatggtactcgaaaaatcaaaccttctgaaaattatgatatttgtacttcatttgtgtattagttcattttctgtttctattacatagtttttaaagtcaatgaaagagattgagaatgttaacatttgttgatcaatgtggagctgtccacattcggtatcttttcatttttatatatattttacagtttcaagaaaacttagtactactagtatctgccttattttcttaagtctgatgttaatttttgtttcaggagtgagatataaacattttgctttttttcagttttgaaatatagtttgtcatcctgtgaaaaccacctcgtttgctttttgtttgtttgttttgcttttttagtgtagacctaaaattatttttgcctataaacagtgaacttaatatgtttctgtgagagtgacagagctgtgcccgtttatcttcattgtattaattattacataaagattaacaaatacattgcaaatgcaaattataggatgttggaggatttattaatgagcatgtattgattgcctattccatatccagtgcaatgctaggtatgtctatggaaggagtattattacttcatttctaaacaaatgaagtcaagcaaattgagatctttctgaaattatgaagacatcttctgataacttatctgttgtatttcctagtctcaaagtcaagaaacccgtatatgtggacctagggctaataggaggtccctatggcactaactgggaaaattacatggtgcttttcaactacagaaagaagtaatgactaatgggcctgtctgtagagaagaaaaggagaagagtacacatttgctggaactatatataattcacagtggagatagttaattctttgctaaaactagggttttatgagtattttttaaatctacatttaagtttttgtttttgtgaaaagttattcagtaagaaaactttataatattaagtagatacagttatgtattaaaaatttccttatatacccttttgccagccaagatactgatattttaaaacaaaatggaaaaatgtccaatacaatattctctttctggaggcttcctacaagtgaaagcagattttgtcattttatttggcctttgcttgtctttgatatatttctttatgtgtttttcaaatacatactgttgtagatttattgtcttgtatttgcaagtatgccggttgagagaactaaaatggttatagtattgtttatcagaaagaggaagtgtacttaagattattttatttatttagatgaaaggcttctacataaatgcactgaaataaatgctagtaatttcttgtatcccacttctttttttgcttctcatggaaatgtttgtacttttttatcattgtcttttatgaaatataatgttctaaagaaaaaaaaaaaaaaaaaaaaaaaaaaaaaacaaaaaaaaacaaaaaaaaaaaaaaaaaaaaaaaaacaaaaaaaaaacagaacagcacaaaaacaaagcacaacaaaaaaaaaacacacagggggcgacacgacgcagcaaggacacgacgagaaaaaagagcagagggcacgcagcccacaagagagaaacgaagaaggaaaaacagacgagaacagagaaaagagcacgagcaaaaaaaatgggatgagaacacacacgaagaaaaacaaccgggggcgacaaacgagcgagtgaacaaacaacaggagggaaagggagacaagagaggcaccaaaagaaggagagagaagaggaccaaaaaaacgccg

SEQ ID NO: 102100 - DNA, 6374 bp, Homo sapiens
agagagtgactgcaaggagagatttctaaaaatatattttacaaatactcgaatggtgcttaccatgtaccagcctctcccatgctctttacaggcattaattcatttaatttaatcctcacaacaatggctgcaccgactaggcttgttttctggtacaacagataaaagtctactcctggggagagctaatcagtcttaacaagtaccgtgggggacacttgccgaacaagagaaatcaagagatagggttaaaattaggggagaaaccgatggcagtcatctatgccagctaggttcatctgtacagtcttcagatttcttatagatgaatcatcaaattctataatgttactacttctctctcagtttatagtaaactttcctttgaaaaagccaaccttgcctgagaagaatggtctaccactaggtcagcaaaggtatggaactctcttttgactagtggtatggtggtattagctttgtaaacaaccagtctaactgatgcaaataaagataaatgaacagtgggattggagaggggaaaatcacaatttttgcttcctcagcattcatgacttctttggcttgcatagattttgtttttctttattttacaaatgagtttccttttaatgttgttccactttgcatttcaaatttcccttaagcatctaaaaatgttacaaaatagtgtcattacctttcaaattaaacatcaaattagccagagaagttgagttgtgagtactccaacaagcaaaatattaaaaaatgaatttcaacttggtgatcccacctagtgaactaatgggatataaggaacctcttacgtcccagacaccatgcttagcattatgcacagttatccatttaatctcacagccttgcaagggggtattatatccactgtttgagggcggagaaaacaggctcacacaaagtagtagcttccaggggtctcacagttaatattaatgaaaggcttgggcttatacataggtgtttcaggttccacattgcaaagcattatctcagggacgatctatggcatgcgcatcccgataaaaacgtaccaaatttattggctatcaactacagttccatctggaaatactcagcaaataatggcagtaaggcatcccgccacttcctgcatgattagttgaaaaagaaacacctgcgcacacacatttgaacaatgtgatacagctaaggacctggacagtcagctagcaggaagaaacatttgaacgaagggtagaccacggcctaggaggtggatgaagacacccgtccgtttgcctactgaagcaagatggggctgaggcgctcaagggcctattggctgcccagaagcctttgcagcgccgcctgaatacagcgaggatgacccagggttcaccttcagcgttgaaggcaagtcctggtataagggacgcacataggtccgcgccacatcctgacactgtttccacaggaagtgcgggataggaggggggattcattaatccaggtcggaaatacaccttgttcctcgaggattttggaaggaaattccacccgcgaagtccccttttggagatgcccttttcctttcagccaacacatatctctttatggtacaagctcgaggtataatgttgagagaaaatgtgaaaacaataggtcatatgatcaggctgtacacaaataaaaacagtacgctcaacggtacagattatcccgaaggcaataattcaagtgattatcttgttcaaacaacaacgtatctcccggaaaacttcacatactcaccatacctcccctgtccagaaaagctgccttatatgcgaggattcctcaatgtcaatgtaagcgaagtcagttttgatgaaattcatcaactcttctccaaggatttagatattgagccagggggtcattggaggccaaaagactgtaaacccagatggaaggtggcagttctcattcctttccgtaatcgccatgaacatcttccaatttttttcttacatctgattccaatgctccagaagcagcggctggaatttgcgttttatgtcattgaacagactggcacacaaccttttaaccgtgcgatgcttttcaatgtgggcttcaaagaggccatgaaagacagtgtctgggactgtgtaatcttccacgatgtggatcatctacctgaaaatgaccggaactattacggatgtggagaaatgccacgtcattttgctgcaaagctggataaatacatgtatattcttccatataaagaattttttggtggtgtaagtgggctgacagtggaacaatttagaaagatcaatggttttcctaatgccttctggggatggggaggagaagatgatgacctttggaacagagttcactatgctggatataatgtaaccagaccagagggagacttaggaaaatacaagtcaattcctcatcaccatagaggtgaagtccagtttttaggacggtataaattactaaggtattccaaggagcgtcagtacatcgatggactgaacaatttaatatataggccaaaaatactggttgataggttgtatacaaacatatctgtaaacctcatgccagagttagctccaatcgaagactattaaaagaagtggctgtcgtggcaaggtagaccacaatgctggatcataaacttggagcgcgctcttagtggaggtcagtgattggctgtgtcacagtgcccttttctctgagaagagccagcagtccacagtgtttacagagtgggactatatacagtcacccttctctcacccgtcctccctgctctgagacacacccctgtggcgagcaccgcagaaatgggaagccactacttaagatcggaagttaagagagctccctccgaagagaaaatttttatactaaaatctataatttaattcaagagaatgcttttatttccgtttaaacatattttgtatatatgtgatataaattaatgtgtgcaaattgtttaaaaattagatgtgttgcagttttgcatgtaatcggttatacctttattggacttttatagacattttttatttgcatgaaaaaaactcactaaatttacatcactaaacaaaggttaacccttgtgtgaaatgaaggaactgtcaataattgacagccaactaatacagtaaactgttatactagttttgagctttagacctcagccttttgtgtggaagaagtcacagctttcttaggctttaaaaggaaaagaaggaaggacttaaatagcttttcttcctaccgggattacctatgtttttccttgcttgcaatctcatctgattttgctagaaatcacaaccatattgtttatgcatattgcatgagtattaccaagaaaaatcttaaaagttgtgatgtgacatgatataaaggatctctttatgttaaatgtctttccatgtacctctggtgtgtcagggattttgtgcctcaaaaaatgtttccaaggttgtgtgtttatactgtgtattttttttaaattcacggtgaacagcacttttattatttccagttcagaagagccaaaaaaaagtatcttcatttaaaaagaaatcaagtcagtttttttaaaagaatgatctatggaagaaaacccaatagtacttataatatacaaatgaattatactattagataagaattaaatattctatttttataaagataaatacttagtagataaaaacaaattttaagtttagttttcagacatagaatttcacttttggaggggacccttgaatgttagtttcattcaaactatattttgtttttttcacttttaagagattatatctctggtgttaattactaaaattttctttctaaaagtataatttaatagaattatcttaaaatacatgatcagtattcagtgcgctgatattataatgtcttctatatgtagtatctaaaagcataatttaatagcattgtcttaaaatacgtgatgagttatttggtgcactgatgccataatgtcttctatatgtaatatcttacatgtttgcatgagtgtcagggctttgtccagttatcttcatatgactgttctctgaaaaaaggtcttactacctgatatcaagtacatatcttaattttggatgaatttttccacagtaaagccgaacagtattcttttttgaaaattagcaattataaagattgtttaaaatatcttgatattttcacaaattttaaacaaaaaattaaatatctataaagtgaatgttcaacaacaatgatgagcaatagaaatctatatatgagaaacgtttggataatatttgcctcaaggattgtttacctaaaacagaactatggttatttatctcagattgtaagttttattttgaagtgtcatttttatggcaatattgataacacaaatgaccacaaactaaatcataaaataattgaatccttacactttgagaaaatggatagcttctgtgttatgataccaaacaaaatattttcatatttatttcttagaactatttccaaaatatttatatttcagtttttttatggtactcgaaaaatcaaaccttctgaaaattatgatatttgtacttcatttgtgtattagttcattttctgtttctattacatagtttttaaagtcaatgaaagagattgagaatgttaacatttgttgatcaatgtggagctgtccacattcggtatcttttcatttttatatatattttacagtttcaagaaaacttagtactactagtatctgccttattttcttaagtctgatgttaatttttgtttcaggagtgagatataaacattttgctttttttcagttttgaaatatagtttgtcatcctgtgaaaaccacctcgtttgctttttgtttgtttgttttgcttttttagtgtagacctaaaattatttttgcctataaacagtgaacttaatatgtttctgtgagagtgacagagctgtgcccgtttatcttcattgtattaattattacataaagattaacaaatacattgcaaatgcaaattataggatgttggaggatttattaatgagcatgtattgattgcctattccatatccagtgcaatgctaggtatgtctatggaaggagtattattacttcatttctaaacaaatgaagtcaagcaaattgagatctttctgaaattatgaagacatcttctgataacttatctgttgtatttcctagtctcaaagtcaagaaacccgtatatgtggacctagggctaataggaggtccctatggcactaactgggaaaattacatggtgcttttcaactacagaaagaagtaatgactaatgggcctgtctgtagagaagaaaaggagaagagtacacatttgctggaactatatataattcacagtggagatagttaattctttgctaaaactagggttttatgagtattttttaaatctacatttaagtttttgtttttgtgaaaagttattcagtaagaaaactttataatattaagtagatacagttatgtattaaaaatttccttatatacccttttgccagccaagatactgatattttaaaacaaaatggaaaaatgtccaatacaatattctctttctggaggcttcctacaagtgaaagcagattttgtcattttatttggcctttgcttgtctttgatatatttctttatgtgtttttcaaatacatactgttgtagatttattgtcttgtatttgcaagtatgccggttgagagaactaaaatggttatagtattgtttatcagaaagaggaagtgtacttaagattattttatttatttagatgaaaggcttctacataaatgcactgaaataaatgctagtaatttcttgtatcccacttctttttttgcttctcatggaaatgtttgtacttttttatcattgtcttttatgaaatataatgttctaaagaaaaaaaaaaaaaaaaaaaaaaaaaaaaaacaaaaaaaaacaaaaaaaaaaaaaaaaaaaaaaaaacaaaaaaaaaacagaacagcacaaaaacaaagcacaacaaaaaaaaaacacacagggggcgacacgacgcagcaaggacacgacgagaaaaaagagcagagggcacgcagcccacaagagagaaacgaagaaggaaaaacagacgagaacagagaaaagagcacgagcaaaaaaaatgggatgagaacacacacgaagaaaaacaaccgggggcgacaaacgagcgagtgaacaaacaacaggagggaaagggagacaagagaggcaccaaaagaaggagagagaagaggaccaaaaaaacgccg

SEQ ID NO: 102101 - DNA, 2152 bp, Homo sapiens
agagagtgactgcaaggagagatttctaaaaatatattttacaaatactcgaatggtgcttaccatgtaccagcctctcccatgctctttacaggcattaattcatttaatttaatcctcacaacaatggctgcaccgactaggcttgttttctggtacaacagataaaagtctactcctggggagagctaatcagtcttaacaagtaccgtgggggacacttgccgaacaagagaaatcaagagatagggttaaaattaggggagaaaccgatggcagtcatctatgccagctaggttcatctgtacagtcttcagatttcttatagatgaatcatcaaattctataatgttactacttctctctcagtttatagtaaactttcctttgaaaaagccaaccttgcctgagaagaatggtctaccactaggtcagcaaaggtatggaactctcttttgactagtggtatggtggtattagctttgtaaacaaccagtctaactgatgcaaataaagataaatgaacagtgggattggagaggggaaaatcacaatttttgcttcctcagcattcatgacttctttggcttgcatagattttgtttttctttattttacaaatgagtttccttttaatgttgttccactttgcatttcaaatttcccttaagcatctaaaaatgttacaaaatagtgtcattacctttcaaattaaacatcaaattagccagagaagttgagttgtgagtactccaacaagcaaaatattaaaaaatgaatttcaacttggtgatcccacctagtgaactaatgggatataaggaacctcttacgtcccagacaccatgcttagcattatgcacagttatccatttaatctcacagccttgcaagggggtattatatccactgtttgagggcggagaaaacaggctcacacaaagtagtagcttccaggggtctcacagttaatattaatgaaaggcttgggcttatacataggtgtttcaggttccacattgcaaagcattatctcagggacgatctatggcatgcgcatcccgataaaaacgtaccaaatttattggctatcaactacagttccatctggaaatactcagcaaataatggcagtaaggcatcccgccacttcctgcatgattagttgaaaaagaaacacctgcgcacacacatttgaacaatgtgatacagctaaggacctggacagtcagctagcaggaagaaacatttgaacgaagggtagaccacggcctaggaggtggatgaagacacccgtccgtttgcctactgaagcaagatggggctgaggcgctcaagggcctattggctgcccagaagcctttgcagcgccgcctgaatacagcgaggatgacccagggttcaccttcagcgttgaaggcaagtcctggtataagggacgcacataggtccgcgccacatcctgacactgtttccacaggaagtgcgggataggaggggggattcattaatccaggtcggaaatacaccttgttcctcgaggattttggaaggaaattccacccgcgaagtccccttttggagatgcccttttcctttcagccaacacatatctctttatggtacaagctcgaggtataatgttgagagaaaatgtgaaaacaataggtcatatgatcaggctgtacacaaataaaaacagtacgctcaacggtacaggtaagactacttcctgcttaaccccttgtagttacaaagcagtaaaccaaatcttttacagtctgttttgccttcaggtaacttcctgttaaagatgaagaaggtatcttcccctaagcgtcctggtagattattttactgtgcaaatcaagactgttacctattttaggatgtatgaacgtgtggtcacaaaagtgatgaggttttgtacagacacttaagttaattcttgtaaacaaaatatagaaagcagcttctactttttcaattcgtatgttgtatttaagagaaattaaccagagaataatttattcatcttagtaagccatactaccatctctctttatgttcattctagttcctaagttgttcttccaactaggtctagaaaatagttgtttttaattatagaagattgttaatagtgttatgg

SEQ ID NO: 102102 - DNA, 599 bp, Homo sapiens
acttccccaattctgaatattattttattaaataaaaaaaagcttactgtgttatgacattctttctctatttttcttttatagccaacacatatctctttatggtacaagctcgaggtataatgttgagagaaaatgtgaaaacaataggtcatatgatcaggctgtacacaaataaaaacagtacgctcaacggtacaggtaagactacttcctgcttaaccccttgtagttacaaagcagtaaaccaaatcttttacagtctgttttgccttcaggtaacttcctgttaaagatgaagaaggtatcttcccctaagcgtcctggtagattattttactgtgcaaatcaagactgttacctattttaggatgtatgaacgtgtggtcacaaaagtgatgaggttttgtacagacacttaagttaattcttgtaaacaaaatatagaaagcagcttctactttttcaattcgtatgttgtatttaagagaaattaaccagagaataatttattcatcttagtaagccatactaccatctctctttatgttcattctagttcctaagttgttcttccaactaggtctagaaaatagttg

SEQ ID NO: 102103 - DNA, 3370 bp, Homo sapiens
ttgtatccgattggctggtctgggcgcgtcactgctggctgaaggctgcgctcaggcccgtggatctcatcgaagatggcggcgcgatctgtgtcgggcattaccagaagagtcttcatgtggacagtctcagggacaccatgtagagaattttggtctcgattcagaaaagagaaagagccagtggttgttgagacagtagaagagaaaaaggaacctatcctagtgtgtccacctttacgaagccgagcatacacaccacctgaagatctccagagtcgtttggaatcttacgttaaagaagtttttggttcatctcttcctagtaattggcaagacatctccctggaagatagtcgtctaaagttcaatcttctggctcatttagctgatgacttgggtcatgtagtccctaactccagactccaccagatgtgcagggttagagatgttcttgatttctataatgtccctattcaagatagatctaaatttgatgaactcagtgccagtaatctgccccccaatttgaaaatcacttggagttactaagcaattcggaagagaaacacattgaaatcactgtctttccctgagcaagggggctgctcattagatcttttgatactttaccatgtgaaatactaccagaactgttctctaaacccactttttctgtagaggaatgtatcatctttttttttctcatattacaaatggacaaataacggactttctattttcatatttgctgaaaccattttttaaatgaaattaggtcattatttatgaaaagttttgagagggcactgtcaacttgggtttaagacaggaggacattgcaagttcacacctttcataagcataaagtagttgcaagaaagtattttcatcctgttaggattcatatctaagatagagttatgcattgcacatacacaaataaacttttattagatagatacctataaaagaaacataaaagtatgttgtgtattactgacagttctagattaatttcttttagaattaaagtagatttgttaaagtgtaattgtgtgttgtaaattttttaagtgaaatttgcttgcgctctgccttgccatttctttccagtaagtataattttgaaaaaattagaatatatgccaaatattgagtgctgtgactcttcctcataagagatgtgccagattctatgtctaattgcatattctcttcagaggagatgatgcttattttaaacctttttctctataacttttaaaaagtggtgctgagtattcactagagtggcaagtctttgtgctttaatgcactcaatttgtggaaattacttaaatagcaggttatcagatggttctgaatgacaaaggtgttaaatttgggatttttttttcaagctttagatatggctggagagtaatgagacagaaggaatgtcttatattgttctgactgctgacaattcctaaagaaaagtgatagaagggtttttaacaaaataagttgcatttattctctttcccagggttactcctttgaagagggcaaaattcagttgggaatataaattctggaatcttcatgaagaaaattagttaacagtatagacatgccctacaaatatcatccacaggcacttcattcaagaacttcaggtgtcagagtgcctggagctctggagcttagacattagagttgattccttggggattggttccaggacacctacttggataccaaagtccacagatgcccaagccccttttataaaatgatgtagtatttgcatattatgtatgcacatcctcccatatactttaaatcatctttagattacttatactgaatagaatgtaaatagtatttacaattgtgaatacaatgtatttagttatgtaaatatgtaaattttaaagttatgtaaatatgtagctatgtaaatagctataaaataatatttacaattgtgaatagtatgtaaatagttgtgaacataactattgtgaatactatgttatatgttatagttgtgaatgtaaatagtattcacaattgtgaatacaatgtaaatagctttcacaattgtgaatacaatgtaagtagctatgtaaatagtgaatacaatgtaaatagctatgtaaatagttgttatgctgattagggaataatgagaaggaaaaaaagtatacatattcagtacagatgcagtcatctttttttcccctcgaacatttttgatccacaattggttgaatccacagatggggaacacacagtcttggtaaatttaaccaacaaggagggtaaacgcatcccaacagggaaggtaaactgcacatccatcagtacctctagagggcatcactggtttatagctcaatacagtgactatatcagaataatggcctttagttttcctgaaagattaaattaggcttgctgttgttgaatgagataatcaaacatatgatgtaattttaaagggtttacatacagaaggcctgctgtatgtcctgcttctgctgtgtaaaagattcagcatggaatcattggaattttatgtacaggatttcattatctcattttctatacaatttttccttctgatccagagacacggaaaaacaaagggcaagatggaaataagggatgagaaggtctatgtggaaaaacagttacaactggagtggtaactgcaaaaaccaagcagcttcatgtgatcgttaggacagaagaaatttctcctttgtagcctagagcaatattctcaaaatttaatgcgcatgttaatcatttggggatcttttattcattttttcatgtggggatcttttaaaaatgcaaattctgatttggtaagtctggagtaggtcctgagcttctgcatgcttcaaaagctgattatgttttgagaacatggatctagatgctggtattgaggtgggagacaagtactgccacctgaaacaacagtcttggtaaatttagccgacgagggtaaacacatcctaacagggaaggtaaactgtacgtccatcagtaccactagagggcatcactggtttatagttcaatacagtgaatatatcagaataatggcctttagttttcctgaaagattaaattaggcttgctaacttgtttaatgagataatcaaacatatgatgtaattttaaagggtttacatttttaaaaatttaatggggtatcagttaactaattttacttagatggaacttctgtaagcttagtaggtatgcttaaataaagcctgctaataaaatagagattcagactcaatagaatggttttacatatgtaatatatgttttaaacagcataaaataaactcctccctccttt

SEQ ID NO: 102104 - DNA, 1462 bp, Homo sapiens
  misc_feature (1105)..(1105): n is a, c, g, or t
  misc_feature (1113)..(1113): n is a, c, g, or t
ttgtatccgattggctggtctgggcgcgtcactgctggctgaaggctgcgctcaggcccgtggatctcatcgaagatggcggcgcgatctgtgtcgggcattaccagaagagtcttcatgtggacagtctcagggacaccatgtagagaattttggtctcgattcagaaaagagaaagagccagtggttgttgagacagtagaagagaaaaaggaacctatcctagtgtgtccacctttacgaagccgagcatacacaccacctgaagatctccagagtcgtttggaatcttacgttaaagaagtttttggttcatctcttcctagtaattggcaagacatctccctggaagatagtcgtctaaagttcaatcttctggctcatttagctgatgacttgggtcatgtagtccctaactccagactccaccagatgtgcagggttagagatgttcttgatttctataatgtccctattcaagatagatctaaatttgatgaactcagtgccagtaatctgccccccaatttgaaaatcacttggagttactaagcaattcggaagagaaacacattgaaatcactgtctttccctgagcaagggggctgctcattagatcttttgatactttaccatgtgaaatactaccagaactgttctctaaacccactttttctgtagaggaatgtatcatctttttttttctcatattacaaatggacaaataacggactttctattttcatatttgctgaaaccattttttaaatgaaattaggtcattatttatgaaaagttttgagagggcactgtcaacttgggtttaagacaggaggacattgcaagttcacacctttcataagcataaagtagttgcaagaaagtattttcatcctgttaggattcatatctaagatagagttatgcattgcacatacacaaataaacttttattagatagatacctataaaagaaacataaaagtatgttgtgtattactgacagttctagattaatttcttttagaattaaagtagatttgttaaagtgtaaaaaaaaaaaaaaaaaaaaaaaaaaaaaaaaaaaaaaaaaaaaaaaaaaaanaaaaaaanaaaaaaaaaagaggggggggggggaaaaatactacccaggggagggaggcgacaagtttacgatgccagcaaacgatgttgttctaatatagaggagggctccccatgatgagagagtgattttattaaaacgacgaaggagcgcgcctattctaaaaccagtcgagtgatggaaaaaccactcattcatgttatgatcctatgaaagaaggcaccaatctttgggggcggggagaaatagtgggaacaacccatccagcaatattaaggctgcgtgagatatataacatgatagttattggtgacacactgctaattcttcggaagattagctggtatttataattag

SEQ ID NO: 102105 - DNA, 3336 bp, Homo sapiens
  misc_feature (20)..(21): n is a, c, g, or t
gatctagagtatccccgtcnnatcttctgaatccatcgaagatggcggcgcgatctgtgtcgggcattaccagaagagtcttcatgtggacagtctcagggacaccatgtagagaattttggtctcgattcagaaaagagaaagagccagtggttgttgagacagtagaagagaaaaaggaacctatcctagtgtgtccacctttacgaagccgagcatacacaccacctgaagatctccagagtcgtttggaatcttacgttaaagaagtttttggttcatctcttcctagtaattggcaagacatctccctggaagatagtcgtctaaagttcaatcttctggctcatttagctgatgacttgggtcatgtagtccctaactccagactccaccagatgtgcagggttagagatgttcttgatttctataatgtccctattcaagatagatctaaatttgatgaactcagtgccagtaatctgccccccaatttgaaaatcacttggagttactaagcaattcggaagagaaacacattgaaatcactgtctttccctgagcaagggggctgctcattagatcttttgatactttaccatgtgaaatactaccagaactgttctctaaacccactttttctgtagaggaatgtatcatctttttttttctcatattacaaatggacaaataacggactttctattttcatatttgctgaaaccattttttaaatgaaattaggtcattatttatgaaaagttttgagagggcactgtcaacttgggtttaagacaggaggacattgcaagttcacacctttcataagcataaagtagttgcaagaaagtattttcatcctgttaggattcatatctaagatagagttatgcattgcacatacacaaataaacttttattagatagatacctataaaagaaacataaaagtatgttgtgtattactgacagttctagattaatttcttttagaattaaagtagatttgttaaagtgtaattgtgtgttgtaaattttttaagtgaaatttgcttgcgctctgccttgccatttctttccagtaagtataattttgaaaaaattagaatatatgccaaatattgagtgctgtgactcttcctcataagagatgtgccagattctatgtctaattgcatattctcttcagaggagatgatgcttattttaaacctttttctctataacttttaaaaagtggtgctgagtattcactagagtggcaagtctttgtgctttaatgcactcaatttgtggaaattacttaaatagcaggttatcagatggttctgaatgacaaaggtgttaaatttgggatttttttttcaagctttagatatggctggagagtaatgagacagaaggaatgtcttatattgttctgactgctgacaattcctaaagaaaagtgatagaagggtttttaacaaaataagttgcatttattctctttcccagggttactcctttgaagagggcaaaattcagttgggaatataaattctggaatcttcatgaagaaaattagttaacagtatagacatgccctacaaatatcatccacaggcacttcattcaagaacttcaggtgtcagagtgcctggagctctggagcttagacattagagttgattccttggggattggttccaggacacctacttggataccaaagtccacagatgcccaagccccttttataaaatgatgtagtatttgcatattatgtatgcacatcctcccatatactttaaatcatctttagattacttatactgaatagaatgtaaatagtatttacaattgtgaatacaatgtatttagttatgtaaatatgtaaattttaaagttatgtaaatatgtagctatgtaaatagctataaaataatatttacaattgtgaatagtatgtaaatagttgtgaacataactattgtgaatactatgttatatgttatagttgtgaatgtaaatagtattcacaattgtgaatacaatgtaaatagctttcacaattgtgaatacaatgtaagtagctatgtaaatagtgaatacaatgtaaatagctatgtaaatagttgttatgctgattagggaataatgagaaggaaaaaaagtatacatattcagtacagatgcagtcatctttttttcccctcgaacatttttgatccacaattggttgaatccacagatggggaacacacagtcttggtaaatttaaccaacaaggagggtaaacgcatcccaacagggaaggtaaactgcacatccatcagtacctctagagggcatcactggtttatagctcaatacagtgactatatcagaataatggcctttagttttcctgaaagattaaattaggcttgctgttgttgaatgagataatcaaacatatgatgtaattttaaagggtttacatacagaaggcctgctgtatgtcctgcttctgctgtgtaaaagattcagcatggaatcattggaattttatgtacaggatttcattatctcattttctatacaatttttccttctgatccagagacacggaaaaacaaagggcaagatggaaataagggatgagaaggtctatgtggaaaaacagttacaactggagtggtaactgcaaaaaccaagcagcttcatgtgatcgttaggacagaagaaatttctcctttgtagcctagagcaatattctcaaaatttaatgcgcatgttaatcatttggggatcttttattcattttttcatgtggggatcttttaaaaatgcaaattctgatttggtaagtctggagtaggtcctgagcttctgcatgcttcaaaagctgattatgttttgagaacatggatctagatgctggtattgaggtgggagacaagtactgccacctgaaacaacagtcttggtaaatttagccgacgagggtaaacacatcctaacagggaaggtaaactgtacgtccatcagtaccactagagggcatcactggtttatagttcaatacagtgaatatatcagaataatggcctttagttttcctgaaagattaaattaggcttgctaacttgtttaatgagataatcaaacatatgatgtaattttaaagggtttacatttttaaaaatttaatggggtatcagttaactaattttacttagatggaacttctgtaagcttagtaggtatgcttaaataaagcctgctaataaaatagagattcagactcaatagaatggttttacatatgtaatatatgttttaaacagcataaaataaactcctccctccttt

SEQ ID NO: 102106 - DNA, 3282 bp, Homo sapiens
  misc_feature (20)..(21): n is a, c, g, or t
gatctagagtatccccgtcnnatcttctgaatccatcgaagatggcggcgcgatctgtgtcgggcattaccagaagagtcttcatgtggacagtctcagggacaccatgtagagaattttggtctcgattcagaaaagagaaagagccagtggttgttgagacagtagaagagactgaagatctccagagtcgtttggaatcttacgttaaagaagtttttggttcatctcttcctagtaattggcaagacatctccctggaagatagtcgtctaaagttcaatcttctggctcatttagctgatgacttgggtcatgtagtccctaactccagactccaccagatgtgcagggttagagatgttcttgatttctataatgtccctattcaagatagatctaaatttgatgaactcagtgccagtaatctgccccccaatttgaaaatcacttggagttactaagcaattcggaagagaaacacattgaaatcactgtctttccctgagcaagggggctgctcattagatcttttgatactttaccatgtgaaatactaccagaactgttctctaaacccactttttctgtagaggaatgtatcatctttttttttctcatattacaaatggacaaataacggactttctattttcatatttgctgaaaccattttttaaatgaaattaggtcattatttatgaaaagttttgagagggcactgtcaacttgggtttaagacaggaggacattgcaagttcacacctttcataagcataaagtagttgcaagaaagtattttcatcctgttaggattcatatctaagatagagttatgcattgcacatacacaaataaacttttattagatagatacctataaaagaaacataaaagtatgttgtgtattactgacagttctagattaatttcttttagaattaaagtagatttgttaaagtgtaattgtgtgttgtaaattttttaagtgaaatttgcttgcgctctgccttgccatttctttccagtaagtataattttgaaaaaattagaatatatgccaaatattgagtgctgtgactcttcctcataagagatgtgccagattctatgtctaattgcatattctcttcagaggagatgatgcttattttaaacctttttctctataacttttaaaaagtggtgctgagtattcactagagtggcaagtctttgtgctttaatgcactcaatttgtggaaattacttaaatagcaggttatcagatggttctgaatgacaaaggtgttaaatttgggatttttttttcaagctttagatatggctggagagtaatgagacagaaggaatgtcttatattgttctgactgctgacaattcctaaagaaaagtgatagaagggtttttaacaaaataagttgcatttattctctttcccagggttactcctttgaagagggcaaaattcagttgggaatataaattctggaatcttcatgaagaaaattagttaacagtatagacatgccctacaaatatcatccacaggcacttcattcaagaacttcaggtgtcagagtgcctggagctctggagcttagacattagagttgattccttggggattggttccaggacacctacttggataccaaagtccacagatgcccaagccccttttataaaatgatgtagtatttgcatattatgtatgcacatcctcccatatactttaaatcatctttagattacttatactgaatagaatgtaaatagtatttacaattgtgaatacaatgtatttagttatgtaaatatgtaaattttaaagttatgtaaatatgtagctatgtaaatagctataaaataatatttacaattgtgaatagtatgtaaatagttgtgaacataactattgtgaatactatgttatatgttatagttgtgaatgtaaatagtattcacaattgtgaatacaatgtaaatagctttcacaattgtgaatacaatgtaagtagctatgtaaatagtgaatacaatgtaaatagctatgtaaatagttgttatgctgattagggaataatgagaaggaaaaaaagtatacatattcagtacagatgcagtcatctttttttcccctcgaacatttttgatccacaattggttgaatccacagatggggaacacacagtcttggtaaatttaaccaacaaggagggtaaacgcatcccaacagggaaggtaaactgcacatccatcagtacctctagagggcatcactggtttatagctcaatacagtgactatatcagaataatggcctttagttttcctgaaagattaaattaggcttgctgttgttgaatgagataatcaaacatatgatgtaattttaaagggtttacatacagaaggcctgctgtatgtcctgcttctgctgtgtaaaagattcagcatggaatcattggaattttatgtacaggatttcattatctcattttctatacaatttttccttctgatccagagacacggaaaaacaaagggcaagatggaaataagggatgagaaggtctatgtggaaaaacagttacaactggagtggtaactgcaaaaaccaagcagcttcatgtgatcgttaggacagaagaaatttctcctttgtagcctagagcaatattctcaaaatttaatgcgcatgttaatcatttggggatcttttattcattttttcatgtggggatcttttaaaaatgcaaattctgatttggtaagtctggagtaggtcctgagcttctgcatgcttcaaaagctgattatgttttgagaacatggatctagatgctggtattgaggtgggagacaagtactgccacctgaaacaacagtcttggtaaatttagccgacgagggtaaacacatcctaacagggaaggtaaactgtacgtccatcagtaccactagagggcatcactggtttatagttcaatacagtgaatatatcagaataatggcctttagttttcctgaaagattaaattaggcttgctaacttgtttaatgagataatcaaacatatgatgtaattttaaagggtttacatttttaaaaatttaatggggtatcagttaactaattttacttagatggaacttctgtaagcttagtaggtatgcttaaataaagcctgctaataaaatagagattcagactcaatagaatggttttacatatgtaatatatgttttaaacagcataaaataaactcctccctccttt

SEQ ID NO: 102107 - DNA, 848 bp, Homo sapiens
ttgtatccgattggctggtctgggcgcgtcactgctggctgaaggctgcgctcaggcccgtggatctcatcgaagatggcggcgcgatctgtgtcgggcattaccagaagagtcttcatgtggacagtctcagggacaccatgtagagaattttggtctcgattcagaaaagagaaagagccagtggttgttgagacagtagaagagaaaaaggaacctatcctagtgtgtccacctttacgaagccgagcatacacaccacctgaagatctccagagtcgtttggaatcttacgttaaagaagtttttggttcatctcttcctagtaattggcaagacatctccctggaagatagtcgtctaaagttcaatcttctggctcatttagctgatgacttgggtcatgtagtccctaactccagactccaccagatgtgcagggttagagatgttcttgatttctataatgtccctattcaagatagatctaaatttgatgaactcagtgccagtaatctgccccccaatttgaaaatcacttggagttactaagcaattcggaagagaaaccatgaatatgtttcctgagcaggggctgcatagatttgtacttaccaggaattacgaagttctaaccatttcgtgggagtatacttgttccattacaggacaataggctcatcaatgcgaacatttaagactgcatttgacagtggcgcgcctgtagacggatgagtacttaggtagatgaagttccgggacactgagaggggcccattggctaaaaggggtcgaatcaagtgggaaaaggccatatgggattgttgtgtctttccttccttccgcag

SEQ ID NO: 102108 - DNA, 744 bp, Homo sapiens
  misc_feature (20)..(21): n is a, c, g, or t
  misc_feature (155)..(155): n is a, c, g, or t
  misc_feature (347)..(347): n is a, c, g, or t
  misc_feature (510)..(510): n is a, c, g, or t
  misc_feature (662)..(662): n is a, c, g, or t
gatctagagtatccccgtcnnatcttctgaatccatcgaagatggcggcgcgatctgtgtcgggcattaccagaagagtcttcatgtggacagtctcagggacaccatgtagagaattttggtctcgattcagaaaagggggagaaagagccaanggttggggttccttggggggggggagcttttttttgctggggggggggaaaaaaacggggggggaaaccaaaagggtttacggacaggacgaaaaacaagggaaaaacctatcctagttggtgtccacctttacgaaggccgaggcattacacaaccacctgaaagattctcccaagaaggtttcccggggntttttttttacttacccatcggggggggggggcgggggggggcaaaaaacacaaaaaacccaggttttttttcccccggttttttttttttaaaacccggttttcttaaacaaggaaaaagttttattctggggttttttcccatctttcttcctagtaattnggcaagacatcgtccctgtgaagatagtcgtctaaagttcaatccttctggctccatttctacacgcttggaattgcacctttttggcggggtccatggtaagtcccctaatcttcgcagacgtccaccaagatgtggcccaaggggggggnttttttcaaaacgggggggacaaaaggggcggggaaaaacattttgggggtttttctcccttttttcgggaactatttctat

SEQ ID NO: 102109 - DNA, 1053 bp, Homo sapiens
ttgtatccgattggctggtctgggcgcgtcactgctggctgaaggctgcgctcaggcccgtggatctcatcgaagatggcggcgcgatctgtgtcgggcattaccagaagagtcttcatgtggacagtctcagggacaccatgtagagaattttggtctcgattcagaaaagagaaagagccagtggttgttgagacagtagaagagaaaaaggaacctatcctagtgtgtccacctttacgaagccgagcatacacaccacctgaagatctccagagtcgtttggaatcttacgttaaagaagtttttggttcatctcttcctagtaattggcaagacatctccctggaagatagtcgtctaaagttcaatcttctggctcatttagctgatgacttgggtcatgtagtccctaactccagactccaccagatgtgcagggttagagatgttcttgatttctataatgtccctattcaagatagatctaaatttgatgaactcagtgccagtaatctgccccccaatttgaaaatcacttggagttactaagcaattcggaagagaaacacattgaaatcactgtctttccctgagcaagggggctgctcattagatcttttgatactttaccatgtgaaatactaccagaactgttctctaaacccactttttctgtagaggaatgtatcatctttttttttctcatattacaaatggacaaataacggactttctattttcatatttgctgaaaccattttttaaatgaaattaggtcattatttatgaaaagttttgagagggcactgtcaacttgggtttaagacaggaggacattgcaagttcacacctttcataagcataaagtagttgcaagaaagtattttcatcctgttaggattcatatctaagatagagttatgcattgcacatacacaaataaacttttattagatagatacctataaaagaaacataaaagtatgttgtgtattactgacagttctagattaatttcttttagaattaaagtagatttgttaaagtgta

SEQ ID NO: 102110 - DNA, 4035 bp, Homo sapiens
ttgtatccgattggctggtctgggcgcgtcactgctggctgaaggctgcgctcaggcccgtggatctcatcgaagatggcggcgcgatctgtgtcgggcattaccagaagagtcttcatgtggacagtctcagggacaccatgtagagaattttggtctcgattcagaaaagagaaagagccagtggttgttgagacagtagaagagaaaaaggaacctatcctagtgtgtccacctttacgaagccgagcatacacaccacctgaagatctccagagtcgtttggaatcttacgttaaagaagtttttggttcatctcttcctagtaattggcaagacatctccctggaagatagtcgtctaaagttcaatcttctggctcatttagctgatgacttgggtcatgtagtccctaactccagactccaccagatgtgcagggttagagatgttcttgatttctataatgtccctattcaagatagatctaaatttgatgaactcagtgccagtaatctgccccccaatttgaaaatcacttggagttactaagcaattcggaagagaaacacattgaaatcactgtctttccctgagcaagggggctgctcattagatcttttgatactttaccatgtgaaatactaccagaactgttctctaaacccactttttctgtagaggaatgtatcatctttttttttctcatattacaaatggacaaataacggactttctattttcatatttgctgaaaccattttttaaatgaaattaggtcattatttatgaaaagttttgagagggcactgtcaacttgggtttaagacaggaggacattgcaagttcacacctttcataagcataaagtagttgcaagaaagtattttcatcctgttaggattcatatctaagatagagttatgcattgcacatacacaaataaacttttattagatagatacctataaaagaaacataaaagtatgttgtgtattactgacagttctagattaatttcttttagaattaaagtagatttgttaaagtgtaattgtgtgttgtaaattttttaagtgaaatttgcttgcgctctgccttgccatttctttccagtaagtataattttgaaaaaattagaatatatgccaaatattgagtgctgtgactcttcctcataagagatgtgccagattctatgtctaattgcatattctcttcagaggagatgatgcttattttaaacctttttctctataacttttaaaaagtggtgctgagtattcactagagtggcaagtctttgtgctttaatgcactcaatttgtggaaattacttaaatagcaggttatcagatggttctgaatgacaaaggtgttaaatttgggatttttttttcaagctttagatatggctggagagtaatgagacagaaggaatgtcttatattgttctgactgctgacaattcctaaagaaaagtgatagaagggtttttaacaaaataagttgcatttattctctttcccagggttactcctttgaagagggcaaaattcagttgggaatataaattctggaatcttcatgaagaaaattagttaacagtatagacatgccctacaaatatcatccacaggcacttcattcaagaacttcaggtgtcagagtgcctggagctctggagcttagacattagagttgattccttggggattggttccaggacacctacttggataccaaagtccacagatgcccaagccccttttataaaatgatgtagtatttgcatattatgtatgcacatcctcccatatactttaaatcatctttagattacttatactgaatagaatgtaaatagtatttacaattgtgaatacaatgtatttagttatgtaaatatgtaaattttaaagttatgtaaatatgtagctatgtaaatagctataaaataatatttacaattgtgaatagtatgtaaatagttgtgaacataactattgtgaatactatgttatatgttatagttgtgaatgtaaatagtattcacaattgtgaatacaatgtaaatagctttcacaattgtgaatacaatgtaagtagctatgtaaatagtgaatacaatgtaaatagctatgtaaatagttgttatgctgattagggaataatgagaaggaaaaaaagtatacatattcagtacagatgcagtcatctttttttcccctcgaacatttttgatccacaattggttgaatccacagatggggaacacacagtcttggtaaatttaaccaacaaggagggtaaacgcatcccaacagggaaggtaaactgcacatccatcagtacctctagagggcatcactggtttatagctcaatacagtgactatatcagaataatggcctttagttttcctgaaagattaaattaggcttgctgttgttgaatgagataatcaaacatatgatgtaattttaaagggtttacatacagaaggcctgctgtatgtcctgcttctgctgtgtaaaagattcagcatggaatcattggaattttatgtacaggatttcattatctcattttctatacaatttttccttctgatccagagacacggaaaaacaaagggcaagatggaaataagggatgagaaggtctatgtggaaaaacagttacaactggagtggtaactgcaaaaaccaagcagcttcatgtgatcgttaggacagaagaaatttctcctttgtagcctagagcaatattctcaaaatttaatgcgcatgttaatcatttggggatcttttattcattttttcatgtggggatcttttaaaaatgcaaattctgatttggtaagtctggagtaggtcctgagcttctgcatgcttcaaaagctgattatgttttgagaacatggatctagatgctggtattgaggtgggagacaagtactgccacctgaaacaacagtcttggtaaatttagccgacgagggtaaacacatcctaacagggaaggtaaactgtacgtccatcagtaccactagagggcatcactggtttatagttcaatacagtgaatatatcagaataatggcctttagttttcctgaaagattaaattaggcttgctaacttgtttaatgagataatcaaacatatgatgtaattttaaagggtttacatttttaaaaatttaatgattgctacataaaaagggtatcagttaactaattttacttagatggaacttctgtaagcttagtaggtatgcttaaataaagcctgctaataaaatagagattcagactcaatagaatggttttacatatgtaatatatgttttaaacagcataaaataaactcctccctcctttcttaacgtgtcatttttctgattacaaaagtagcacgttctttttagaaaattgggaaggaaaaaagcaaaaacaagaatgaaaaaacaaaactatcttgccgctcataattacttaacattttggtatatttccaaatgaaaacaattattttcctgtattttacaattactatggcatcatgctccccttcacattataagcatttccccatgtttttaaagacaagaataacaaatttgattaatagcatattattgtataattagatgtcatgcaattatttaaccaatattcaactggatatttaaattcttcccagtgttttgcttttctgttctttttaatcctgcttttctagttcttagagaattggtctgccatagatctttctactcagaagtagaagatactgtactgtaaatttcttgaccctaaacctaagaatgaacaatttggtcctacttctttgattcataatcccattagcatgtattctgtgaatcctaaaacacaaagtgacaaggactttgaaattttcactaggttgttacacagtgcaaaaatcctaaagcttttacttgaaaagtttccaaatttaaaaatagtctgtaacctctgatcctatgaattccaaagttaatctcagc

SEQ ID NO: 102111 - DNA, 1641 bp, Homo sapiens
  misc_feature (1105)..(1105): n is a, c, g, or t
  misc_feature (1113)..(1113): n is a, c, g, or t
ttgtatccgattggctggtctgggcgcgtcactgctggctgaaggctgcgctcaggcccgtggatctcatcgaagatggcggcgcgatctgtgtcgggcattaccagaagagtcttcatgtggacagtctcagggacaccatgtagagaattttggtctcgattcagaaaagagaaagagccagtggttgttgagacagtagaagagaaaaaggaacctatcctagtgtgtccacctttacgaagccgagcatacacaccacctgaagatctccagagtcgtttggaatcttacgttaaagaagtttttggttcatctcttcctagtaattggcaagacatctccctggaagatagtcgtctaaagttcaatcttctggctcatttagctgatgacttgggtcatgtagtccctaactccagactccaccagatgtgcagggttagagatgttcttgatttctataatgtccctattcaagatagatctaaatttgatgaactcagtgccagtaatctgccccccaatttgaaaatcacttggagttactaagcaattcggaagagaaacacattgaaatcactgtctttccctgagcaagggggctgctcattagatcttttgatactttaccatgtgaaatactaccagaactgttctctaaacccactttttctgtagaggaatgtatcatctttttttttctcatattacaaatggacaaataacggactttctattttcatatttgctgaaaccattttttaaatgaaattaggtcattatttatgaaaagttttgagagggcactgtcaacttgggtttaagacaggaggacattgcaagttcacacctttcataagcataaagtagttgcaagaaagtattttcatcctgttaggattcatatctaagatagagttatgcattgcacatacacaaataaacttttattagatagatacctataaaagaaacataaaagtatgttgtgtattactgacagttctagattaatttcttttagaattaaagtagatttgttaaagtgtaaaaaaaaaaaaaaaaaaaaaaaaaaaaaaaaaaaaaaaaaaaaaaaaaaaanaaaaaaanaaaaaaaaaaaaaaaaaaaaaaaaaaggggggggggaggcgcacaacaaaaaaatccccactgaggaggcggcgccgacagcacagcacgcacccgcacgagtagtcttgattgagatagaagaggaggagcgccaaaaaaaaggaagtggagaacgataatataataaaagagaagaagaagaggaggacgaagaaaagaaaacaagacactacagaaggagggaggaaaaacaacagccgacaagaacaggaacaaacaatggaaggagaaaaaggcacaccaacaatagctgagatgggataggcagaaacagaacaacaagtaggaggaacaacaccaaccgcaccgcgacgaaagaaaattaaaagcccacaccagggagaacaacaccagcaaaactcagccagcaagaatcaaacgacgggtacaaccaaaaacaccgacgaaagatataagaggcggaacagaaaaaaaaatatgagccataaaaaagagtaataatgcacaaaaacacaattgatacac

SEQ ID NO: 102112 - DNA, 3329 bp, Homo sapiens
ttgtatccgattggctggtctgggcgcgtcactgctggctgaaggctgcgctcaggcccgtggatctcatcgaagatggcggcgcgatctgtgtcgggcattaccagaagagtcttcatgtggacagtctcagggacaccatgtagagaattttggtctcgattcagaaaagagaaagagccagtggttgttgagacagtagaagagaaaaaggaacctatcctagtgtgtccacctttacgaagccgagcatacacaccacctgaagatctccagagtcgtttggaatcttacgttaaagaagtttttggttcatctcttcctagtaattggcaagacatctccctggaagatagtcgtctaaagttcaatcttctggctcatttagctgatgacttgggtcatgtagtccctaactccagactccaccagatgtgcagggttagagatgttcttgatttctataatgtccctattcaagatagatctaaatttgatgaactcagtgccagtaatctgccccccaattacattgaaatcactgtctttccctgagcaagggggctgctcattagatcttttgatactttaccatgtgaaatactaccagaactgttctctaaacccactttttctgtagaggaatgtatcatctttttttttctcatattacaaatggacaaataacggactttctattttcatatttgctgaaaccattttttaaatgaaattaggtcattatttatgaaaagttttgagagggcactgtcaacttgggtttaagacaggaggacattgcaagttcacacctttcataagcataaagtagttgcaagaaagtattttcatcctgttaggattcatatctaagatagagttatgcattgcacatacacaaataaacttttattagatagatacctataaaagaaacataaaagtatgttgtgtattactgacagttctagattaatttcttttagaattaaagtagatttgttaaagtgtaattgtgtgttgtaaattttttaagtgaaatttgcttgcgctctgccttgccatttctttccagtaagtataattttgaaaaaattagaatatatgccaaatattgagtgctgtgactcttcctcataagagatgtgccagattctatgtctaattgcatattctcttcagaggagatgatgcttattttaaacctttttctctataacttttaaaaagtggtgctgagtattcactagagtggcaagtctttgtgctttaatgcactcaatttgtggaaattacttaaatagcaggttatcagatggttctgaatgacaaaggtgttaaatttgggatttttttttcaagctttagatatggctggagagtaatgagacagaaggaatgtcttatattgttctgactgctgacaattcctaaagaaaagtgatagaagggtttttaacaaaataagttgcatttattctctttcccagggttactcctttgaagagggcaaaattcagttgggaatataaattctggaatcttcatgaagaaaattagttaacagtatagacatgccctacaaatatcatccacaggcacttcattcaagaacttcaggtgtcagagtgcctggagctctggagcttagacattagagttgattccttggggattggttccaggacacctacttggataccaaagtccacagatgcccaagccccttttataaaatgatgtagtatttgcatattatgtatgcacatcctcccatatactttaaatcatctttagattacttatactgaatagaatgtaaatagtatttacaattgtgaatacaatgtatttagttatgtaaatatgtaaattttaaagttatgtaaatatgtagctatgtaaatagctataaaataatatttacaattgtgaatagtatgtaaatagttgtgaacataactattgtgaatactatgttatatgttatagttgtgaatgtaaatagtattcacaattgtgaatacaatgtaaatagctttcacaattgtgaatacaatgtaagtagctatgtaaatagtgaatacaatgtaaatagctatgtaaatagttgttatgctgattagggaataatgagaaggaaaaaaagtatacatattcagtacagatgcagtcatctttttttcccctcgaacatttttgatccacaattggttgaatccacagatggggaacacacagtcttggtaaatttaaccaacaaggagggtaaacgcatcccaacagggaaggtaaactgcacatccatcagtacctctagagggcatcactggtttatagctcaatacagtgactatatcagaataatggcctttagttttcctgaaagattaaattaggcttgctgttgttgaatgagataatcaaacatatgatgtaattttaaagggtttacatacagaaggcctgctgtatgtcctgcttctgctgtgtaaaagattcagcatggaatcattggaattttatgtacaggatttcattatctcattttctatacaatttttccttctgatccagagacacggaaaaacaaagggcaagatggaaataagggatgagaaggtctatgtggaaaaacagttacaactggagtggtaactgcaaaaaccaagcagcttcatgtgatcgttaggacagaagaaatttctcctttgtagcctagagcaatattctcaaaatttaatgcgcatgttaatcatttggggatcttttattcattttttcatgtggggatcttttaaaaatgcaaattctgatttggtaagtctggagtaggtcctgagcttctgcatgcttcaaaagctgattatgttttgagaacatggatctagatgctggtattgaggtgggagacaagtactgccacctgaaacaacagtcttggtaaatttagccgacgagggtaaacacatcctaacagggaaggtaaactgtacgtccatcagtaccactagagggcatcactggtttatagttcaatacagtgaatatatcagaataatggcctttagttttcctgaaagattaaattaggcttgctaacttgtttaatgagataatcaaacatatgatgtaattttaaagggtttacatttttaaaaatttaatggggtatcagttaactaattttacttagatggaacttctgtaagcttagtaggtatgcttaaataaagcctgctaataaaatagagattcagactcaatagaatggttttacatatgtaatatatgttttaaacagcataaaataaactcctccctccttt

SEQ ID NO: 102113 - DNA, 480 bp, Homo sapiens
ggagatggaggttgcagtgagctgacatcatgctattgcactctagcctgggcaacagagtgagaccctgtctcaaaaaaaaaaaaaatacttgggggaaacaataaaaataaccatagaaaatataagttaatataattatatagtattcacacttttaagtattataaataatatagagatgatttatacgggaagatgtgcataggttatatgcaaatactacaccattttatatcaggtacttgagcatcctgggatttgagtatctatgggggtcctagaaccaatctccctcaggtaccgagggactatactataccttgttcttgaacgagatgatttgacattttaaatagatgttcccctagattaatctgtaaatataatacatttccaaccagaatgctaacacattaatttttttttttaacgatctggaaaaaataaaaatacataggaaaatctgaaaaaaaaaaa

SEQ ID NO: 102114 - DNA, 783 bp, Homo sapiens
gaagccatggggccagttgccatgatgcagggagagtgtggaaagtgagagtccagggtgttggctgaggaagaggagcctgagaggaaatgaggaagtaagcagtgggaggaaccaggagggaaccttcacaggagccagggggaccaaggggagagttcaacaagccaggtggccaaggggctccatatgaggatgtgaacatgcagtgtggccataagaggtcattggtagtgcccatggtctaataacaactctgcattttacagactgagatacagactgggatactgaggcccagcgagcggaaatgggttgcccaaggtccacagggacttaggagccgagctgactcctggtctcctgactcccagttgaaggctgacccccaagtgatggcttctgaacgatggggttaagtgaccagcatgtagccacaggcagggaactgatgggagaagacctggtctctgcccctgaaattgggttgtgaggtacatgcagcaagcaaaattgaggttagacacagaggttgtactgaaggtctggaatgggtgacttcaaagcaagggcaagaggaattctctctttgaagacagctcagcacattttgtagactcaagtagtagctgcagggggatggccagaatgacctatgccccttatgcagttactgcgttgacttcccagacgagctgagagctgacattgctatgcacctgaatcgggagatcctgccactgccgtagtcgggggcagcgagcaggggctgcctgcgggcca

SEQ ID NO: 102115 - DNA, 400 bp, Homo sapiens
ttgctgaatggcttgggctctgggagggcatagcagcatccacctgcgcagggctgacagtggtttcctttgtctggaatgacgtgcttaatgttaataaggtctggaatgttgggagtcaagacagattttcttttggaatctctttggtcttggctccctgtaacagataatgcttgtgcttttctgttttctgattaaagtaggatatttagtagggcttttgcacttcacaagtggcagatttcctctttctcttgtaagctttttctgtcttgtgagcacatatcctaggcatgctcagacgagcgtgttttggaaggctggagttggcagggttcttcttttcccccagagtatctgcttcccttactgcatttgaacactgtactgtttctag

SEQ ID NO: 102116 - DNA, 446 bp, Homo sapiens
catgctgttgctgttggcttgcctcccttatacatgaaaaactcctatctgttccttgaaatcaagctcagatgctggctcctctgggaagccttcacttgtatcaacccccctcttaccctttttccccaatagaaaaaacctatttttcagttctttatatatacatttctattactatatttatctgagtaacagttcaaggatctgcctgaattataaagcatcatatccaaaacctgaaaaaaaatgaataatctttaaaacataagataatcagattccaaggaagcaaagaggaaaaagaaaaaagcaaagactacttaggaaatggaaagaggctatggaatacataaagttgtcttaaaggtagtacactatataataatacttttgcttctctttaccatttggtttgctctgtcaattaattttatttataacca

SEQ ID NO: 102117 - DNA, 466 bp, Homo sapiens
gtttctctgatcgctctgtcacaaccattctggtgaagaaagaatactttcctcaggtgatcctcttgcctcggcctcccaaagtgctgggattacaggtgtgagccaccacacctggccgattactctttttctaagaatctttccacctcactgttacactttttcttgtgtgagggtttcattctgtcttctcaccaaagatagaactttcttctttgggaacagggcagctagagctgtgggtgcgtccagacagattctttttgaacctgttaataaacatgtagatctaggtttttcatcacacccctcattcctccaggaaacctccttatgatactctcagcttggtcttgcaccctttccatcatttgccacttgcagtgatcacagttagtgtctgcctttcctgtgtccgtatctggtggtcacagttactgtctgcctttcctgtgtccatcca

SEQ ID NO: 102118 - DNA, 288 bp, Homo sapiens
gaatgacaactgacactttagaccttgggttggggagaaaatgggaaataataacagccttggggaagtctaggagtccttatgccctgcttaaggtgaaactgatacagaattctggctgatggttgctatttgagatgctgtttctagatttttcaagagggcggaaatttggatttttatgatttttttttttcttttttgagatggagttttactcttgttgcccaggctagagtgcaatggtgtgatctcggctcactgcaacctctgcctcccgggtacaag

SEQ ID NO: 102119 - DNA, 674 bp, Homo sapiens
ctcttttgtcaattgcacttgaccttttcaggaaaaagaaatcaattgataccttagtcctaatgtttgacccttttctatctcagaatagagaagtccctgtatttgttctttttttactcaagtttaatatagaccacctaggcacagaagctccgtgctatattctgttgcctgtaattgtccttccatctaattgggaaaaggttactctattgaaccatctgctgattcccttaccttttcactcttttgtcagtattcctttaccagtaaattcttggttatctaggtcctgaagtttcattcatgttttttttaaaagctttaatttttcttaggaaaactgtttctctcatcttaaagcagactatgatcttttctactttgttatacaatctgaacataatgaacactctaaagtcaggcatggattttatcataaaagcagatcgtattaagatttttttaaaaaagaaccaggattgaggaatctgtagctaataatttaataattcaccagcatgttttgggctcccacttcatgctggccactgggctaggcactgagggtgcagaagcaaacaaatcagcctcctggccctcagatttgcattccagtgagtccattcataaaacctaactcaaagccagcaacacccccaaaagggctg

SEQ ID NO: 102120 - DNA, 751 bp, Homo sapiens
ggttctatataggctttgcttccacaaggcctgggggatgcaacacctgttgatgcttctcagttttccactgcctttgacaggttggtggtttttaagccctttccactgtaccatccctactgcccctggtgcgaaagcatcatcttttgctcttgatctctaggtgggtaaaacctgcctgattagtagtgattcagatagtgtgacctccttcagttttctaagggctgaaactccttttttttttttccttttttcatgacttcagaggtaatcaggctctaggggactgattctctctaaccaaactctggagactgaattgtaaatccacatgcaaggttattaatttacagtgggaggtatacctatccagagatctgcatagagccccttcctgctctgctctagagaccaaattactataagaagggtccttgatgtgcaaagaattggacaagggaaattgggtgttgccaaaaggctgtttaaagcaagcagccttgattttggtgatccttcacttttctagtattttctggcttccgttgctttgttccttctttaaacttttcttttaatgctgtcatccattgaaatcctatacagagaaaagaaagcctgctcatccttcaggcccatgcatcctaggagctacaaaccctataaagcctttctgattccccagcatgttgtttttattctttgttcctttagcactttgtggataccactttttggaatattt

SEQ ID NO: 102121 - DNA, 367 bp, Homo sapiens
accactgtatcccaagcacctactcagcataatggttgatgttttatacattattaatgtttcagaatattatagtgtaaaagtgatcattctgtaccataattttcatcatatattcataagaagactgagagattatgccaaagttgtgatgactccaaaatactaataggaaattgctctatttttattagaggcaaatctagggtattgaacactaccagaacaatgttggtattcccagcatgactttttgttgttggagaccatgggtaggtttgtctgaagactggaagagactcagacttattttgctattaaatgttgtgcaatttatttaatatctaatacctattgaaaaaccagt

SEQ ID NO: 102122 - DNA, 431 bp, Homo sapiens
  misc_feature (416)..(416): n is a, c, g, or t
aacactgtccggagcactagggaaaacattttaagaaaaatactaataaatctaatcctctccaaaagggctaaattagtgcactcttctagcaggatctgaagcccaagaaataaagtgccagccgcaattctctttcacaacagcagggtaagaacgagagtctttgttcaatctttctccacttctgactcagtcacttactcagcagggtttatccatttcactacttcaactttcttcccaaacttcttctggcctcctccagcagtttctctttcccaacatccaaattctgttcattttccataacccattagcaaaaatagaagcatgaggccttagccaaacaaatccaagaaagtcttgtgtgtgtgtgtgtgtgtgtgtgtgtgtgtgtgtaattgtgtgtgttnggggaacaggtggga

SEQ ID NO: 102123 - DNA, 442 bp, Homo sapiens
ctctctcctaatttctctatgaaaaatccttgatttaatctaagatgggaagagagaggaagaatgactaacactttgtatttccatataggctcaggaatagggtaggaactagggtgaggtggaattttaaataaggacagtctctgacaaggcaggtttagggagaagtgagtgaagcagggtcgtgcaagtgtagcgtcggagcctacctttatttaaaagtttcatatcttgttcatcatggatattatttacctaatcagtgagtgtttttggtgccctcttaaattttccacccaaggtaagtagccttgctgactttaccttactccaggcttgttcaggacctttcaaataatttgctcagagacacccaactagaaagcggcaggatcactttggaaagttaaggcaggccacatagccaggggctgtctct

SEQ ID NO: 102124 - DNA, 441 bp, Homo sapiens
accttctatttttcggaggcaggcatgaggccccggagcctctccctccctcccctgctctccctacagggaagctactcccagcttgaggctttagctcagtgagcactcgggccctgtctcctgctaaccctcctggagtgtcctctgcctgcatgggcggatcaaggtgctattagcgctattccaggccagggggaggagtagcccttgttcttggcctaattctaatcagccctgcagccaccagaaaagggaaaaattcctttgcctgagattcccctggtccccagggtaccttctgtccatgaccaggctggcatgagcagagcgagagtctcttctcctttcctcacaagccagcttcttcatccatgtttgggtttcatttagagaaatccttcccccttagaggcagaggccaaatgcctcgtggctgag

SEQ ID NO: 102125 - DNA, 308 bp, Homo sapiens
cccttttgccatcctgagcttagggccgccctagaaacttggtcaagtgggaggagcagccttgaaaggtggtgtaatcagctttcttcctcctctctccaccctcttgaagctccacccctgagcagatgcttttgcactgcctgtgctcgttgctgctagggagaagacattttccttattttcattatataaaatatcttaaagggataggagcttataggaattaagtatcaaggctgtccatctctgtgtagttctagtttttatagaaccagtttttattttcactttccttcactcatcac

SEQ ID NO: 102126 - DNA, 336 bp, Homo sapiens
tgggcaggtcgccgcggggccaggcagcagatccggcaaagagagcagggaacaggaaggggcagtggttacgactttggagcgagagtgccaaggttcaaatcctgcctcttaccttggtgcaatttcccataatctatccctgtaatacactttttcatacattgagttttcttttcagtttgtttttgtttttttttgttgttgttatatatttctttttttagtttttcctccactatcctaaatcatcagcatttgttttttttaagacagagtctcactcggttgcccaggctggaatgcaatgacatgatctcagctcactacaacctc

SEQ ID NO: 102127 - DNA, 268 bp, Homo sapiens
ttatagatggttaaatcattttttgactactatcattttttaggtgtgacttgtggaagctttaatttcgtgggtccactaacaaatacttgtagtaacgtttgtttaagtagaattgaaaagttcttcatttactttataatgactattagggtgagcatttcagtttttcatttttgactcggaatttgtcaggaattggtttgctatagagatagtgtttagatttggaaagcaagtttagtaatcaaagtaatttaatagagat

SEQ ID NO: 102128 - DNA, 282 bp, Homo sapiens
gactaaagcctccaagctcaaaacagattgaagactgaaacggcctttattggccaggtgtagtggctcccgcctgtaatctcagcactttgggaagctgaggcagttggattacctgaggtcaggagttcaagaccagtctggtgaacatggtgaaaccccgtctctcctaaaaaaacaaaaaacaaaaattagccaggtgtgggggcaggcgcctgtaattccagccaaaaaaaaaaaaacttttttttttttttttgacagagtcttgctctgtcgccc

SEQ ID NO: 102129 - DNA, 363 bp, Homo sapiens
ttttttcctttctttaattgaagtgccctattacctgtttctggagtaggtattttcaaactggtccccctactttttccagttttgctccttagacacttctttccaaattagaactcttggaaacacacataacaacaacaaaacacctacctgctgattgtgctactttcctactcaaacatcttgtcttactgcagagagatggctagtccacgcaagtccaaattacagactgatcaaatctaggagtgactgcactgcctactcggaaatcaaagattctgggaagtgtcacctgcctgcttttggaaccagtattcttctgcagtggtctgcatttttgccatagtagttcatctg

SEQ ID NO: 102130 - DNA, 501 bp, Homo sapiens
cagtgtttgggcttattcccatataaaaaggagaaaggagggttgggggtggggaagggttgattttgtttcttctagagcttttttcttcttttgtttttgtttgttttgttttgtttgcatgcaaaaggtatttagttatgtcagtaactgagacttacttaaccattttacaactctttccccaaataaagtacttaaaactctccctgcattagtaggtagccagtttgtattgtgtttataggtttttataaagtcagctactaacctggtactatgtagattgtctaactgtatagatagatagcattaacatttgtgagaaatttcaacaaagaggttaaaccaatacgtttggaattgctggataaaagacccagagcagttaatcttacaattggtgttttccccaaagtatagacatgactgcccgtaaatactgctggggagtctaggactaattccagaaataaaaatacttctggtctacaaatgtga

SEQ ID NO: 102131 - DNA, 202 bp, Homo sapiens
aaacctaaaataaaagttataaaaaagaaaaaccaacaatgttctcctttcccatgactctcattcccactatcattccttcctcaaaacaagaaatggcagtttaatgtttatattttttctatgttcatatgaatgcactcaaaaatattcacaccataaaatgctttttcttatttaaaaaaataaaaaatgaaaatga

SEQ ID NO: 102132 - DNA, 162 bp, Homo sapiens
tgacttcccgagagttcctgacatgatggccaggaagagtttggacagacagctcagagtaggaagagagttcagagcggggagggagacctgttgactctgggaaggggaaagggaaaaaacactggcatcctgactgcagggaaacaatgaggcagcgga

SEQ ID NO: 102133 - DNA, 335 bp, Homo sapiens
tgtagagatggggtttcaccaagttgcccaggctggtgtcaagctcctgagctcgagggatcttcctgcctcagcctcccaaagtactggtattacagacatgagccactgcacccagctcctgattaccattattctcattttacacaatcctggggctgaaagagtaaaccatttgcccaaatcataatttgcggatgcgaggtgtcaggactgaaggatccacatttctgtgctcctcacctcatgaccaggaagcatgcagaaccattctgttcctacagatcacagcacaaaggctcacatacacactctgatgctcacctagcatggcc

SEQ ID NO: 102134 - DNA, 309 bp, Homo sapiens
catgagggaggtacacgtaagcaaaacaaggtctggttggaaaaatattccgaggctttctgtctcagcagcttaggggtaaacctatgcccagaatcagtaggaaagttacaagggtcttttccttccagaagctaaggattccatcaaaggagcaagctcagacactggtaacaatgcgccccctactgacaaaattaacgtctacagtacagcaacgcttcatatacccaacatagatctccttagaatagcattgagagagagaaaatacctaggacctacttgagaaatttaaatccttcgaaa

SEQ ID NO: 102135 - DNA, 569 bp, Homo sapiens
gtgaaacatgaaatttctaatgaagaagaagaaacttctattacagtgtatctgatgtacctcattattaaaagaagacctttagttttattatatcaaatggtttcctgaaacccttttagcgtaagattcctgtggttaaacattaaataatatgcaatggaagatgtcattttaaattaagaattcttaactttcaatcagattttcttaatttgagcagaatctgctcattttaattcagcatcctattttaaactacttgttcctgtagtgtggttctattctttcttgctgtttataatttagtactgtatgtaggcacttaagaatgggcatcttgttagtattgtcttcataatactaaatacagaatacctctctccaagtggatgtgtagatattttactcagttctttaacacacttataaaatatacagatgacacaaagctgtgtcttttgtgattagattaggtatttcagtaatttagtttttaatttcctatgcaatttaagtatcctattatccttattggcgggggtggtgatgcttactgttgtacatgt

SEQ ID NO: 102136 - DNA, 2622 bp, Homo sapiens
ccatgggatcgctgcttgcgctcctggcactgctgccgctgtggggtgctgtggctgagggcccagccaagaaggtgctgaccctggagggagacttggtgctgggtgggctgttcccagtgcaccagaagggcggcccagcagaggactgtggtcctgtcaatgagcaccgtggcatccagcgcctggaggccatgctttttgcactggaccgcatcaaccgtgacccgcacctgctgcctggcgtgcgcctgggtgcacacatcctcgacagttgctccaaggacacacatgcgctggagcaggcactggactttgtgcgtgcctcactcagccgtggtgctgatggctcacgccacatctgccccgacggctcttatgcgacccatggtgatgctcccactgccatcactggtgttattggcggttcctacagtgatgtctccatccaggtggccaacctcttgaggctatttcagatcccacagattagctacgcctctaccagtgccaagctgagtgacaagtcccgctatgactactttgcccgcacagtgcctcctgacttcttccaagccaaggccatggctgagattctccgcttcttcaactggacctatgtgtccactgaggcctctgagggcgactatggcgagacaggcattgaggcctttgagctagaggctcgtgcccgcaacatctgtgtggccacctcggagaaagtgggccgtgccatgagccgcgcggcctttgagggtgtggtgcgagccctgctgcagaagcccagtgcccgcgtggctgtcctgttcacccgttctgaggatgcccgggagctgcttgctgccagccagcgcctcaatgccagcttcacctgggtggccagtgatggttggggggccctggagagtgtggtggcaggcagtgagggggctgctgagggtgctatcaccatcgagctggcctcctaccccatcagtgactttgcctcctacttccagagcctggacccttggaacaacagccggaacccctggttccgtgaattctgggagcagaggttccgctgcagcttccggcagcgagactgcgcagcccactctctccgggctgtgccctttgaacaggagtccaagatcatgtttgtggtcaatgcagtgtacgccatggcccatgcgctccacaacatgcaccgtgccctctgccccaacaccacccggctctgtgacgcgatgcggccagttaacgggcgccgcctctacaaggactttgtgctcaacgtcaagtttgctagccccctttcgcccagctgacacccacaatgaggtccgctttgaccgctttggtgatggtattggccgctacaacatcttcacctatctgcgtgcaggcagtgggcgctatcgctaccagaaggtgggctactgggcagaaggcttgactctggacaccagcctcatcccatgggcctcaccctcagccggccccctgcccgcctctcgctgcagtgagccctgcctccagaatgaggtgaagagtgtgcagccgggcgaagtctgctgctggctctgcattccgtgccagccctatgagtaccgattggacgaattcacttgcgctgattgtggcctgggctactggcccaatgccagcctgactggctgcttcgaactgccccaggagtacatccgctggggcgatgcctgggctgtgggacctgtcaccatcgcctgcctcggtgccctggccaccctctttgtgctgggtgtctttgtgcggcacaatgccacaccagtggtcaaggcctcaggtcgggagctctgctacatcctgctgggtggtgtcttcctctgctactgcatgaccttcatcttcattgccaagccatccacggcagtgtgtaccttacggcgtcttggtttgggcactgccttctctgtctgctactcagccctgctcaccaagaccaaccgcattgcacgcatcttcggtggggcccgggagggtgcccagcggccacgcttcatcagtcctgcctcacaggtggccatctgcctggcacttatctcgggccagctgctcatcgtggtcgcctggctggtggtggaggcaccgggcacaggcaaggagacagcccccgaacggcgggaggtggtgacactgcgctgcaaccaccgcgatgcaagtatgttgggctcgctggcctacaatgtgctcctcatcgcgctctgcacgctttatgccttcaatactcgcaagtgccccgaaaacttcaacgaggccaagttcattggcttcaccatgtacaccacctgcatcatctggctggcattgttgcccatcttctatgtcacctccagtgactaccgggtacagaccaccaccatgtgcgtgtcagtcagcctcagcggctccgtggtgcttggctgcctctttgcgcccaagctgcacatcatcctcttccagccgcagaagaacgtggttagccaccgggcacccaccagccgctttggcagtgctgctgccagggccagctccagccttggccaagggtctggctcccagtttgtccccactgtttgcaatggccgtgaggtggtggactcgacaacgtcatcgctttga

SEQ ID NO: 102137 - DNA, 1485 bp, Homo sapiens
actggggttcaggcaggatttagtatgggttaaggatggaagggctaatggtggtcttagctctggcattgggttccatgttagggtgaatgttgaggtcacatcagggtaacacactagtccaaccttctcttccttccgtcaagtttgctagccccctttcgcccagctgacacccacaatgaggtccgctttgaccgctttggtgatggtattggccgctacaacatcttcacctatctgcgtgcaggcagtgggcgctatcgctaccagaaggtgggctactgggcagaaggcttgactctggacaccagcctcatcccatgggcctcaccctcagccggccccctgcccgcctctcgctgcagtgagccctgcctccagaatgaggtgaagagtgtgcagccgggcgaagtctgctgctggctctgcattccgtgccagccctatgagtaccgattggacgaattcacttgcgctgattgtggcctgggctactggcccaatgccagcctgactggctgcttcgaactgccccaggagtacatccgctggggcgatgcctgggctgtgggacctgtcaccatcgcctgcctcggtgccctggccaccctctttgtgctgggtgtctttgtgcggcacaatgccacaccagtggtcaaggcctcaggtcgggagctctgctacatcctgctgggtggtgtcttcctctgctactgcatgaccttcatcttcattgccaagccatccacggcagtgtgtaccttacggcgtcttggtttgggcactgccttctctgtctgctactcagccctgctcaccaagaccaaccgcattgcacgcatcttcggtggggcccgggagggtgcccagcggccacgcttcatcagtcctgcctcacaggtggccatctgcctggcacttatctcgggccagctgctcatcgtggtcgcctggctggtggtggaggcaccgggcacaggcaaggagacagcccccgaacggcgggaggtggtgacactgcgctgcaaccaccgcgatgcaagtatgttgggctcgctggcctacaatgtgctcctcatcgcgctctgcacgctttatgccttcaatactcgcaagtgccccgaaaacttcaacgaggccaagttcattggcttcaccatgtacaccacctgcatcatctggctggcattgttgcccatcttctatgtcacctccagtgactaccgggtacagaccaccaccatgtgcgtgtcagtcagcctcagcggctccgtggtgcttggctgcctctttgcgcccaagctgcacatcatcctcttccagccgcagaagaacgtggttagccaccgggcacccaccagccgctttggcagtgctgctgccagggccagctccagccttggccaagggtctggctcccagtttgtccccactgtttgcaatggccgtgaggtggtggactcgacaacgtcatcgctttga

SEQ ID NO: 102138 - DNA, 799 bp, Homo sapiens
cgagcgagcgagcgggagccggagcctcgcgccccccgctccactccgattctctccgcgccagagcgtcaagtttgctagccccctttcgcccagctgacacccacaatgaggtccgctttgaccgctttggtgatggtattggccgctacaacatcttcacctatctgcgtgcaggcagtgggcgctatcgctaccagaaggtgggctactgggcagaaggcttgactctggacaccagcctcatcccatgggcctcaccctcagccggccccctgcccgcctctcgctgcagtgagccctgcctccagaatgaggtgaagagtgtgcagccgggcgaagtctgctgctggctctgcattccgtgccagccctatgagtaccgattggacgaattcacttgcgctgattgtggcctgggctactggcccaatgccagcctgactggctgcttcgaactgccccaggagtacatccgctggggcgatgcctgggctgtgggacctgtcaccatcgcctgcctcggtgccctggccaccctctttgtgctgggtgtctttgtgcggcacaatgccacaccagtggtcaaggcctcaggtcgggagctctgctacatcctgctgggtggtgtcttcctctgctactgcatgaccttcatcttcattgccaagccatccacggcagtgtgtaccttacggcgtcttggtttgggcactgccttctctgtctgctactcagccctgctcaccaagaccaaccgcattgcacgcatcttcggtggggcccgggagggtgccca

SEQ ID NO: 102139 - DNA, 2732 bp, Homo sapiens
  misc_feature (362)..(362): n is a, c, g, or t
  misc_feature (784)..(784): n is a, c, g, or t
  misc_feature (1289)..(1289): n is a, c, g, or t
  misc_feature (1665)..(1665): n is a, c, g, or t
  misc_feature (2056)..(2056): n is a, c, g, or t
  misc_feature (2117)..(2117): n is a, c, g, or t
  misc_feature (2212)..(2212): n is a, c, g, or t
ttactgtgtgtttctctacctacctctcattctcaccttcttttcctagctttttttttctctttatttttcccctaggattctcctcatttcaagcccttcttccttctcctgctcttccctctattccttctcttccacttgttctgctcctttctcacttctttcacctcttattcttctttctgcccaatatttgtctccaattttcatatagttctgcctctttcttccccccgtctctgctgccccctagcttcccctgttaaatcccctcttccctgctatatccacctgtcccctctctggcatccccagatcccagttctccccaggctgtggttctccctgtgctctccttntcactggctgcccctcttgctctcccagcaccatgctgctctgtctgccctggctccaaatccctccttctctccccaactctccatctgaggagcctccccttttctgcccctctccctatcttgctgaactttatctctctagaaacccagtttttctctaaatttctctagttgcttttctccccctgctcctttctcagcatcttcatgcactgtctctgcaaatccctcatccaccatctactttgccatctgttttgttttgttttttgttttttgagatggagttttgctcgtcgcccaggctggagtgcaatggtgcgatcttggctcaccgcaacctccgcctcccgggtaaaagcgattctcctgcctcagtctccagagtagctgggattacaggcattcgccaccatgcntggctaattttgtattttttagagacagggtttctccatgttggtcaggctggtctcaaaactcctgacctcaggtgatctgcccgcctcagcctcccaaagtgctggaattacaggcgtgagccatcgcacccagctgccgtctgtttatgggtctccttcattcttctttcccatttcaccatttttctatttcctctcctccacacattcatagggaggggactgcagtcagatccccacctcaagagcccatttcctgtgggatggaatttgggacaagagaaaccttaacgtcctgagatagaagtcacgtccccacactcgatatcaggagaaggggaggcctggggagcagaagggcccccgatcaaggaggaaaaaggcaggagaaagtcaggagaggggcagggtctgcaggatcccaggaccaggaagagttcacggcctccctgggactggggctgcgtcgctgcgctccaggagctgacgagggagcggagcngatgggaagctcccagggcgggaatcaaccttgcggtgaggactttaaaaaaggtgcgggccagtgcaggggacactgaaggatttgaggcaggaaaactccgcgataagagctgtctatatggccctgtggcagaagcacgggggacacgaccccatggaactgtgtccattaaacctctttgtcttcataaattacccagtctcgggtatttctttattagcagcgtgagaacagactaatacagtaaattggtaatggtatagagtggggtgctgctataaggatacctcaaaatgtggaagcaaattttgaactgggtaacaggcaaaggctggaacagtttggagggctcaaaagaagacaggaagacgtnggaaagtttggagcttcctagaaaatggttgttgaatggttctgaccaaaaagtccaggctgaaggtggtctcagatggagatgaggaactttattggaactggagcagaggtgagctgcaggggcggagccctcatggagaacctctgctagagcagtgcagaagtaaaatgtggggttggagcccccacacagactactcactactcgcctagtgcagccgtgagaaaagggccaccctcctatagaccccagaatggtagattcaccgacagcttgcaccatgtgcctggaaaagtagcagacacaacaccagcctgtgaaagcagccaggagaggagctgtaccctgcaaagtcacaggggcagacatgggttccctgcaagaccantggaaccaacctcttgcataagtgtgacctggatgtgagacacggagtcaaaagagatcantttggagctttgactgccctgctggatttcagactggcatggggcctgtgacctgttttggccaatttctcccatttgcaacgggcgttatttanccaatacctgtgcctccattgtacctaggaaataactaacttgctttttattttacaggctcataaacagaagagacttgcttgtctcagatgaaactttggactgtggacttttgagttaatgctgaaataagactttgggggactgttggggaggcatgattggttttgaaatgtgaggacatgagatttgggagggaccaggggcaaaatgatatggtttggctgtgtccccaccaaatctcatcttgaattgcagctcccatgatccccacatgtgggagggacccggggggaggtaactgaatcatgggggtgggattttcccatgctgttctcatgatagtgaataaatctcatgagatcttatggttttataaagggcagtttccctgcacgggctctctcttgcccgccaccacgtaagacatgtgtttgctcctccttcaccttctgccatgattgtgaggtctctctagccgtgtgaaactgtgagtccattaaacttctttttctttat

SEQ ID NO: 102140 - DNA, 286 bp, Homo sapiens
tgaaggctaagataatgagactacttctcttgtgggactttccaaaactcctatgtcatagtcatcaacttatatataagtaaaaatgcttatttgtgttttagcatttgctctttgcatcaaacctccactgactttgggaataataagatctgctaccccaagaaagtctgccaattccattagtaacacattcaactggatcaaaaaactgaagagttagtgaatattttatatcgtgggtttttaaaagatatttttgtgtgaataaaaaaggactttctca

SEQ ID NO: 102141 - DNA, 679 bp, Homo sapiens
ccttcatcctcacatggtgccttccctcatgcatgtctgtgtctacatttcccctttttcatcaggacaccagtcacactggattagggccaccccctaatgacctcctctagctcgattagctctgtaaagatgctgtttccaaatcaagttacatactgaggtactaagggttaagactccagggtttctttcacggaggccaaaattcaatccataataaccactcagttgccataagacactgggcaagtaggttagccttcatcggtaaaatgggcctaataattgcgcctactgcatttgggtgatggagacagggtccctggcagcaaagaagcacagccctttccccttacgtaagctatacagatactgacatgaagaaggctggaggctctgctcatgagcatgggccttggaaccaggctggtcggggtctgagccctctctctgccactggctggcagtggccttgcacaagtggttgaacctgagacggatctcaagatacattttaagtattatacaataatgcacgtcaactccttagcacgcagtgagctctccatgaatgtcagcggcctcaggcaaagcagaggtagggactgacagcatcacctttgtcccaaccgtatcttgcaaattcttcaaggtggctgcttaaactcaacagtta

SEQ ID NO: 102142 - DNA, 369 bp, Homo sapiens
tgaacattcgtgtcctctgcccgggtctgtgccagctctgactcaaggtgcagcaggatcccgttgagctgctccatctgtagggcgtagcgggcctccacctccctcaggctgttctccaagctggccttcagatttctcatggagtccaggtcgatctccaaggactggactgtacgtctcagctctgcgacctggggcaccaccactccacacttggtgatcctcctacgatttcctgcgaggcacgacacaccctgcccacgctcactacatgaggctgaacatcctccaaggaccccagaatgtcttccttcttgcctcagcttgtctttctaacacaggcccttacttccccggcatcatggc

SEQ ID NO: 102143 - DNA, 366 bp, Homo sapiens
  misc_feature (361)..(361): n is a, c, g, or t
  misc_feature (363)..(363): n is a, c, g, or t
  misc_feature (365)..(366): n is a, c, g, or t
tagttggttcttgcttttttatccaatttgacagtctctgccttttaattgatgtttggatccatttacatttaatgttattatcagtatggctaggtttgagtctatcatcttgctatttgttttgtatttgttccatgtatgctttgttcccttttctccctttttctgccttcttttggattactgtttttttttaatgattccattgttttttcttccttgatttattagctgtacctcattgttttattatcttagtagttgctttagagtttatagtataaatgtttaacttcctcctcctggctttcatgctagtgtcataaattttacttgtagattttataaaccttaaaananann

SEQ ID NO: 102144 - DNA, 401 bp, Homo sapiens
aaacaaaccaaaatagacacatacacacacacacacgcacagagtaggtcaaaacaaaacagtgtgggcatcctttctaatttttcaaacctcacctgctgaatagcatatttaataaagcacataccacttatttgatctggcagtacttaacgcaataacttacacacaaagaaagacccaaacatttagccacaggatgtcatcaaataagggaagaaggtttgtaataatggtttgtaattaatgtttaggttttaagagatgccttaagaaaaacaaaaggtcttattaactcatttgccctcctaaataactctatttttcaattgactgagcaaacacccaattagagtggtaatttattagggtcatacattagctgaaaagaaaacagaaaa

SEQ ID NO: 102145 - DNA, 103 bp, Homo sapiens
ggtccgagtgacctgggtgccttcctgcccaccggggctggaaccaggagcagctttgttctactggtgccaatgaaggattgggagcccccttcggggagtg

SEQ ID NO: 102146 - DNA, 368 bp, Homo sapiens
ggaggcggaggttgtggtgagccgagatcgcgtcactgcactccagcctgggcacggagccagactccgtctcaaaaaaaaaaaaaaaaaaaaagcaatatgtgtatataactctctgctttgttcacttgacactctagtatgatgacctttgcatatcattgtaaagttttagtagaggagtgatatggtcagtttagcatctcataaacactattacagctgtagcatgcagaacagagggagaggggaacaaggcaagacatgagcagtgtttgacataacataggagcaatataactgagagaaaatgaagattttaaaattagccattttaatcaaataacaaccatccattactgatgtag

SEQ ID NO: 102147 - DNA, 449 bp, Homo sapiens
ttgagcccctaagtgctatattctgaaatacaactgtgaaagaatctctgttctgcaggaacttgcaaacacaaaatgttctgcctaacatcagcatcccaggagatgtcaaaaatgcttccatcctagagtcaaacaagttagtgaaatgtagcataatctccctattggaactcaaaactgaatttggcatattaaagcctgtaagaagtcctgcaacaaagaaacccaactttccacatacttgattaataagcaaaactttcttcaccttctctacctagcttgacccccacaaaaataccttcaactgcactctaattagctttctagattaccttgtctacccctttcttcttttacctaatccaaactgtccattccccacttgagattaatttcaccatctgctttttctgcagtgcagttgccaagcatacataatgctg

SEQ ID NO: 102148 - DNA, 209 bp, Homo sapiens
tatattactcatttctatattcaaagttataaagagagagaaggagagaggacttaagggagttagcaatcccccttgaggaggctgtagaatttccagcgagctgcaaatttgggtgccagagtatctgctggggtgtgggaagaaaatgttagatttctacttatactcatttctcaacaaaaataaaagagaaattgtgatttatt

SEQ ID NO: 102149 - DNA, 442 bp, Homo sapiens
tctttcctttcttacagggttttggaaatttgcccatctgcatggcaaagaccgatctttctctgtctcaccaacctgacaaaaaaggtgtgccaagtgacttcatcttacctatcagtgatgtccgggccagcataggtgctgggttcatttaccctttggtcggaacgggaagcagagaatctcccctctggctctagttggagaatcccaacccaagcaagtccatctttgaacaataaacatctccagtactgctggctttggaagaccccatggtgagatgctggagcttttttccgctcctgatttcactttctaaatatttacttttactttccatgttcacttgtaggccagatttttttttcctaccattgaattatttcatcatgttctatttaattattgtcttaattggcattggtgacgacaaataata

SEQ ID NO: 102150 - DNA, 263 bp, Homo sapiens
tctttcctttcttacagggttttggaaatttgcccatctgcatggcaaagaccgatctttctctgtctcaccaacctgacaaaaaaggtgtgccaagtgacttcatcttacctatcagtgatgtccgggccagcataggtgctgggttcatttaccctttggtcggaacggtgcaccactgacatcatggctcggctggactctggaaagcaggaaattgctggagcatgtttgggcatcaatgatgtcacccgctacgaatg

SEQ ID NO: 102151 - DNA, 395 bp, Homo sapiens
ggtaagtgaagggatggtgaagccatttagggaaatacagaagatggatggataagtagatttcagaaatggagtcaggtaatttcagatttgaatttttgaggtattcataggactctgcttgagatgttgtatgagtctcctgaaactgcggattgggttttggaaggctctgtgaaattccagttgcagatttggaagcaaatatgttcagctttaaaaaagcatctgagacttatgccttaaaaaagaacaaacttgccagtaatgaaataccataccagtaatcaattctgagaaaagtcttattttgccagtactctaatgagaaaagtcaagacatttgaaacagattcaagctaaagtatcataaacatctcgacacaaattactaa

SEQ ID NO: 102152 - DNA, 96 bp, Homo sapiens
gtaacatctacttctctggactctggcaaccagtgatctgtgttctgcccctgtggttttgcctttttgaggatgtcatacagatggaatcagaca

SEQ ID NO: 102153 - DNA, 105 bp, Homo sapiens
cacaaaaaaaaaagaaaagaatagacaaatagatcaatgaaacatcatagagagcctgggagtagatccacccagtaaatccacccagatagtcaacccattcac

SEQ ID NO: 102154 - DNA, 440 bp, Homo sapiens
cacccagatgatgcctatccttagtgactgggtataataaattagtgagtaattattagaaattattagaaaataaatttagaaatgaagttccaacatcatgtgtttctaggaaattattagagaatcttttaaatgttgaatttccataggatacaggttgggaaggacaaatgggaagaaaaatgtcacatctaacaattgaaataatgtttttttgttgccataaacagtattgatcagtttgcatggcttatttagaactgaaacttcctggcagaggaagatgcaaagcactgagaaaatattatgggcaagttgaatgctgtccacacagattgtaagcattatagattatccctttttcacttttttcctgcttcccgtactttatggtcctgaggctttttgcgcactactttcctcactttgttctcctg

SEQ ID NO: 102155 - DNA, 830 bp, Homo sapiens
ctcgtcaacggctagtcaacggctgcggggacaagtccgttgaggctgccaggcgagtcaggcctttctggacctcgcctgactcggatgggctgtgcctgaaattgacccagctccactagggattatgaagaaacaaggagtaaacccaaagccgctgcaatcttcccgccccagcccgtctaagcggccgtacggggcctcccccgcccgggagctggaggtggaaaagtcggccctaggcggcgggaaactgccagggggcgccaggaggtcctccccggggaggatcccaaatctgaaaaagcgaaaaggcttggagctaaaggtggtggccaagacccttctcgaccccttccagttcgtccgtaattccctggcgcagctccgggaagaggtgcacgaactgcaggcgcggtggttccccagcagaaccactctcagcatcgccatctttgtggcaattctacattggttacatttagtaacactttttgaaaatgatcgtcatttctctcacctctcatctttggaatgggagatgacttttcgcactaaaatgggactttattattcctacttcaagaccatcattgaagcaccttcatttttggaaggactgtggatgattatgaatgacaggcttactgaatatcctcttgtaattaatacagtaaaacgcttccatctttatccagaggtaatcatagctgcctggtatcgcacattcataggaataatgaatttatttggactagaaactaagacctgctggaatgtcaccagaatagaacctcttaatgagttcaaagctgtgaaggcatgtttcc

SEQ ID NO: 102156 - DNA, 347 bp, Homo sapiens
acatttctgttttacagatgaaagaactgagctttggaggctaaattacttgtcccaagttaatacagcttagaaagtgatagagtaagagcttgaacttggttttatttctagtgttctttgcagtaccagtagaaatagcaaatatattagttattgaagtcaggatactaaaatatctttacagattgagactgtaaattgaatccaaccaggtgaatttagcaatgataatatgtttcctgcacttgggttcccattcaatcacaaaatataaacaatcagcattgtttaaaggcggaaaaaaaacccaataggtagtttagctgtaaagtcagcatgaattg

SEQ ID NO: 102157 - DNA, 518 bp, Homo sapiens
gttcctctcaaaatataaatcttcgagagcctaatatatgaactagatgaagcagcttcattatcctcagataaagaattgtggtcagtggcttttatcagattcttcaaaagcgtctataaccccagaatgattaaggaccattactctgaaggaaacaaacatcatagacttctgtaatgacagcgtagtagatccaggatttgaaaataaaatgagagaaaagtatagaatttgttttcctgtggcttatgcccagaaggattcagaaaggaatgactgatttctttcaaagaatacaagcaaggtggatctccgtgatttctttgatttaagcaataagatgataagtctagattttagagtttttattttgtttttaaaaaactgtgatataatatacataacaaaatttacattttagtcatctttaagtgtacaattcattggcattactatattcatattactatgcaaccattactaccatctatctccagaactgttttctcttccca

SEQ ID NO: 102158 - DNA, 683 bp, Homo sapiens
accagagcccccgacaggacccttctgatggcaagtgggtgtgtctcctcccagttactcacccctccctccaaataaccacatgcccttcaccaagggccaggagaccttgttgcaaagaggcttggaaatgatgccatttgtgaagtgatattttttagtacctttcccaagttaatttgctgttttcttccgtccgatcattcatccacccatctgctggtttatttagcaaacgttgattccgtactctgtgagaggtgtgatgcttaggctagaacaacaaagagcccttcaggaggtgatgctgatgaaggtgtggcgatagggggtggctgttaacatgatcaatgctggtgcagaagaaaaatgctcaggactggaggaatcccttagaatgtgggggctgctcagagacatctacttcctacgtgctgatttctttaaatcttgctctaaattaatcacttctaaaatggagtgtctaacaccctgggaatcatctgtatgtcagggcctgtgctggggaaacatagtgagtagagccttgatctgcccatagatagctcccagagcagtgcaatgattattaaccttttttgggttatggcttttttgtgatactctgaagaaaattatgaatactttcctgaaaaaaatgcatatatgtatacaattttgca

SEQ ID NO: 102159 - DNA, 377 bp, Homo sapiens
ggcagagggcatgagctgagggggcatgggcagagggacgggcagagggggtgagcagctgattacagagctgctcagtaatccaggaatagccaagggcctggtgtcagtagggctcacaatgaggcccactgtctttaaacttcccagggttcccagcactgaggctcatttaatgggaactctgggtacatgagggtggtctccagcgacaccaagctggacttaggacctggagatcacaagcagaggacccgaggcaggcagcaggaagggcagcagcatcctgagccaccggcctcccccaccatcacccacccacaccgggatgtgggtgatgcaggaccagtgcgaagatggtgtggggacggtgggca

SEQ ID NO: 102160 - DNA, 407 bp, Homo sapiens
cacctttaccatacgctgctttgttttcttcacaacactcactactttcctcaattatgtcatttatttgcttactgtctatccctcatacaaatataatctttagacagtatattagttatctattgctgcataacaaattacatcaaaacttggcagcttcaaacaacaactatgtatgatgggtaagtcaggaatacaagagtagttgggctggtggtctggctcagcgtctctcaggagactatggtcaagctatggggcatggctgcagtcatctgaaggttaacgggctggaggatgctctgttcacccacatggctgttggcaagatgcctcagttcctgccaggtgaaccttttcacagggctgtctgaacacatggcagctgacttctcccagagaca

SEQ ID NO: 102161 - DNA, 371 bp, Homo sapiens
gggggatggggtgctggagtcagagagtagttgctgggctggagatttcagaagtcatgacattctgggtgcagctttactgctctaagaaggaatgggagtgttggcattggaagggaagactgagcacattcagagtgatttgaaatatggcatggtcaggagggcagtaggtgtgagcagtagagggaggggcttgtgtctctaggggaatgaaagtaacatgctgtggtgttggggagactggcctgggagcagcatggaggaactttagggttggtacaggatgaggctggggcatgattagcctccttttcagagggcctcaggaaaaggcagtgtgcacagaaagccaggctacttgttggagg

SEQ ID NO: 102162 - DNA, 415 bp, Homo sapiens
ccaacactttgggaggttgagacgagtggatcatttgagctcaggagttcaagacgggcctgggcaacatggtgaaacactgtctctccaaaaatacaaaaattagctgggtgtggtgatgaatgcctgtagtcccagctacttgggaggctgaggtgggaggatgacttgggccggagaggcagaggttgcagtgaggcaagattgtgccattgcactccagcctgagttatagagccagaccttgtcttaaataaataaacagacttcttaaacttagcatccttctaaagaataatttatcaaaatacagatttgttgttttaaagtatacattaacatgcataattattaaaattactatgtccttttaactacctaaaaacatctttaataccagtgacacatactctta

SEQ ID NO: 102163 - DNA, 540 bp, Homo sapiens
aaattatcttttatatctccaacattgagtctctttatatgtaatattccttattttattatagtattaccttttctaaaacagccatttattgttatcttttatttcagcacttcatagtgtttgatcactttggctaaaatttttttttttgttttttacaaattttattgatcttttcaaataactagcttttggcttcattgagtcttctctttttgttcattttaaattttattgatttgtactctttattattcctttccttgtatctaatatatattaatttgctattcttttccccatttcttaggattaaagtctgaatgatttattttagaccttttttctttttctaatttaagcatttaaagcaacagaattccctgtaagctctgcttttgtagtattcaagataatttttcttgctgttttgggtgttgtgattttttattgaatcatctgaggaccagtatagactgaagtaaataatatttatgggccgagtttgtcagctcacgcctgtaatcccagcacttt

SEQ ID NO: 102164 - DNA, 577 bp, Homo sapiens
ccatttcagagcacacactccctggcagggcgcctctgcctgtgtctcctgcccagcagccgccagcagggaatagttgctggtgtctgagcacaaagagagctttgattacctagagaggaaaaaggctgtcagccagatgcagccaggcccaggggtagatacaggagttgctaaggaaggggccgagccaggagaggccaggcagatccacaaagcccaaggggatgcaggctgggtgtggtttctgagggaacctaccaaatagcaggtagatggaatcagaggactcttgtgtcctgaaagaacctccttaaaaacaactaaaacgaagaacttctggggctgttcacacattgttcaagtcaccccaagatcgttctggcacgctgagctgaacaccaccatctttgttcattctctctctaatgggcaaagcaggatcatcgagttgaaaagttgtaaataatgaggatatttatcccgctatttattttttcaataactgtgacctcctgcactgtgaatgctctgtgacatgagattcttagtttaataaaactgtcattaaatttga

SEQ ID NO: 102165 - DNA, 185 bp, Homo sapiens
gcagatcaaatagaaatatgattcatgcttcacaatttgtgtagccaatatcatagatatttggtagttctattatgtatctgacaggtacatatatttttttcctctaagagattgttctgtgtgaatagatagaaactacttaaatacagtaaagtctatttattacagaccaagagcaaaca

SEQ ID NO: 102166 - DNA, 697 bp, Homo sapiens
gccttattgaaggcattggaccgtcgctcaccccagggccccccaccatctgtccagcctgtaggcacaactggccatttgtaaagtcacttcagccaagttttcatttgggagctacccaagggcacccatgagctcctatcaagaagtgatcaacgtgaccccttttcacagattgaaaggtgtaatcacactgctgcttggataactgggtactttgatcttagatttgatcttaaaatcactttgggactgggatcccttgctgattgacaaacagactttctgggaccttgatggagtggggaacaagcagtagagtgggactgggggagacccaggccccgggctgagcactgtgaggcctggatgtgaagactcagcccagcgaagctcattcccttacccccggccagtgctgctgcttcagtggaagagatgaagccaaaggacagaatgaaaatccctaccttcagagactctagcccagcccaacaccatctcttcctacctctcagccttctccctccccagggccacttgttgaagtctgagcactttatgtaaatttctaggtgtgagccgtgatcacattttctatttatttccaagtcttctcattgtatggaacatagtactacttatacttacagtagtaagttatacttgtgagcccacagagtggcagacagcatgg

SEQ ID NO: 102167 - DNA, 185 bp, Homo sapiens
tgactccagggataggatttcagctgttccctcttacagatgaggaagtaaaggctccaagagggtgctggccttgctgagtgccgggatggaccatgatcctctggcagtctgggcctgtcttctgcagacccctctgcagcagccttgacattgcgctgtgcgcttctgtcaaaccctctgca

SEQ ID NO: 102168 - DNA, 679 bp, Homo sapiens
catcagtgttgcgggaagtcagggaccctgaacggagggacctgctgaaaccacggcagaagaacataaattgtgaagatttcatggacatttgttagttccccaaattaatacttttataatttcttatgcctgtctttactgcagtctctgaacataaattgtgaagatttcatgaacatttatcacttccccaatcaatactcttataatttcctatgcctgtctttactttaatcttttaattccgtcatctccgtaagctgaggatgtatatcgcctcaggaccctgtgatgattgcgttatctgcacaaattgtttgtaaaacatgtgtgtttgaacaatatgaaatctgagcaccttgaaaagaacaggataacagtgattttcagggaataagggagataaccataaagtctgactgcctgtggggcctggcagaacagagtcatatttctcttctttcagaaagcgaataggagaaatgtcgctgaattcttttctcagcaaggaataaccctgggaaaacgaatgcattcccaggggtaggtctctaaaatggctgctctgggagtgtctgtcttatgcagttgtagacatgggatgaaatatgccctggcctcctgcagcacccccaggcttgctaggattaggaaattccagcctggttgtctgctc

SEQ ID NO: 102169 - DNA, 435 bp, Homo sapiens
tatttccccattttacagccaagaaaattaagatagtgtcaaattctcattatgtaccaggccactgtgctatataaactttacatgcatcaccttatttaattctcataatagccttacgagggaggcactgaggcttagagggatgaggagatctgcccaagctagtgagagaaggagctggggtgaacacttacacttttcaccctagatcttaatcgttgtctaacaccgtctccttccactttgtgatacctagccataatccaactgctcagagatgggcagtgcagtgaatgctcttataccctgcccagatatcctttctgagggaccccttacagccatgagagaaggatgctacgggctatatatgcccttctctggggaccagcccctgcccagaaatgcctgcgaagctaagccctccatctc

SEQ ID NO: 102170 - DNA, 714 bp, Homo sapiens
gcataaatggtctctattctccaattagtcatttttaataatacccagagttgctttcagagtgttgattcttagagcctgatgccaaaaaacagggatggtggtaatgggggacaggaacggggtcagggtgggggcggtaaggaggctgaattccttcagtgtggggttttcctgcagggcctccctgctgcaacccccttggaagctggcagctctccaccacctttcaagctgtccagaaactccaggcgctgtggccccaggtgtatttggtaaatgaccatctagtggtaaaaagaattcttgtggtaaaatgattacttaaaggatccatgtgaaaaagagtttgtaggtccaggcatagtggatcacatctgtaatcccaacactttgagaggccaaggcaagaggatcacttgagctggggagtttgagaccagcctgggcaacacagcgagacccctatctctagaatttttttttttaattatttggggatggtggagtgcacctgtagttctgctactcaggaggtcaaggaaggaggatcacttgaggccaggagttcaagaccagcctgggcaacatagtgagaccccatccctactaaaaatacaaaaattatctaggcgtggtggcatgtgcctgtagtccaagctactcaggaggatcgcttgagcccaggagtttgaggctacagtaagtgatgat

SEQ ID NO: 102171 - DNA, 399 bp, Homo sapiens
gctccaaactttatgagtgaggtggaggaggtataataggcaagggattgtaagagggagtagccaggaaggtaggaagcaaaccagaagggtggtggtgaggaaggcaagagaaggttctgtttcacagagagggaggaggtcacaatttcagatgtggaagggtcaacgaagataaggatgaaaaatgttcatcatttagctctcacatagaggggaacaatacatactggggcgtttcagagagtgaagggtggaaggagggggaagatgaggaaaaacaactaatgggtactaaagttaatacctgattgatgaaatcgtctgtacaacaaacccccatgatacaagcttacctatgtggcaaacctgcacttgtacccctgaacttaaaagtta

SEQ ID NO: 102172 - DNA, 179 bp, Homo sapiens
taagagggcactgggtgtctggaacaggggcagaaaacgttggggcccccatacttctagtcacttagattctccctctagacctacgttttcttgtcagcaagatcaggataaaagtattattgcctgtccatggggtgattgtaggtaacagagagtaatgaaatgatatcaccaat

SEQ ID NO: 102173 - DNA, 186 bp, Homo sapiens
tttttgtttttaacgcatttcacatgaattagtttttttctcttcaaaaattaaaaatttcacatttcccacgtgatttttcttagtgtttcagtatgtcatttgtcatctaaacaaattttctgttacttgaaagtttactgtaacttctttttaaaagctacattggcaacacatttcaaaaaa

SEQ ID NO: 102174 - DNA, 827 bp, Homo sapiens
agtagaaataagttctagtgttcagtagtgtagtaggatgactgtagttaacaatttattgtatatttcaaaatagctaagagggaagatttgaaattttcccagcacaaagaaataatacatgtttgaggtggtggatactctaaacactctgatttgatcataacacattgtatccatgtatcaaaatatcacatgtaccccataaatatgtacaattatgtattaataaaaaagattaaggatgcaatataaaaaatggattatggtgaagagagatttgagacagggaggcctcattactaaggaagattatgcagtaatccaggtgagattagggggtgaattaatgcattggtaggatatttcatgaggttgggtatgtgccttattcattctacgtagcaggagtccatgatgtatttatttggattaactgatagcatggagggggcaaagatcaatatatgttatattttataacatatctgagatacatttaattgaagctggtgcatatatattctttctactcattgtgaagtttctagaaataataatctacttttgcttactgacttcacttccttgcttgtttctgtcttgaaagtcagccaattgatggctgggtgcagtggctcacacctgcaatcctagtacattgggaggtcaggagggcggatcccttgagtttaggagtttgagaccagcctgggcaacatggcgaaaccctgtctgtaccaaaattacaaaaattagctggacacggtggtgtgcacctgtggtccggctacttgggaggctgaggtgggaggactgcttgaacc

SEQ ID NO: 102175 - DNA, 743 bp, Homo sapiens
agacgcataactgtgcattgttctttgggattttgagagccttcatctcaatttcaactttaaagcagcttaatctttaaggaacatatctctgatctgggtaatttgtagaacttaatttgagggtcattacatgtgaggatagcaggagttgaagatgccaaggacctgaagggctactggagggacaggtgaagtgatttgaagatgtagcattttgaatctctttctggcccatcctctgcttcacaccagaatcattgtgacctgtagacctgcaaaacaaaggaccaaaggttagcatgcagaagtgaaagtgtcaataataaccaaaccactccatcaagttaggtctggggaaaagcagcagcaaaaatgagttcttacttctgggcacaaaatgaaagtaacagacctgatttactctgcgggcagccagctgactaccttgttgaagagaaacatttcacaacgcttgtatgcttcattgttgttttgggagggcttttgaagatgtgtttaaagaattgtgaagtcattgttttgacgattctttctctatcaggattcgtgataggacacatggcctacaattctgttgaggtgcaccaaattgtctaccctcttctaagaacatcaagtttttcactttattcttacttttcacctttaattatatttatggttgctttggatgtagaattttatacactcaagaaaatgttttggcaggtaagaacaca

SEQ ID NO: 102176 - DNA, 785 bp, Homo sapiens
gtatagaaacacaacattcttaattttattcaccaataatcaggacctacagaaccacacagcacagatggatcgatttctgcctccatgaattttaaattgccttttgcaacattcctctggctcagatgagctagtgttccacaatatgctggctcgtgaaatccaagcaactgtgccttcctctacacttcttcactcagcctcagccttaaattgcacactgcctataaaaatgtacttaaaagaaaaatgaagttactctaaaatgccatatgcaacaaaacagcttattcttgtagatggggctgccactggtggggtgcacctgcatttgttttgctcttacagcatgcccagagcccagcagccctccagcatcacaccgaaggaagcagcccaggaaaagaagggaatgtgttcacgtgacgtgactttaaggattgatttaaatggtgacatggttacgctttgcgtccccacccatatcgcatcctgaattataatccccataattcccatgtgtcaagggagagaccaggtggaggtgactggattatgggggcggtttcccccatgctgttctcgtgatagtgagttctcaagagagctgatggttttataaatatttggtaggttctcctgcattcattctccttcctgccaccttgagaagaaggtgccttgcttccccttcaaccatgattgtaagtttcctgagacctccccagccacagtgaactgtgagtcaattaaacctctttcctctataaattaccaagtcc

SEQ ID NO: 102177 - DNA, 390 bp, Homo sapiens
ttttttcagaaccactgactgcctacagacacagaaaccaaattgtctgggcttgaattcagtgccacgacttgggaaagtcattgaattatgcgtgtgtcttgatttccccattgtacaatggtaataatagtaatcctactgttgggactgatgagagggattcagtttatatgagtatacttagaacagtgacttctaatgtacttagatcagtgacttccacaaaatatgctgtaattagtgttatatattatttttacttgttgttgttattcatgtctctttcattctaggcccattccagagccatcattcttgaatacttttcttggcattcctagaacaactgcactattgcacatgttcctcttagtttctcccatcatg

SEQ ID NO: 102178 - DNA, 345 bp, Homo sapiens
gaaaatgaggacgaggcgggaactagagcccaagggccccaagccaaccgccccttctgccgtgggcccaaacagcaacggcagccaacacccagcaactgtgaccttcagtcctgtgacgtccaggtggagacgcgatgacctctaccctggcgctatctccaccactgtccaaagagcctctccagagtcaagacccagaggcacactctctggcagcttcacaatgagcttcttctggtcaggtcgacagagacatctttgacgcaatctctgatgcttccagcaatcctcaaccttgtctgccctgccctaccccaactgtgtccacatccctgccgccac

SEQ ID NO: 102179 - DNA, 649 bp, Homo sapiens
tgtaaggcttgacagaaggtcaagacctttaggaaatgcataacttcccttggctgatctagagacagatgtattttaacctgcatggaaaactcctcactgcacttaagaccagagcctggcagtattgagggcatgaaactggttttccagatgtctctcagtgcctggctgcatcagaacacgtgcggatcttttgaaaagcatggactcgagtcctttccttggagattcaggttcagtccatttgggtgagacctgggaatccactgtctgaaagcttcccaggtgatgctgtgtggctgtgttggggttttgttttgtagttgacttctctctctccatacctgcacgcatatatacacgcatgcccttatatgtgaggagagtatttttgaaggtcatacaaggccctagcaacagtggtttcctctgggcagtggaatggggtgggtggcttgaagtgcttttcactctgtatccttttctgctgttttaagtcttttaccaggttggaatcttttaagggggaaaaatgatattagcctatactagttttccaggatgtgaatgaagagaagggggaaatagtgatagagcacgatatctgttatttagataacagatagagaaatatctacttgtgtgg

SEQ ID NO: 102180 - DNA, 567 bp, Homo sapiens
ctgttgccggccacgtgttcacactgagcgcctgaaagcgcacccagccatatcagtgtgtgccgtatacccggagggcacacagcgtttctaaggctgggttcaaaagaaatgaatgtaaaggacctcgtcagtaccttttagcattgattacattgtggaaatgacaatattttgcatatattggattagataaaatactattaaaataaatggcactggtttctttcttacatttttcaatgtggctagtagcaaattgaaaattcccggccaggcaaagtggctcacacctgtaattctagcactttgggaggccgaggtcagtggatcacttcatctcaggagtttgagaccagcctgggcaacatggtaaaaccccattatctaccaaaaaaaaaaaaattagtcgggcatggtggtgtgtacctgtagtcccggctacttcggtggctgaggtggtaggattgcttgagcacaggcggtggaggttgcagtgagctgagattgcaccagtgccctccagcctggcagcgtgggtgacagagtgagacctgtctaagaaaa

SEQ ID NO: 102181 - DNA, 363 bp, Homo sapiens
tttatgcagcctacagatttattgtgtaagtaccaaaattgctaattcacatcagttgctttgttagaaattgacatctctgaggccaggtgcagtggctcatgcagtcccagaactttgggaggccaagacaggaagagtgcttgagcccaggagtttgagaccagcctgggcaatgtggtgaaactcccatctccacaaaaaattaaaaaaaaattagctggatgtggtgacatacatctgtggtctcagctatttgggaggctgagatgggaggatcacctgagcccaggaggctgagactgcaatgagccgtggtcatgccactgcactccagcctgggtgacagcaagattctgtctc

SEQ ID NO: 102182 - DNA, 591 bp, Homo sapiens
tatactgttgtgcggcggagaattttgacgtgaataagtatctcggaagatggtacgaaattgagaagatcccaacaacctttgagaatggacgctgcatccaggccaactactcactaatggaaaacggaaagatcaaagtgttaaaccaggagttgagagctgatggaactgtgaatcaaatcgaaggtgaagccaccccagttaacctcacagagcctgccaagctggaagttaagttttcctggtttatgccatcggcaccgtactggatcctggccaccgactatgagaactatgccctcgtgtattcctgtacctgcatcatccaactttttcacgtggattttgcttggatcttggcaagaaaccctaatctccctccagaaacagtggactctctaaaaaatatcctgacttctaataacattgatgtcaagaaaatgacggtcacagaccaggtgaactgccccaagctctcgtaaccaggttctacagggaggctgcacccactccatgttacttctgcttcgctttcccctaccccacccccacccctatccgctatccaatggggatcctctaggtcac

SEQ ID NO: 102183 - DNA, 333 bp, Homo sapiens
  misc_feature (46)..(46): n is a, c, g, or t
  misc_feature (67)..(67): n is a, c, g, or t
  misc_feature (136)..(140): n is a, c, g, or t
  misc_feature (153)..(154): n is a, c, g, or t
ctttcagttttaattttattagtgacaaggtaaataggtacatganaatcttcacagatatctacgnacgtatttaaataaaacaagagtcgagttctaagaatgcagtttcaggggtgactagtacatattattnnnnnatttactgtatannttttccaagtttatccgcgccataaagacaaaccaatcaaccacgacaaaggaagttgacctaaacatgtaaccatgccctaccctgttaccttgctagctgcaaaataaaggagatggcgggcctgaagtacgaaattcgtgtaaatacgtgatgtactggattagaatgaaattaga

SEQ ID NO: 102184 - DNA, 1086 bp, Homo sapiens
aaaaccatagggctagggaagcgaggctgggtgtcgatctcaaatcggctgattctgcatctggaaactgccttcatcttgaaagaaaagctccaggtcccttctccagccacccagccccaagatggtgatgctgctgctgctgctttccgcactggctggcctcttcggtgcggcagagggacaagcatttcatcttgggaagtgccccaatcctccggtgcaggagaattttgacgtgaataagtatctcggaagatggtacgaaattgagaagatcccaacaacctttgagaatggacgctgcatccaggccaactactcactaatggaaaacggaaagatcaaagtgttaaaccaggagttgagagctgatggaactgtgaatcaaatcgaaggtgaagccaccccagttaacctcacagagcctgccaagctggaagttaagttttcctggtttatgccatcggcaccgtactggatcctggccaccgactatgagaactatgccctcgtgtattcctgtacctgcatcatccaactttttcacgtggattttgcttggatcttggcaagaaaccctaatctccctccagaaacagtggactctctaaaaaatatcctgacttctaataacattgatgtcaagaaaatgacggtcacagaccaggtgaactgccccaagctctcgtaaccaggttctacagggaggctgcacccactccatgttacttctgcttcgctttcccctaccccaccccccgccataaagacaaaccaatcaaccacgacaaaggaagttgacctaaacatgtaaccatgccctaccctgttaccttgctagctgcaaaataaacttgttgctgacctgctgtgctcgcagtagattccaaaaaaaaaaaatcaaccttatttaaaatcataaccagcactatctctcaacttgaatatcacttcgactttacctatttggcttcctcattgcccttccgtccttaactcacattttgaagggtggtccccttctgcaatatacctattttggggggggtccccgccccctatcccctctttttaaatctctaa

SEQ ID NO: 102185 - DNA, 1201 bp, Homo sapiens
gagcatgggcttaggtacaggctgggtgatctcaaatcggctgattctgcatctggaaactgccttcatcttgaaagaaaagatggagtttttgctctgttgcccaagctagagtgcaatggtgtgatcttggcttactgcaacctctgcctcccatgttcaagcaattatcctgcatcagcctcccgagtagctgtgattacagctccaggtcccttctccagccacccagccccaagatggtgatgctgctgctgctgctttccgcactggctggcctcttcggtgcggcagagggacaagcatttcatcttgggaagtgccccaatcctccggtgcaggagaattttgacgtgaataagtatctcggaagatggtacgaaattgagaagatcccaacaacctttgagaatggacgctgcatccaggccaactactcactaatggaaaacggaaagatcaaagtgttaaaccaggagttgagagctgatggaactgtgaatcaaatcgaaggtgaagccaccccagttaacctcacagagcctgccaagctggaagttaagttttcctggtttatgccatcggcaccgtactggatcctggccaccgactatgagaactatgccctcgtgtattcctgtacctgcatcatccaactttttcacgtggattttgcttggatcttggcaagaaaccctaatctccctccagaaacagtggactctctaaaaaatatcctgacttctaataacattgatgtcaagaaaatgacggtcacagaccaggtgaactgccccaagctctcgtaaccaggttctacagggaggctgcacccactccatgttacttctgcttcgctttcccctaccccaccccccgccataaagacaaaccaatcaaccacgacaaaggaagttgacctaaacatgtaaccatgccctaccctgttaccttgctagctgcaaaataaacttgttgctgacctgctgtgctcgcagtagattccaaaaaaaaaaaatcaaccttatttaaaatcataaccagcactatctctcaacttgaatatcacttcgactttacctatttggcttcctcattgcccttccgtccttaactcacattttgaagggtggtccccttctgcaatatacctattttggggggggtccccgccccctatcccctctttttaaatctctaa

SEQ ID NO: 102186 - DNA, 1056 bp, Homo sapiens
  misc_feature (1021)..(1021): n is a, c, g, or t
agctgtgaaggaaatcgggggaggaggatggacacaacatcccatctttgtgtttcgatacagactaagcttttaggccaaccctcctgactggatgggggcggcgggcgtggcatgcatgaaaagtaaacatcagagacctgaagaagcttataaaatagcttgggagaggccagtcaccaagacaggcatctcaaatcggctgattctgcatctggaaactgccttcatcttgaaagaaaagctccaggtcccttctccagccacccagccccaagatggtgatgctgctgctgctgctttccgcactggctggcctcttcggtgcggcagagggacaagcatttcatcttgggaagtgccccaatcctccggtgcaggagaattttgacgtgaataagtatctcggaagatggtacgaaattgagaagatcccaacaacctttgagaatggacgctgcatccaggccaactactcactaatggaaaacggaaagatcaaagtgttaaaccaggagttgagagctgatggaactgtgaatcaaatcgaaggtgaagccaccccagttaacctcacagagcctgccaagctggaagttaagttttcctggtttatgccatcggcaccgtactggatcctggccaccgactatgagaactatgccctcgtgtattcctgtacctgcatcatccaactttttcacgtggattttgcttggatcttggcaagaaaccctaatctccctccagaaacagtggactctctaaaaaatatcctgacttctaataacattgatgtcaagaaaatgacggtcacagaccaggtgaactgccccaagctctcgtaaccaggttctacagggaggctgcacccactccatgttacttctgcttcgctttcccctaccccaccccccgccataaagacaaaccaatcaaccacgacaaaggaagttgacctaaacatgtaaccatgccctaccctgttaccttgctagctgcaaaataaaacagcaggtcngcaacaagtttattttgcagctagcaaggtcgacc

SEQ ID NO: 102187 - DNA, 1068 bp, Homo sapiens
agctgtgaaggaaatcgggggaggaggatggacacaacatcccatctttgtgtttcgatacagactaagcttttaggccaaccctcctgactggatgggggcggcgggcgtggcatgcatgaaaagtaaacatcagagacctgaagaagcttataaaatagcttgggagaggccagtcaccaagacaggcatctcaaatcggctgattctgcatctggaaactgccttcatcttgaaagaaaagctccaggtcccttctccagccacccagccccaagatggtgatgctgctgctgctgctttccgcactggctggcctcttcggtgcggcagagggacaagcatttcatcttgggaagtgccccaatcctccggtgcaggagaattttgacgtgaataagtatctcggaagatggtacgaaattgagaagatcccaacaacctttgagaatggacgctgcatccaggccaactactcactaatggaaaacggaaagatcaaagtgttaaaccaggagttgagagctgatggaactgtgaatcaaatcgaaggtgaagccaccccagttaacctcacagagcctgccaagctggaagttaagttttcctggtttatgccatcggcaccgtactggatcctggccaccgactatgagaactatgccctcgtgtattcctgtacctgcatcatccaactttttcacgtggattttgcttggatcttggcaagaaaccctaatctccctccagaaacagtggactctctaaaaaatatcctgacttctaataacattgatgtcaagaaaatgacggtcacagaccaggtgaactgccccaagctctcgtaaccaggttctacagggaggctgcacccactccatgttacttctgcttcgctttcccctaccccaccccccgccataaagacaaaccaatcaaccacgacaaaggaagttgacctaaacatgtaaccatgccctaccctgttaccttgctagctgcaaaataaaaccgatgcggccgaaacacatgaacgacagaactacaacctgcgcgcaatactcaacg

SEQ ID NO: 102188 - DNA, 1068 bp, Homo sapiens
agctgtgaaggaaatcgggggaggaggatggacacaacatcccatctttgtgtttcgatacagactaagcttttaggccaaccctcctgactggatgggggcggcgggcgtggcatgcatgaaaagtaaacatcagagacctgaagaagcttataaaatagcttgggagaggccagtcaccaagacaggcatctcaaatcggctgattctgcatctggaaactgccttcatcttgaaagaaaagctccaggtcccttctccagccacccagccccaagatggtgatgctgctgctgctgctttccgcactggctggcctcttcggtgcggcagagggacaagcatttcatcttgggaagtgccccaatcctccggtgcaggagaattttgacgtgaataagtatctcggaagatggtacgaaattgagaagatcccaacaacctttgagaatggacgctgcatccaggccaactactcactaatggaaaacggaaagatcaaagtgttaaaccaggagttgagagctgatggaactgtgaatcaaatcgaaggtgaagccaccccagttaacctcacagagcctgccaagctggaagttaagttttcctggtttatgccatcggcaccgtactggatcctggccaccgactatgagaactatgccctcgtgtattcctgtacctgcatcatccaactttttcacgtggattttgcttggatcttggcaagaaaccctaatctccctccagaaacagtggactctctaaaaaatatcctgacttctaataacattgatgtcaagaaaatgacggtcacagaccaggtgaactgccccaagctctcgtaaccaggttctacagggaggctgcacccactccatgttacttctgcttcgctttcccctaccccaccccccgccataaagacaaaccaatcaaccacgacaaaggaagttgacctaaacatgtaaccatgccctaccctgttaccttgctagctgcaaaataaattccgatgcggccggaggcgaaggaataaaataaataattaacattaataacagacct

SEQ ID NO: 102189 - DNA, 1049 bp, Homo sapiens
agctgtgaaggaaatcgggggaggaggatggacacaacatcccatctttgtgtttcgatacagactaagcttttaggccaaccctcctgactggatgggggcggcgggcgtggcatgcatgaaaagtaaacatcagagacctgaagaagcttataaaatagcttgggagaggccagtcaccaagacaggcatctcaaatcggctgattctgcatctggaaactgccttcatcttgaaagaaaagctccaggtcccttctccagccacccagccccaagatggtgatgctgctgctgctgctttccgcactggctggcctcttcggtgcggcagagggacaagcatttcatcttgggaagtgccccaatcctccggtgcaggagaattttgacgtgaataagtatctcggaagatggtacgaaattgagaagatcccaacaacctttgagaatggacgctgcatccaggccaactactcactaatggaaaacggaaagatcaaagtgttaaaccaggagttgagagctgatggaactgtgaatcaaatcgaaggtgaagccaccccagttaacctcacagagcctgccaagctggaagttaagttttcctggtttatgccatcggcaccgtactggatcctggccaccgactatgagaactatgccctcgtgtattcctgtacctgcatcatccaactttttcacgtggattttgcttggatcttggcaagaaaccctaatctccctccagaaacagtggactctctaaaaaatatcctgacttctaataacattgatgtcaagaaaatgacggtcacagaccaggtgaactgccccaagctctcgtaaccaggttctacagggaggctgcacccactccatgttacttctgcttcgctttcccctaccccaccccccgccataaagacaaaccaatcaaccacgacaaaggaagttgacctaaacatgtaaccatgccctaccctgttaccttgctagctgcaaaataaagtcaacattctaaaacgcaccgtgcgaactaataatttc

SEQ ID NO: 102190 - DNA, 1030 bp, Homo sapiens
gagcatgggcttaggtacaggctgggtgatctcaaatcggctgattctgcatctggaaactgccttcatcttgaaagaaaaggctgctgctttccgcactggctggcctcttcggtgcggcagagggacaagcatttcatcttgggaagtgccccaatcctccggtgcaggagaattttgacgtgaataagtatctcggaagatggtacgaaattgagaagatcccaacaacctttgagaatggacgctgcatccaggccaactactcactaatggaaaacggaaagatcaaagtgttaaaccaggagttgagagctgatggaactgtgaatcaaatcgaaggtgaagccaccccagttaacctcacagagcctgccaagctggaagttaagttttcctggtttatgccatcggcaccgtactggatcctggccaccgactatgagaactatgccctcgtgtattcctgtacctgcatcatccaactttttcacgtggattttgcttggatcttggcaagaaaccctaatctccctccagaaacagtggactctctaaaaaatatcctgacttctaataacattgatgtcaagaaaatgacggtcacagaccaggtgaactgccccaagctctcgtaaccaggttctacagggaggctgcacccactccatgttacttctgcttcgctttcccctaccccaccccccgccataaagacaaaccaatcaaccacgacaaaggaagttgacctaaacatgtaaccatgccctaccctgttaccttgctagctgcaaaataaacttgttgctgacctgctgtgctcgcagtagattccaaaaaaaaaaaatcaaccttatttaaaatcataaccagcactatctctcaacttgaatatcacttcgactttacctatttggcttcctcattgcccttccgtccttaactcacattttgaagggtggtccccttctgcaatatacctattttggggggggtccccgccccctatcccctctttttaaatctctaa

SEQ ID NO: 102191 - DNA, 877 bp, Homo sapiens
tatactgttgtgcggcggagaattttgacgtgaataagtatctcggaagatggtacgaaattgagaagatcccaacaacctttgagaatggacgctgcatccaggccaactactcactaatggaaaacggaaagatcaaagtgttaaaccaggagttgagagctgatggaactgtgaatcaaatcgaaggtgaagccaccccagttaacctcacagagcctgccaagctggaagttaagttttcctggtttatgccatcggcaccgtactggatcctggccaccgactatgagaactatgccctcgtgtattcctgtacctgcatcatccaactttttcacgtggattttgcttggatcttggcaagaaaccctaatctccctccagaaacagtggactctctaaaaaatatcctgacttctaataacattgatgtcaagaaaatgacggtcacagaccaggtgaactgccccaagctctcgtaaccaggttctacagggaggctgcacccactccatgttacttctgcttcgctttcccctaccccaccccccgccataaagacaaaccaatcaaccacgacaaaggaagttgacctaaacatgtaaccatgccctaccctgttaccttgctagctgcaaaataaacttgttgctgacctgctgtgctcgcagtagattccaaaaaaaaaaaatcaaccttatttaaaatcataaccagcactatctctcaacttgaatatcacttcgactttacctatttggcttcctcattgcccttccgtccttaactcacattttgaagggtggtccccttctgcaatatacctattttggggggggtccccgccccctatcccctctttttaaatctctaa

SEQ ID NO: 102192 - DNA, 1007 bp, Homo sapiens
agctgtgaaggaaatcgggggaggaggatggacacaacatcccatctttgtgtttcgatacagactaagcttttaggccaaccctcctgactggatgggggcggcgggcgtggcatgcatgaaaagtaaacatcagagacctgaagaagcttataaaatagcttgggagaggccagtcaccaagacaggcatctcaaatcggctgattctgcatctggaaactgccttcatcttgaaagaaaagctccaggtcccttctccagccacccagccccaagatggtgatgctgctgctgctgctttccgcactggctggcctcttcggtgcggcagagggacaagcatttcatcttgggaagtgccccaatcctccggtgcaggagaattttgacgtgaataagtatctcggaagatggtacgaaattgagaagatcccaacaacctttgagaatggacgctgcatccaggccaactactcactaatggaaaacggaaagatcaaagtgttaaaccaggagttgagagctgatggaactgtgaatcaaatcgaaggtgaagccaccccagttaacctcacagagcctgccaagctggaagttaagttttcctggtttatgccatcggcaccgtactggatcctggccaccgactatgagaactatgccctcgtgtattcctgtacctgcatcatccaactttttcacgtggattttgcttggatcttggcaagaaaccctaatctccctccagaaacagtggactctctaaaaaatatcctgacttctaataacattgatgtcaagaaaatgacggtcacagaccaggtgaactgccccaagctctcgtaaccaggttctacagggaggctgcacccactccatgttacttctgcttcgctttcccctaccccacccccagcagcaagcagcccccaacaagtcatcttaggaattcctcattcctgcagatgggaaggagacaaccaccgcgcagcgttgcagcctgca

SEQ ID NO: 102193 - DNA, 1183 bp, Homo sapiens
agctgtgaaggaaatcgggggaggaggatggacacaacatcccatctttgtgtttcgatacagactaagcttttaggccaaccctcctgactggatgggggcggcgggcgtggcatgcatgaaaagtaaacatcagagacctgaagaagcttataaaatagcttgggagaggccagtcaccaagacaggcatctcaaatcggctgattctgcatctggaaactgccttcatcttgaaagaaaagctccaggtcccttctccagccacccagccccaagatggtgatgctgctgctgctgctttccgcactggctggcctcttcggtgcggcagagggacaagcatttcatcttgggaagtgccccaatcctccggtgcaggagaattttgacgtgaataagtatctcggaagatggtacgaaattgagaagatcccaacaacctttgagaatggacgctgcatccaggccaactactcactaatggaaatcgaaggtgaagccaccccagttaacctcacagagcctgccaagctggaagttaagttttcctggtttatgccatcggcaccgtactggatcctggccaccgactatgagaactatgccctcgtgtattcctgtacctgcatcatccaactttttcacgtggattttgcttggatcttggcaagaaaccctaatctccctccagaaacagtggactctctaaaaaatatcctgacttctaataacattgatgtcaagaaaatgacggtcacagaccaggtgaactgccccaagctctcgtaaccaggttctacagggaggctgcacccactccatgttacttctgcttcgctttcccctaccccaccccccgccataaagacaaaccaatcaaccacgacaaaggaagttgacctaaacatgtaaccatgccctaccctgttaccttgctagctgcaaaataaacttgttgctgacctgctgtgctcgcagtagattccaaaaaaaaaaaatcaaccttatttaaaatcataaccagcactatctctcaacttgaatatcacttcgactttacctatttggcttcctcattgcccttccgtccttaactcacattttgaagggtggtccccttctgcaatatacctattttggggggggtccccgccccctatcccctctttttaaatctctaa

SEQ ID NO: 102194 - DNA, 667 bp, Homo sapiens
gcttaaggtgactgactctcttatttaccaccgctacagttatgccatcggcaccgtactggatcctggccaccgactatgagaactatgccctcgtgtattcctgtacctgcatcatccaactttttcacgtggattttgcttggatcttggcaagaaaccctaatctccctccagaaacagtggactctctaaaaaatatcctgacttctaataacattgatgtcaagaaaatgacggtcacagaccaggtgaactgccccaagctctcgtaaccaggttctacagggaggctgcacccactccatgttacttctgcttcgctttcccctaccccaccccccgccataaagacaaaccaatcaaccacgacaaaggaagttgacctaaacatgtaaccatgccctaccctgttaccttgctagctgcaaaataaacttgttgctgacctgctgtgctcgcagtagattccaaaaaaaaaaaatcaaccttatttaaaatcataaccagcactatctctcaacttgaatatcacttcgactttacctatttggcttcctcattgcccttccgtccttaactcacattttgaagggtggtccccttctgcaatatacctattttggggggggtccccgccccctatcccctctttttaaatctctaa

SEQ ID NO: 102195 - DNA, 668 bp, Homo sapiens
  misc_feature (1)..(1): n is a, c, g, or t
ncattgctggaacgactctcttaattttccaccgctacacttatgccatcggcaccgtactggatcctggccaccgactatgagaactatgccctcgtgtattcctgtacctgcatcatccaactttttcacgtggattttgcttggatcttggcaagaaaccctaatctccctccagaaacagtggactctctaaaaaatatcctgacttctaataacattgatgtcaagaaaatgacggtcacagaccaggtgaactgccccaagctctcgtaaccaggttctacagggaggctgcacccactccatgttacttctgcttcgctttcccctaccccaccccccgccataaagacaaaccaatcaaccacgacaaaggaagttgacctaaacatgtaaccatgccctaccctgttaccttgctagctgcaaaataaacttgttgctgacctgctgtgctcgcagtagattccaaaaaaaaaaaatcaaccttatttaaaatcataaccagcactatctctcaacttgaatatcacttcgactttacctatttggcttcctcattgcccttccgtccttaactcacattttgaagggtggtccccttctgcaatatacctattttggggggggtccccgccccctatcccctctttttaaatctctaa

SEQ ID NO: 102196 - DNA, 705 bp, Homo sapiens
atgatctctgccaagctatgtagccctggagcacgatatatgatctgctgccaagctggaagttaagttttcctggtttatgccatcggcaccgtactggatcctggccaccgactatgagaactatgccctcgtgtattcctgtacctgcatcatccaactttttcacgtggattttgcttggatcttggcaagaaaccctaatctccctccagaaacagtggactctctaaaaaatatcctgacttctaataacattgatgtcaagaaaatgacggtcacagaccaggtgaactgccccaagctctcgtaaccaggttctacagggaggctgcacccactccatgttacttctgcttcgctttcccctaccccaccccccgccataaagacaaaccaatcaaccacgacaaaggaagttgacctaaacatgtaaccatgccctaccctgttaccttgctagctgcaaaataaacttgttgctgacctgctgtgctcgcagtagattccaaaaaaaaaaaatcaaccttatttaaaatcataaccagcactatctctcaacttgaatatcacttcgactttacctatttggcttcctcattgcccttccgtccttaactcacattttgaagggtggtccccttctgcaatatacctattttggggggggtccccgccccctatcccctctttttaaatctctaa

SEQ ID NO: 102197 - DNA, 1207 bp, Homo sapiens
agctgtgaaggaaatcgggggaggaggatggacacaacatcccatctttgtgtttcgatacagactaagcttttaggccaaccctcctgactggatgggggcggcgggcgtggcatgcatgaaaagtaaacatcagagacctgaagaagcttataaaatagcttgggagaggccagtcaccaagacaggcatctcaaatcggctgattctgcatctggaaactgccttcatcttgaaagaaaagctccaggtcccttctccagccacccagccccaagatggtgatgctgctgctgctgctttccgcactggctggcctcttcggtgcggcagagggacaagcatttcatcttgggaagtgccccaatcctccggtgcaggagaattttgacgtgaataagtatctcggaagatggtacgaaattgagaagatcccaacaacctttgagaatggacgctgcatccaggccaactactcactaatggaaaacggaaagatcaaagtgttaaaccaggagttgagagctgatggaactgtgaatcaaatcgaaggtgaagccaccccagttaacctcacagagcctgccaagctggaagttaagttttcctggtttatgccatcggcaccgtactggatcctggccaccgactatgagaactatgccctcgtgtattcctgtacctgcatcatccaactttttcacgtggattttgcttggatcttggcaagaaaccctaatctccctccagaaacagtggactctctaaaaaatatcctgacttctaataacattgatgtcaagaaaatgacggtcacagaccaggtgaagaggctgcacccactccatgttacttctgcttcgctttcccctaccccaccccccgccataaagacaaaccaatcaaccacgacaaaggaagttgacctaaacatgtaaccatgccctaccctgttaccttgctagctgcaaaataaacttgttgctgacctgctgtgctcgcagtagattccaaaaaaaaaaaatcaaccttatttaaaatcataaccagcactatctctcaacttgaatatcacttcgactttacctatttggcttcctcattgcccttccgtccttaactcacattttgaagggtggtccccttctgcaatatacctattttggggggggtccccgccccctatcccctctttttaaatctctaa

SEQ ID NO: 102198 - DNA, 1184 bp, Homo sapiens
agctgtgaaggaaatcgggggaggaggatggacacaacatcccatctttgtgtttcgatacagactaagcttttaggccaaccctcctgactggatgggggcggcgggcgtggcatgcatgaaaagtaaacatcagagacctgaagaagcttataaaatagcttgggagaggccagtcaccaagacaggcatctcaaatcggctgattctgcatctggaaactgccttcatcttgaaagaaaagctccaggtcccttctccagccacccagccccaagatggtgatgctgctgctgctgctttccgcactggctggcctcttcggtgcggcagagggacaagcatttcatcttgggaagtgccccaatcctccggtgcaggagaattttgacgtgaataagtatctcggaagatggtacgaaattgagaagatcccaacaacctttgagaatggacgctgcatccaggccaactactcactaatggaaaacggaaagatcaaagtgttaaaccaggagttgagagctgatggaactgtgaatcaaatcgaaggtgaagccaccccagttaacctcacagagcctgccaagctggaagttaagttttcctggtttatgccatcggcaccgtactggatcctggccaccgactatgagaactatgccctcgtgtattcctgtacctgcatcatccaactttttcacgtggattttgcttggatcttggcaagaaaccctaatctccctccagaaacagtggactctctaaaaaatatcctgacttctaataacattgatgtcaagaaagaggctgcacccactccatgttacttctgcttcgctttcccctaccccaccccccgccataaagacaaaccaatcaaccacgacaaaggaagttgacctaaacatgtaaccatgccctaccctgttaccttgctagctgcaaaataaacttgttgctgacctgctgtgctcgcagtagattccaaaaaaaaaaaatcaaccttatttaaaatcataaccagcactatctctcaacttgaatatcacttcgactttacctatttggcttcctcattgcccttccgtccttaactcacattttgaagggtggtccccttctgcaatatacctattttggggggggtccccgccccctatcccctctttttaaatctctaa

SEQ ID NO: 102199 - DNA, 495 bp, Homo sapiens
  misc_feature (46)..(46): n is a, c, g, or t
  misc_feature (67)..(67): n is a, c, g, or t
  misc_feature (136)..(140): n is a, c, g, or t
  misc_feature (153)..(154): n is a, c, g, or t
ctttcagttttaattttattagtgacaaggtaaataggtacatganaatcttcacagatatctacgnacgtatttaaataaaacaagagtcgagttctaagaatgcagtttcaggggtgactagtacatattattnnnnnatttactgtatannttttccaagtttatccgcgccataaagacaaaccaatcaaccacgacaaaggaagttgacctaaacatgtaaccatgccctaccctgttaccttgctagctgcaaaataaacttgttgctgacctgctgtgctcgcagtagattccaaaaaaaaaaaatcaaccttatttaaaatcataaccagcactatctctcaacttgaatatcacttcgactttacctatttggcttcctcattgcccttccgtccttaactcacattttgaagggtggtccccttctgcaatatacctattttggggggggtccccgccccctatcccctctttttaaatctctaa

SEQ ID NO: 102200 - DNA, 325 bp, Homo sapiens
gtaagtatccacttttcccaggaggattcagggacaggaaatatgcaaactgaaggctagcgccccggcttggagaattcctgagacacctgagtgtcatctataatcactcagcacataattatctgtcaaacacttactacatgtcacgcactagggttgccatgatgagccggacagagctggccttggtacttatggagctcacatcccagtgtggatactgacacgtgaccccgcaatttactataactagctagcgtttcaacaggtgaaacacaagtaggtgcacaccgggtgtgggctgcagaagacacaacccagt

SEQ ID NO: 102201 - DNA, 1078 bp, Homo sapiens
gagcatgggcttaggtacaggctgggtgatctcaaatcggctgattctgcatctggaaactgccttcatcttgaaagaaaagctccaggtcccttctccagccacccagccccaagatggtgatgctgctgctgctgctttccgcactggctggcctcttcggtgcggcagagggacaagcatttcatcttgggaagtgccccaatcctccggtgcaggagaattttgacgtgaataagtatctcggaagatggtacgaaattgagaagatcccaacaacctttgagaatggacgctgcatccaggccaactactcactaatggaaaacggaaagatcaaagtgttaaaccaggagttgagagctgatggaactgtgaatcaaatcgaaggtgaagccaccccagttaacctcacagagcctgccaagctggaagttaagttttcctggtttatgccatcggcaccgtactggatcctggccaccgactatgagaactatgccctcgtgtattcctgtacctgcatcatccaactttttcacgtggattttgcttggatcttggcaagaaaccctaatctccctccagaaacagtggactctctaaaaaatatcctgacttctaataacattgatgtcaagaaaatgacggtcacagaccaggtgaactgccccaagctctcgtaaccaggttctacagggaggctgcacccactccatgttacttctgcttcgctttcccctaccccaccccccgccataaagacaaaccaatcaaccacgacaaaggaagttgacctaaacatgtaaccatgccctaccctgttaccttgctagctgcaaaataaacttgttgctgacctgctgtgctcgcagtagattccaaaaaaaaaaaatcaaccttatttaaaatcataaccagcactatctctcaacttgaatatcacttcgactttacctatttggcttcctcattgcccttccgtccttaactcacattttgaagggtggtccccttctgcaatatacctattttggggggggtccccgccccctatcccctctttttaaatctctaa

SEQ ID NO: 102202 - DNA, 928 bp, Homo sapiens
cgtctagagatccgggcgtgccgtgggagaggacagcattatcttgggagtgcccaatctctggtgcaggagaatttgacgtgaataagtatctcggaagatggtacgaaattgagaagatcccaacaacctttgagaatggacgctgcatccaggccaactactcactaatggaaaacggaaagatcaaagtgttaaaccaggagttgagagctgatggaactgtgaatcaaatcgaaggtgaagccaccccagttaacctcacagagcctgccaagctggaagttaagttttcctggtttatgccatcggcaccgtactggatcctggccaccgactatgagaactatgccctcgtgtattcctgtacctgcatcatccaactttttcacgtggattttgcttggatcttggcaagaaaccctaatctccctccagaaacagtggactctctaaaaaatatcctgacttctaataacattgatgtcaagaaaatgacggtcacagaccaggtgaactgccccaagctctcgtaaccaggttctacagggaggctgcacccactccatgttacttctgcttcgctttcccctaccccaccccccgccataaagacaaaccaatcaaccacgacaaaggaagttgacctaaacatgtaaccatgccctaccctgttaccttgctagctgcaaaataaacttgttgctgacctgctgtgctcgcagtagattccaaaaaaaaaaaatcaaccttatttaaaatcataaccagcactatctctcaacttgaatatcacttcgactttacctatttggcttcctcattgcccttccgtccttaactcacattttgaagggtggtccccttctgcaatatacctattttggggggggtccccgccccctatcccctctttttaaatctctaa

SEQ ID NO: 102203 - DNA, 1130 bp, Homo sapiens
agctgtgaaggaaatcgggggaggaggatggacacaacatcccatctttgtgtttcgatacagactaagcttttaggccaaccctcctgactggatgggggcggcgggcgtggcatgcatgaaaagtaaacatcagagacctgaagaagcttataaaatagcttgggagaggccagtcaccaagacaggcatctcaaatcggctgattctgcatctggaaactgccttcatcttgaaagaaaagctccaggtcctctcagcaccagccagaggatgtgcgcgtgttcgactgctgctctctgcggcgaggacagcttcatctgggagtccatctccggcagaaatgacgtaatatttcgaaatgtcgaatgagaagatccaaaactgaaaggagctgatcaggcaatatcatatgaaagaagatcaagtgtaacagagtggagctgtaatgtgataatcaagtgaagcaccagtactccgagctgccagtggagtagtcctgttatgccatcggcaccgtactggatcctggccaccgactatgagaactatgccctcgtgtattcctgtacctgcatcatccaactttttcacgtggattttgcttggatcttggcaagaaaccctaatctccctccagaaacagtggactctctaaaaaatatcctgacttctaataacattgatgtcaagaaaatgacggtcacagaccaggtgaactgccccaagctctcgtaaccaggttctacagggaggctgcacccactccatgttacttctgcttcgctttcccctaccccaccccccgccataaagacaaaccaatcaaccacgacaaaggaagttgacctaaacatgtaaccatgccctaccctgttaccttgctagctgcaaaataaacttgttgctgacctgctgtgctcgcagtagattccaaaaaaaaaaaatcaaccttatttaaaatcataaccagcactatctctcaacttgaatatcacttcgactttacctatttggcttcctcattgcccttccgtccttaactcacattttgaagggtggtccccttctgcaatatacctattttggggggggtccccgccccctatcccctctttttaaatctctaa

SEQ ID NO: 102204 - DNA, 852 bp, Homo sapiens
agctgtgaaggaaatcgggggaggaggatggacacaacatcccatctttgtgtttcgatacagactaagcttttaggccaaccctcctgactggatgggggcggcgggcgtggcatgcatgaaaagtaaacatcagagacctgaagaagcttataaaatagcttgggagaggccagtcaccaagacaggcatctcaaatcggctgattctgcatctggaaactgccttcatcttgaaagaaaagctccaggtcccttctccagccacccagccccaagatggtgatgctgctgctgctgctttccgcactggctggcctcttcggtgcggcagagggacaagcatttcatcttgggaagtgccccaatcctccggtgcaggagaattttgacgtgaataagtatctcggaagatggtacgaaattgagaagatcccaacaacctttgagaatggacgctgcatccaggccaactactcactaatggaaaacggaaagatcaaagtgttaaaccaggagttgagagctgatggaactgtgaatcaaatcgaaggtgaagccaccccagttaacctcacagagcctgccaagctggaagttaagttttcctggtttatgccatcggcaccgtactggatcctggccaccgactatgagaactatgccctcgtgtattcctgtacctgcatcatccaactttttcacgtggattttgcttggatcttggcaagaaaccctaatctccctccagaaacagtggactctctaaaaaatatcctgacttctaataacattgatgtcaagaaacgccgtcacgagatggtacacgagctcgattcactgccgtcgtcac

SEQ ID NO: 102205 - DNA, 1240 bp, Homo sapiens
agctgtgaaggaaatcgggggaggaggatggacacaacatcccatctttgtgtttcgatacagactaagcttttaggccaaccctcctgactggatgggggcggcgggcgtggcatgcatgaaaagtaaacatcagagacctgaagaagcttataaaatagcttgggagaggccagtcaccaagacaggcatctcaaatcggctgattctgcatctggaaactgccttcatcttgaaagaaaagctccaggtcccttctccagccacccagccccaagatggtgatgctgctgctgctgctttccgcactggctggcctcttcggtgcggcagagggacaagcatttcatcttgggaagtgccccaatcctccggtgcaggagaattttgacgtgaataagtatctcggaagatggtacgaaattgagaagatcccaacaacctttgagaatggacgctgcatccaggccaactactcactaatggaaaacggaaagatcaaagtgttaaaccaggagttgagagctgatggaactgtgaatcaaatcgaaggtgaagccaccccagttaacctcacagagcctgccaagctggaagttaagttttcctggtttatgccatcggcaccgtactggatcctggccaccgactatgagaactatgccctcgtgtattcctgtacctgcatcatccaactttttcacgtggattttgcttggatcttggcaagaaaccctaatctccctccagaaacagtggactctctaaaaaatatcctgacttctaataacattgatgtcaagaaaatgacggtcacagaccaggtgaactgccccaagctctcgtaaccaggttctacagggaggctgcacccactccatgttacttctgcttcgctttcccctaccccaccccccgccataaagacaaaccaatcaaccacgacaaaggaagttgacctaaacatgtaaccatgccctaccctgttaccttgctagctgcaaaataaacttgttgctgacctgctgtgctcgcagtagattccaaaaaaaaaaaatcaaccttatttaaaatcataaccagcactatctctcaacttgaatatcacttcgactttacctatttggcttcctcattgcccttccgtccttaactcacattttgaagggtggtccccttctgcaatatacctattttggggggggtccccgccccctatcccctctttttaaatctctaa

SEQ ID NO: 102206 - DNA, 154 bp, Homo sapiens
gtgtgtatttcacctgagaccacttgctcagagccatagtttacatctgaagccaggacgctggagcacttggcactccagacagctggttcagggggctcccgctggttgagtggacttgggcaggttacaaggcctctgtgccgcagttccc

SEQ ID NO: 102207 - DNA, 351 bp, Homo sapiens
tgtcagtcacccaaggcctattcagaatctgttcctgtttgaaatttaatgctctatctccctgaactcgaggccactcaacagtgaagctggaactccacatgatcaaaaggtggaatgcatagaagaaaagggaaatgagtcacatgacgtgtctttcaaacctgacttctctggcggtccttcagggctgggaagaatgaatgctcaattttgcaaggctttgggtgtcctcactaacagtgaaaacattctatatatttatatgggacttcagaaatgcaaaacgagagacaagaaacaaagacttgtttacttatagattttttcccctaaatttaatcggcccaa

SEQ ID NO: 102208 - DNA, 297 bp, Homo sapiens
atactcttccccctgcacaaatctccccccaccccacaaaatgcttaaaaggtagcttgactctttgtttggggcccggtcctttggatgttaatctgattgggtcggtgcgcctaaataattaaataattcctcctcaaccccatcggtctctctgattccttaattatcccgcagcaatacatgaagcaaaaactcacagaattgaagggtgaaacagtcaattcaccagtaacggttgggccaggcatggtgactcacgcttgtaatcccagcactttgggaggccgaggtggg

SEQ ID NO: 102209 - DNA, 423 bp, Homo sapiens
ttaaggcacacgatatgtgaatacttactcttcacaattttttagtacagattttgctgttgtttattatttctggccacattaacttctattttcttaattccaactgtacttatagttatttctatggtttaacatttaactattcacttttatatgttattatcatctctcaagggagattgttcatccttgaggaaaggactgtgtcttttatttttatatatccccttcagtgtctaatatttgtaaaaactaatcatttctgagcttcatacttataaattcaactgcttggtttcttaaacaaatcacaaatgcaacaaatctaaatccgaatcatctttttgccctaaatttactccttctgttttgttctttgggaagttcccatgtggtaacctggagctacccttgaccact

SEQ ID NO: 102210 - DNA, 359 bp, Homo sapiens
tgttcttctcgcgttcattctccttcctgccaccttgtgaagatgatgccttgcttcccctttgccttccatcatgcttgccttgctctgtcacctaggctgtagtgccgtggcacaaacttggctcactgcaactttggctttctgggctcaagcgatcctctcacttcaacctcccaagtagctgggactacaggcaccacttctgaaaaacgctgacttcgttatcttcctcaaaagaatggaaacttatttacatgattgttgctgaccaggcatcgataagaagaaatggggagcaaatattttgtatagacaccagaatggctaataaaggtgacatcacgctgagttgcaag

SEQ ID NO: 102211 - DNA, 392 bp, Homo sapiens
tttttttcctttgagatgggggtcttgctctgttgcccaggctggactgcagcagtgcaatctcagctcactgcaacctttgcctcctgggttcaagcaattttcctgtctcagcctcctgagtatctgggattacaggcatgcgccaccatgtccggctaatgtttctatttttagtagagatggggtttcgtcatgttggccagtctggtctcgaactcctgacctcaggtgatctgcctgccttggcttccctaagtgctggaattacaggcgtgagcaattgcgcccggcctctctgttataaattagtgttcataaattaatatttttaaatacatgcacagatttaaaaaattcattcagtacaggggtaataggatagaaaagca

SEQ ID NO: 102212 - DNA, 407 bp, Homo sapiens
gcaattgagggatagaatggttaacaaattcttccaggtcgcatggccagaagtatggcagagtcattatcaaagcccccaagttagtgcctgagtctgcaccctgggccgaaattttccagcttctgtgatacagaattttatgccagaaactcttacattactaaatttttcattctttcttttaatataaatatacataaaaatgaggaaaacttccataggtgtgttctaatactgtgagcaaattaaaactcaattgaatactattttcacaaatacatgtatgcttatctcactttaggatgaaccaattctaaaagtcctacttaagaaatagttatgaccaggcatggtggctcatgcctgtaatcccagcactttgggaggccgaggcaggcagatcg

SEQ ID NO: 102213 - DNA, 271 bp, Homo sapiens
taccacatggcttaacacccttctgctcacacatggttaaacacgtgtttgaactgatgttttaacacccgtctcgcacatctttatgccctttgttcacatatgctggaacacatgctttgccaccctttgtgcactcattgttgaacacaggcagagtattgtctagagtctgactttccagaggttcgttggtgagtagcattccatctaagattggtgcctaataaagtcacagctccttctgccagatgatgtccacacttgtgtt

SEQ ID NO: 102214 - DNA, 300 bp, Homo sapiens
ccttttccccagtggagctgaccttgctgttattggcacacaccgtagcttctgtggcctttggctgctgttccccctctggacccttgccctgtgttccactgtctttagccaaaccccctctaggggctttgggagaagtctctgaggtgtcaattcctgatggagattcatggacagggcacgtcctgtctcttgtcttcaccctagctctgcttgagggcagccatctctcttgagtgtctggtttcccggacacatgtcttctccctgcatctctggtctttgaggaaacaggac

SEQ ID NO: 102215 - DNA, 270 bp, Homo sapiens
taaaaggaggcccgaagatgtcagggggattcaaggtggcaaaacacattggttgtattttttttttaaagctttattgaaatataattcacataccatacaattaagccatttacagtgaacaattcaatggttcttagtatattcacaaatacgtgcaaccacagtcaatgttagaatattttcatcatttcgaaaagaaactctaaccctttggctatcactccttggcttccccactgccacatgtgccccatacttagcctcaaa

SEQ ID NO: 102216 - DNA, 827 bp, Homo sapiens
gctttgagctgcggccagaaccccctgcccatctacctcaccatcaatgtcaaggatgatgtaagcaaccaggacttcagagagtggttcgagttctccccctacgaggtgggcctgcagaagtatggggccttcatcccctccgagctcttcggctccgagttcttcatggggcggctggtgaagaggatcccggagtctcgaatctgctacatgctaggcctgtggagcagcatcttctccctgaacctgctggatgcctggaacctgtcacacacctcggaggagtttttccacaggtggacaagggagaaagtgcaggacatcgaagacgagccgatcctgcctgaaatccccaaatgtgatgctaacatcctggagaccacggtagtgatcccagggtcatggctgtccaattctttccgagaaatccttacccatcggtccttcgtgtctgagtttcacaacttcctgtctgggctgcagctgcacaccaactacctccagaatggccagttctctaggtggaaaggtaaccctacctggctactccttgaggcctgcctccatatggaggaggaagatgtggatgtcaaggctgccatggataaagaataagaaaacttctctggctatgttcactgggccaggcacctctctccccatggtgttttccacatttggtggtgtcgtcttgaacactgtatgtgtctggcagcagggagtggtgtgggtacttaactcactgcatctgtacagtcattctatacagaatctgtacaacagtcctagcaggtagaagttggccccatgttacagatggggaa

SEQ ID NO: 102217 - DNA, 344 bp, Homo sapiens
ataggtaagcctgctgggccctggcctatggggtctgttcaggaagaagaggggtcttctctctaaacctgtgagatctcttctagactcttttatagattgtttttatattgtatgtttgatcattttgtcctcccctaaccccctttgggcactatctcagactttaaatattctaaataattttggcagtatgtgaaaaatgaattttatgtcactaagcgattcatggaaatatttttttagtacctacatgtacagatttcttaaccaattatgtatatttgagttcctaagaatagaagtaactttttaatgaccttcaggtacacatatttgtatta

SEQ ID NO: 102218 - DNA, 472 bp, Homo sapiens
gtcctttttataaaagcctccaaccttctcttttttctttggacatactaaaggccagccagtctgtgggtatgtgctgaatccaatctttgcttcccaaataaaatgttttaaatttagagattagtctttatattttatctgacttcaacacagctatgggctgatctgtagaactcaatatagaaatctactgtcctggtcaagactggtagaaatactctctttacaaatcatatctgtgttaattttgaatctgcaagtgagtaaaataggaatttgctctctcatctcttggaaatttgatccaaatctatagacattgtggtcggagaacagtgaatgcatgaagagaatggtcccataaagttgagatcgaggagccattttttgccgtgagctttctaacgagtaagaaaaacttgtctttagagagagactgaagagtagagcagacagtacagaggtgagg

SEQ ID NO: 102219 - DNA, 566 bp, Homo sapiens
aatagtctgttcatttcagactttgtcttttggtatcaagttggttaatatatgattttgaaaatgtaaatatgcatacctgcaacaaagtgcatcagagttgaaagaagaaagaagcaggttgtgtttgcctaaaagctgcaaaaccagcttttagtctacactctgcatgtgtggcttaggggtcagccagagctgagagcagacagaagttggaaatcctccctcggactctttcccttcctgcattccctttctcttcccagcagccatggtggccctggattcagctttcccttccacaggccagagagattgtgattttttttccaccaatgccctgccaccctgcaggctgctctcactacacttgggtgtaagtgaaaagctgtccctataacttccctcctctgagcacggaccaccccactcctgggtctgcctgctcttctcactctcatatgtcttcaagaagctgcttgtattacgtccaaagcttacaattggtatgtccaggaggctcagtctggtaggatcttactctgtccttaccagcagcagaagta

SEQ ID NO: 102220 - DNA, 344 bp, Homo sapiens
gctatttcttcttgcagaacccacaaatgagtcccatatttgggcctctgcaatcagttggctgcagctcccaggcgggctgacacacactgcaacctcacatctgcaggactctcgccccttctctcttttttaaagggcctttgtcctttgttccccagcctcacaggcaagacagaagagcctttgcttctgtacttcttaaaagctttagaaagggacttcattctgcacacttcggggaggaccaggacccatgactgcatgggaagtaaaacacaagtagcacacggcatacttctcctagatgctctctgcgtcttccagcacctcaacatccaatt

SEQ ID NO: 102221 - DNA, 425 bp, Homo sapiens
tgtgcatctagttttcaggtgaagatgagttgaccgaagtgcatgtggctgatccagctgttgcaccctccatccagtataacttttgtgccgttgcctttggtgcaaccccttgacatgaaaccacagttcttccaataagcagagtgaatgtgaacacatgttggcagaactgtgccatttacaaaggaagtggtgagatattactgaggaaaagctagacaatgctgcaccagcaatctgatcccgctcattctttctccaaaatgtagtttccaactctgcaggagtagtggctgtgaaatacatgggaaagagtttgaaaagtatgtatcccacatttcacagcactttccaggattttacatttcagtatagacaaaagtaagtgtataatgcttgtaaataaaatttacaaaccaaac

SEQ ID NO: 102222 - DNA, 663 bp, Homo sapiens
ttcctgtaactaacattctatttagagtgcctaatgtgccaggcactaggccaaggactttgcatgcatatcaaagtctgtttaatcataagtaagaataaagtcatatttaacatttccaacaaccttgaataggcaagaaaactgcagaaagagagatatacccaaggttagcatagctagtactgatagcacatctagtactgggacccaagtctcacttgttaagacaacacatggtgtttactactattacaaattacttcccagtgtatccctactttcagattaggggagcaggatggctcaagatcattacacagaaaactctacaaaataatatacatacatggatgggggaacacttcctcttcacatcccattctttgtatccttccaaaagcttttctgtgcgtgcttgggaaaacatacaggcatcttttttagaggagaagccagttttctaaaagtgaaatcagattatatgtactctgctgctttctttctgtgtatcgtatgcctcattcttcctcagtacatacagatttagatttccttttgttgcatgtcagtgtactgtttagttgtatggctctaccatgtggtataactaagatccttattgatgggtaaggtgttaatttctggccaatgtaatggttt

SEQ ID NO: 102223 - DNA, 684 bp, Homo sapiens
cagctaagaaaattaacaatactatcatcccttggtatccatggaggattagttccaggacctcctgtggataccaaaatacacgaatgctcaagtcctgtatataaagtgccatagtatttccatatctttctctatgccttatttacatttttttcttttattttcttaattgatataaacaagtacacttttatagggtgcatagtgatgttttgatacatataatgtatagtgatgagatcagggtaattagcatatttatctggaacatttatcatttctttttgttgggaacattcaatattctctttctagctatttgaaatgatgtaatacagtcatcctaaaatgctatagaccactagaacttagcccacttatctagctgtaattttatatcctttaacaaatctctgtctacccacttcctcctaccctttctacccctgctgtatgctttaaatcatctctaggccaggcgcagcagctcacgcctgtaatcccaggactttgggaggccaaggcaggcagattgcttgagctcaggagttcaagaccagtgtaggcaacatggtgaaacctcgtctctacaaaaaatacaaaaattagccaggtgtggtggtgtgtacctgtagtcccagctacccaggaggctgaggtaggaggatcacttgagcccca

SEQ ID NO: 102224 - DNA, 689 bp, Homo sapiens
gaggaaggcagtggggccaaggagatacgaagaacctgggggaaggacagggctgggcaaggatgcagtgagggtggcagggctggaggaaaggaggtggcaaggctggtgaaggaagagatggatgcagagtgagggagcacacacacatttaagatgatacactttcccatttcagcttggacaccagccctgaagcagggaaaagacagatgtactaattgtcatggatggcaaactgtgcccccaaacttgtaccaagcctcaaagccttggtttaatactcctgaaggagtaatagacccaatgtgacattttgcatgcaggaaccccttaacagctacctccatattatgcgtgcttcatgaatggagacacctacgttatatgaagttctctattgggctgtaaacttcctgagacaggccttctgggaaattactctctacatcccaggactgcaatgtccagtgcagacccgtgcatttagatgtttccaaaatagcagttgtttccgcggcattatgttctgctggcctagaggtcttagttccagagggaggaatgctgccaccaagagacacaacaatgattccattaaactggaagttaagattgccacctggccactttgggctcttcttacttttaagccaacttgctaagaagggagttacagtgtttgaccc

SEQ ID NO: 102225 - DNA, 145 bp, Homo sapiens
agacataaaccctacctttacggaagttaccacattccacttggggagatgacacctattgtaggataaggaataaaatggttagtaacataaggaaaatgaattttaaaaccataggcattcacatgcaaaaacaaaacaacca

SEQ ID NO: 102226 - DNA, 306 bp, Homo sapiens
tggcacctaggaaaataaatgtctgtattgaacacattgtagttgctcaacaaatatttgttgaaattagaattaaaagggatctcaggatatcaccctattcatttgactgattctggagaagtaacaatattttcactttgtttttcatataactgaggttcagggatattatatgacttgcccgggatagagcatctattaggtttaagatactttcttctgcaaggttgtgacaaaaccttttggatttcacgggtatattgctattcatgatccttaactagcaatactaagagttcttgc

SEQ ID NO: 102227 - DNA, 317 bp, Homo sapiens
gcgtcgactttttttattgctagcaaagaaaaaggcctcgcacaaagaatagcagtttgtggggtgtcctccaaagagggaaaggggaatttgtctcctctgtcataccagtgacccctgaaagctggcacatgtctgtcctgtgagccctggcactctcctggcatggcaagcccatactgctcaggaagtagcagtatgaactgaaagaaggagctccaagttacaatgcaggacacaccacaaactgctattctttgtgcgaggcctttttctttgctagcaataagttttcccattttctattattcacaaca

SEQ ID NO: 102228 - DNA, 337 bp, Homo sapiens
tgagagccacttccacagctcaataaatctctgcattcaccatctttcaggttcatgtgacctgattcttcctggatgctagacaagaacccggttaccagagggcatggagtgaaaggatgtcaccctagccctccactcaactggttaacacttagctgtccatagacagaaaatgctaaaaagcattgtttgtaacacttgccttctggggcttcagaggtcatgtgcaacccctggatgctgccacaggctggtacaaggtatgtttctgctgtcgcccgaaggcattcgccccagctcctccacctgctcaactgtatgctcacccttccac

SEQ ID NO: 102229 - DNA, 339 bp, Homo sapiens
ttttttttttgaccaggctggtctcgaactcctgacctcaggtgattcacctgcctcagcctcccaaagtgctgggattacaggcatgagccaccacaccaggccagactccagttttcactgccacctaccatggtgccagctacaagcccagcttcaggctggtggggctggggcacctgactgcaagcattctattccttgttgaggaaatgagacaggtgcacaggaagcagttagtaaacagaatcctagtggagctggaggtgttttagagataatttgtgagcaaaaaaatagtctagattctagaataagccaaccccaaagttggcgtgg

SEQ ID NO: 102230 - DNA, 333 bp, Homo sapiens
tagaagaatcaccctagggcaagggctctcaacctcagcactattgacattgtgggctggaaaattcttgttgtagtgggggtgtcctgtgcattgtaggatgtttagcagcatctctgacctctgactactaggtgctagtagcaagtcctcttgttcccccatcacacccccccgcaactccccaccctcctcctttcccagctgtgacttccaaaaatgtcttcagacgttgccaaatgtcccctggggtgcaaaatcacaccccactgagaaccactagtctagggataatgtggaagatgaattggagggcaaggagattaattacat

SEQ ID NO: 102231 - DNA, 306 bp, Homo sapiens
tggtcaggttggtcatgaactcctgacctcaggtgatccacccacctcagcctcccaaagtgctgggattataggcgggagccaccacgcctgaccaataaatccctttttatcctacacaaaaaagcaactggagtgcaaatgagaaaaatggggttatcacaaagttacccttagaaccactattttacctatgtagataagtaagtactttgagggcaaggacttggtgtcactgttttaactgcagtgcccagaacagtgtttgatcctcaataaaatatgtgttgactacctgttaataat

SEQ ID NO: 102232 - DNA, 601 bp, Homo sapiens
tgccagtattttattgaggatttttgcatcgatgttcatcagggtctaaaattctctttttttgttgtgtctctgccaggttttggtatcaggatgataccctaactcattttatgaggccagcatcatcctgataccaaagcctgaattcatctattttctaatcaacgtaggaagacttcacggaggtggaaagtgagtcctctctggtaggaaaggtagggatttaaaaatccaggagcttttgaatgaaagagaagtggctgggacaggaagggatctgcaggcatctagcacagttttagaaagagcgtgggagcctactaacaattacaaccgcttggagtgggctggagtgatctgacttaatgttttatagtgatgttaagtcatatgtatcacatagtttctgaagtttgatagcaatagggatccttttcatatgttatgtaattaaatttacccccgggggaaagtataactttttcagcagtctattttaagtctcttctttatagtcttaatcatatgaattgttctatacaggattgtggcatggaagagacacttttaatcaaatgttaaccatatttcttactgt

SEQ ID NO: 102233 - DNA, 603 bp, Homo sapiens
gcagggtggagcacaactttgatctcaaaggaattcatctcaaacagtgaaaccagaatcccaagaaagatgtgggagggattttccgagaaaacctccccacgttccgaagacagagacctgtcacacagggccaaggaaaaatcatggagctgggagcaggaggcctggaaatgcaattataaccttttgcctcccctgcacctgaggcttgctacaggccaagtccatctagctatgtgcatagacactccagagtggaactctcacccaccaggaggttgcctcgggagataacagtccatcgacgatccaaaggatgtccgtgacgaaactctctcccacctggagagttttcagctgctttacaacctagtcctgcccatgaaggtgccagcagtcaccagttttaccaccgcctggtagataaagcaccaagttagcgcacagaccccccaaacctgctcgcttcctccctgtgtgccgttcatgttaggcccccttcaaaaagcacttgccttctgctccaaaagtcaagccttaaggcaggaagcctgtacttcttcccctaagctagcttgggaataaaaagtgactttcttt

SEQ ID NO: 102234 - DNA, 121 bp, Homo sapiens
gtgaggaaactgaagtccaggaacaggttcggagccagctccccgctttccagagttgaggagaggaggaaggagagaggggggaatcgcaggagagggagagaagccggcgggattcgag

SEQ ID NO: 102235 - DNA, 1130 bp, Homo sapiens
  misc_feature (1072)..(1072): n is a, c, g, or t
  misc_feature (1077)..(1078): n is a, c, g, or t
cccggcattccgtgctccttggttccggcgttggagctctttggggcccagctttgcggacccgggagctcgggacgcaggcggggcttgtgctccgcgggggcagggcgtagggtgggcctcctacctcccctgatctcgcggtttgttccgtttcattggagcttcccggaccgtgtgctcgacggtgccctaggtgccgtggggccacacgcgagtctgataagcaccctcccccggaatcatgcggtgctgtgaggcctagcgaagatgaagatagaatgcaagtttacagaagcacttgcagaactcatcagaagccaccccgcttatcagcagatctcaagagagcgttcggtggaggccctgggtctgcacagctcacctccctgggaactgctcgcccgagcgtcggagccggcgctggccccctgcagccggaaggttgcagccgcaggagccccggaggcccaggacacagggctcttgctcttgcagaatccacaggtctttcttgaggaaatctgtagacagaactttgtgctgcgtttttatctagggaaggaacagaagagtgtcgtctcctagaaatctagcactggagaaacgaggaaaattcttccagcgatggtctcccactcagagctgaggaagcttttctactcagcagatgctgtgtgttttgatgttgacagcacggtcatcagagaagaaggaatcgatgagctagccaaaatctgtggcgttgaggacgcggtgtcagaaatgacacggcgagccatgggcggggcagtgcctttcaaagctgctctcacagagcgcttagccctcatccagccctccagggagcaggtgcagagactcatagcagagcaacccccacacctgacccccggcataagggagctggtaagtcgcctacaggagcgaaatgttcaggttttcctaatatctggtggctttaggagtattgtagagcatgttgcttcaaagctcaatatcccagcaaccaatgtatttgccaataggctgaaattctactttaacggatatgcggtttgtgagagcgccnagtgnntggggaaggcagggtaactagaaacttcaacaccgtggggggccaaaaggcc

SEQ ID NO: 102236 - DNA, 1005 bp, Homo sapiens
cccggcattccgtgctccttggttccggcgttggagctctttggggcccagctttgcggacccgggagctcgggacgcaggcggggcttgtgctccgcgggggcagggcgtagggtgggcctcctacctcccctgatctcgcggtttgttccgtttcattggagcttcccggaccgtgtgctcgacggtgccctaggtgccgtggggccacacgcgagtctgataagcaccctcccccggaatcatgcggtgctgtgaggcctagcgaagatgaagatagaatgcaaggtagaaagtgctggatacctttagaaagctgcaggactggtgcgatgggagttgagacgtaagaacctgcccgtccgtagggctctggatgctgctgaggcccgaggcccctatggcagatttgaaaattcacccttgtagagtcattcctgcctttgagcggactcccttttaagtttacagaagcacttgcagaactcatcagaagccaccccgcttatcagcagatctcaagagagcgttcggtggaggccctgggtctgcacagctcacctccctgggaactgctcgcccgagcgtcggagccggcgctggccccctgcagccggaaggttgcagccgcaggagccccggaggcccaggacacagggctcttgctcttgcagaatccacaggtctttcttgaggaaatctgtagacagaactttgtgctgcgtttttatctagggaaggaacagaagagtgtcgtctcctagaaatctagcactggagaaacgtactccagcctgggtgacagtgagaccccgtctcttaaaaaaaaaaaaaaaaaaaggattttcgaaattcacttaaggtaaaagaattaaaaacaggtttttactaattcacaagggccagcattttcccctaaatgaattaaatattaataactcctaacagcctatataaaccatttcttttttataaatgacttggaaatactcgaaagccaggttt

SEQ ID NO: 102237 - DNA, 378 bp, Homo sapiens
  misc_feature (9)..(9): n is a, c, g, or t
  misc_feature (158)..(158): n is a, c, g, or t
atgatgaanaatttttaaatacctggattccagtgatttccaaaaaggcccgtaacttttaagccatagcctactccccgggcaaaattcctccctacagagacaatattaattacaatacccacattgtgtatatattttgaaaagaggctgattancaggcttgggccaccgcgcccagccaatgtcctagagagttttgtgatctgaattctttatgtatatttgtagctatatttcatacaaagtgctttaagtgtggagagtcaattaaacacctttactcttagaaatacggattcggcagccttcagtgaatattggtttctctttggtatgtcaataaaagtttatccgtatgtcagaacggatttgtgg

SEQ ID NO: 102238 - DNA, 414 bp, Homo sapiens
catgcgtggggggcacaggctccctggctggcgtcagctaaagtggctgttgggtgtccgcaggcttctgcctggccgccgccgcctataagctaccaggaggagctttacgacttcccgtcctgcgggaagtggcgggcacgatcgcaaggtagcgcagaagcttctcaatggccagcgccagctgcagccccggcggcgcactcgcctcacctgagcctgggaggaaaattcttccagcgatggtctcccactcagagctgaggaagcttttctactcagcagatgctgtgtgttttgatgttgacagcacggtcatcagagaagaaggaatcgactgggaggcggatattgcagtgagccgagatcacaccactgcactccagcctgggcaacagagtgagacactgtctc

SEQ ID NO: 102239 - DNA, 2765 bp, Homo sapiens
cccggcattccgtgctccttggttccggcgttggagctctttggggcccagctttgcggacccgggagctcgggacgcaggcggggcttgtgctccgcgggggcagggcgtagggtgggcctcctacctcccctgatctcgcggtttgttccgtttcattggagcttcccggaccgtgtgctcgacggtgccctaggtgccgtggggccacacgcgagtctgataagcaccctcccccggaatcatgcggtgctgtgaggcctagcgaagatgaagatagaatgcaagtttacagaagcacttgcagaactcatcagaagccaccccgcttatcagcagatctcaagagagcgttcggtggaggccctgggtctgcacagctcacctccctgggaactgctcgcccgagcgtcggagccggcgctggccccctgcagccggaaggttgcagccgcaggagccccggaggcccaggacacagggctcttgctcttgcagaatccacaggtctttcttgaggaaatctgtagacagaactttgtgctgcgtttttatctagggaaggaacagaagagtgtcgtctcctagaaatctagcactggagaaacgaggaaaattcttccagcgatggtctcccactcagagctgaggaagcttttctactcagcagatgctgtgtgttttgatgttgacagcacggtcatcagagaagaaggaatcgatgagctagccaaaatctgtggcgttgaggacgcggtgtcagaaatgacacggcgagccatgggcggggcagtgcctttcaaagctgctctcacagagcgcttagccctcatccagccctccagggagcaggtgcagagactcatagcagagcaacccccacacctgacccccggcataagggagctggtaagtcgcctacaggagcgaaatgttcaggttttcctaatatctggtggctttaggagtattgtagagcatgttgcttcaaagctcaatatcccagcaaccaatgtatttgccaataggctgaaattctactttaacggtgaatatgcaggttttgatgagacgcagccaacagctgaatctggtggaaaaggaaaagtgattaaacttttaaaggaaaaatttcattttaagaaaataatcatgattggagatggtgccacagatatggaagcctgtcctcctgctgatgctttcattggatttggaggaaatgtgatcaggcaacaagtcaaggataacgccaaatggtatatcactgattttgtagagctgctgggagaactggaagaataacatccattgtcgtacagctccaaacaacttcagatgaatttttacaagttatacagattgatactgtttgcttacagttgcctattacaacttgctatagaaagttggtacaaatgatctgtactttaaactacagttaggaatcctagaagattgctttttttttttttttaactgtagttccagtattatatgatgactattgatttcctggagaggttttttttttttttgagacagaatcttgctctgttgcccaggctggagtgcagtggcgcggtctcggctcactgcaagctctgcctcccaggttcacgccattctcctgcctcagcctcccgagtagctgggactacaggcgcccgccaccacatccggctaattttttgtatttttagtagagacggggtttgaccgtgttagccaggatggtcttgatctcctgaccttgtgatccgcctgcctcagcctcccaaagtgctgggattacaggcttgggccaccgcgcccagccaatgtcctagagagttttgtgatctgaattctttatgtatatttgtagctatatttcatacaaagtgctttaagtgtggagagtcaattaaacacctttactcttagaaatacggattcggcagccttcagtgaatattggtttctctttggtatgtcaataaaagtttatccgtatgtcagaacggatttgtggaattttcagttctgcctcttgcatattggaatacccaatatttcaggtaccgtgttgaagcataaatagcccccaggcaagaaacaggcttaagactctactttgcttagtgctgggtacaatgtcctcaccccatgagcccactcccacttcctgaagccctgggacctggaaagtcctttttttttacttcttgggattgtcatatatgaaatgttacaaaagttttttgtttttgttttcctccaatataacaatagagtcttaaacaaaagtactgattaaaaatggatatttgggctcaggcctgtaatctcagcactgtgggaggacaagttaagaggatcacttgaggacaggaattcgagaccagcctggacaacagagcaagaccctgtctctgcaaaaaataaaaacattagctggatgtggcggcacgcacctgtagtcccagctacttggtgggctgagatgggaggatcccttgaactcagtagttcaaggctgcagtgagctgtgactctgccattgtactccagcctgggtgacagtgagaccccgtctcttaaaaaaaaaaaaaaaaaaaggattttcgaaattcacttaaggtaaaagaattaaaaacaggtttttactaattcacaagggccagcattttcccctaaatgaattaaatattaataactcctaacagcctatataaaccatttcttttttataaatgacttggaaatactcgaaagccaggttt

SEQ ID NO: 102240 - DNA, 2512 bp, Homo sapiens
cggctttgcagagcagacagatctggtgtctccagtttacagaagcacttgcagaactcatcagaagccaccccgcttatcagcagatctcaagagagcgttcggtggaggccctgggtctgcacagctcacctccctgggaactgctcgcccgagcgtcggagccggcgctggccccctgcagccggaaggttgcagccgcaggagccccggaggcccaggacacagggctcttgctcttgcagaatccacaggtctttcttgaggaaatctgtagacagaactttgtgctgcgtttttatctagggaaggaacagaagagtgtcgtctcctagaaatctagcactggagaaacgaggaaaattcttccagcgatggtctcccactcagagctgaggaagcttttctactcagcagatgctgtgtgttttgatgttgacagcacggtcatcagagaagaaggaatcgatgagctagccaaaatctgtggcgttgaggacgcggtgtcagaaatgacacggcgagccatgggcggggcagtgcctttcaaagctgctctcacagagcgcttagccctcatccagccctccagggagcaggtgcagagactcatagcagagcaacccccacacctgacccccggcataagggagctggtaagtcgcctacaggagcgaaatgttcaggttttcctaatatctggtggctttaggagtattgtagagcatgttgcttcaaagctcaatatcccagcaaccaatgtatttgccaataggctgaaattctactttaacggtgaatatgcaggttttgatgagacgcagccaacagctgaatctggtggaaaaggaaaagtgattaaacttttaaaggaaaaatttcattttaagaaaataatcatgattggagatggtgccacagatatggaagcctgtcctcctgctgatgctttcattggatttggaggaaatgtgatcaggcaacaagtcaaggataacgccaaatggtatatcactgattttgtagagctgctgggagaactggaagaataacatccattgtcgtacagctccaaacaacttcagatgaatttttacaagttatacagattgatactgtttgcttacagttgcctattacaacttgctatagaaagttggtacaaatgatctgtactttaaactacagttaggaatcctagaagattgctttttttttttttttaactgtagttccagtattatatgatgactattgatttcctggagaggttttttttttttttgagacagaatcttgctctgttgcccaggctggagtgcagtggcgcggtctcggctcactgcaagctctgcctcccaggttcacgccattctcctgcctcagcctcccgagtagctgggactacaggcgcccgccaccacatccggctaattttttgtatttttagtagagacggggtttgaccgtgttagccaggatggtcttgatctcctgaccttgtgatccgcctgcctcagcctcccaaagtgctgggattacaggcttgggccaccgcgcccagccaatgtcctagagagttttgtgatctgaattctttatgtatatttgtagctatatttcatacaaagtgctttaagtgtggagagtcaattaaacacctttactcttagaaatacggattcggcagccttcagtgaatattggtttctctttggtatgtcaataaaagtttatccgtatgtcagaacggatttgtggaattttcagttctgcctcttgcatattggaatacccaatatttcaggtaccgtgttgaagcataaatagcccccaggcaagaaacaggcttaagactctactttgcttagtgctgggtacaatgtcctcaccccatgagcccactcccacttcctgaagccctgggacctggaaagtcctttttttttacttcttgggattgtcatatatgaaatgttacaaaagttttttgtttttgttttcctccaatataacaatagagtcttaaacaaaagtactgattaaaaatggatatttgggctcaggcctgtaatctcagcactgtgggaggacaagttaagaggatcacttgaggacaggaattcgagaccagcctggacaacagagcaagaccctgtctctgcaaaaaataaaaacattagctggatgtggcggcacgcacctgtagtcccagctacttggtgggctgagatgggaggatcccttgaactcagtagttcaaggctgcagtgagctgtgactctgccattgtactccagcctgggtgacagtgagaccccgtctcttaaaaaaaaaaaaaaaaaaaggattttcgaaattcacttaaggtaaaagaattaaaaacaggtttttactaattcacaagggccagcattttcccctaaatgaattaaatattaataactcctaacagcctatataaaccatttcttttttataaatgacttggaaatactcgaaagccaggttt

SEQ ID NO: 102241 - DNA, 2663 bp, Homo sapiens
cggacgcgtgggtcgacccacgcgtccgctttagaaagctgcaggactggtgcgatgggagttgagacgtaagaacctgcccgtccgtagggctctggatgctgctgaggcccgaggcccctatggcagatttgaaaattcacccttgtagagtcattcctgcctttgagcggactcccttttaagtttacagaagcacttgcagaactcatcagaagccaccccgcttatcagcagatctcaagagagcgttcggtggaggccctgggtctgcacagctcacctccctgggaactgctcgcccgagcgtcggagccggcgctggccccctgcagccggaaggttgcagccgcaggagccccggaggcccaggacacagggctcttgctcttgcagaatccacaggtctttcttgaggaaatctgtagacagaactttgtgctgcgtttttatctagggaaggaacagaagagtgtcgtctcctagaaatctagcactggagaaacgaggaaaattcttccagcgatggtctcccactcagagctgaggaagcttttctactcagcagatgctgtgtgttttgatgttgacagcacggtcatcagagaagaaggaatcgatgagctagccaaaatctgtggcgttgaggacgcggtgtcagaaatgacacggcgagccatgggcggggcagtgcctttcaaagctgctctcacagagcgcttagccctcatccagccctccagggagcaggtgcagagactcatagcagagcaacccccacacctgacccccggcataagggagctggtaagtcgcctacaggagcgaaatgttcaggttttcctaatatctggtggctttaggagtattgtagagcatgttgcttcaaagctcaatatcccagcaaccaatgtatttgccaataggctgaaattctactttaacggtgaatatgcaggttttgatgagacgcagccaacagctgaatctggtggaaaaggaaaagtgattaaacttttaaaggaaaaatttcattttaagaaaataatcatgattggagatggtgccacagatatggaagcctgtcctcctgctgatgctttcattggatttggaggaaatgtgatcaggcaacaagtcaaggataacgccaaatggtatatcactgattttgtagagctgctgggagaactggaagaataacatccattgtcgtacagctccaaacaacttcagatgaatttttacaagttatacagattgatactgtttgcttacagttgcctattacaacttgctatagaaagttggtacaaatgatctgtactttaaactacagttaggaatcctagaagattgctttttttttttttttaactgtagttccagtattatatgatgactattgatttcctggagaggttttttttttttttgagacagaatcttgctctgttgcccaggctggagtgcagtggcgcggtctcggctcactgcaagctctgcctcccaggttcacgccattctcctgcctcagcctcccgagtagctgggactacaggcgcccgccaccacatccggctaattttttgtatttttagtagagacggggtttgaccgtgttagccaggatggtcttgatctcctgaccttgtgatccgcctgcctcagcctcccaaagtgctgggattacaggcttgggccaccgcgcccagccaatgtcctagagagttttgtgatctgaattctttatgtatatttgtagctatatttcatacaaagtgctttaagtgtggagagtcaattaaacacctttactcttagaaatacggattcggcagccttcagtgaatattggtttctctttggtatgtcaataaaagtttatccgtatgtcagaacggatttgtggaattttcagttctgcctcttgcatattggaatacccaatatttcaggtaccgtgttgaagcataaatagcccccaggcaagaaacaggcttaagactctactttgcttagtgctgggtacaatgtcctcaccccatgagcccactcccacttcctgaagccctgggacctggaaagtcctttttttttacttcttgggattgtcatatatgaaatgttacaaaagttttttgtttttgttttcctccaatataacaatagagtcttaaacaaaagtactgattaaaaatggatatttgggctcaggcctgtaatctcagcactgtgggaggacaagttaagaggatcacttgaggacaggaattcgagaccagcctggacaacagagcaagaccctgtctctgcaaaaaataaaaacattagctggatgtggcggcacgcacctgtagtcccagctacttggtgggctgagatgggaggatcccttgaactcagtagttcaaggctgcagtgagctgtgactctgccattgtactccagcctgggtgacagtgagaccccgtctcttaaaaaaaaaaaaaaaaaaaggattttcgaaattcacttaaggtaaaagaattaaaaacaggtttttactaattcacaagggccagcattttcccctaaatgaattaaatattaataactcctaacagcctatataaaccatttcttttttataaatgacttggaaatactcgaaagccaggttt

SEQ ID NO: 102242 - DNA, 3006 bp, Homo sapiens
cccggcattccgtgctccttggttccggcgttggagctctttggggcccagctttgcggacccgggagctcgggacgcaggcggggcttgtgctccgcgggggcagggcgtagggtgggcctcctacctcccctgatctcgcggtttgttccgtttcattggagcttcccggaccgtgtgctcgacggtgccctaggtgccgtggggccacacgcgagtctgataagcaccctcccccggaatcatgcggtgctgtgaggcctagcgaagatgaagatagaatgcaaggtagaaagtgctggatacctttagaaagctgcaggactggtgcgatgggagttgagacgtaagaacctgcccgtccgtagggctctggatgctgctgaggcccgaggcccctatggcagatttgaaaattcacccttgtagagtcattcctgcctttgagcggactcccttttaagagatctcaagagagcgttcggtggaggccctgggtctgcacagctcacctccctgggaactgctcgcccgagcgtcggagccggcgctggccccctgcagccggaaggttgcagccgcaggagccccggaggcccaggacacaggacagagtctcgttctgtcgcccaggctggagtgcagtggtgtgatctcggctcacttcaacctccgcctacagggttcaagggattctcctgcctcagcctcctgagtatctgggctcttgctcttgcagaatccacaggtctttcttgaggaaatctgtagacagaactttgtgctgcgtttttatctagggaaggaacagaagagtgtcgtctcctagaaatctagcactggagaaacgaggaaaattcttccagcgatggtctcccactcagagctgaggaagcttttctactcagcagatgctgtgtgttttgatgttgacagcacggtcatcagagaagaaggaatcgatgagctagccaaaatctgtggcgttgaggacgcggtgtcagaaatgacacggcgagccatgggcggggcagtgcctttcaaagctgctctcacagagcgcttagccctcatccagccctccagggagcaggtgcagagactcatagcagagcaacccccacacctgacccccggcataagggagctggtaagtcgcctacaggagcgaaatgttcaggttttcctaatatctggtggctttaggagtattgtagagcatgttgcttcaaagctcaatatcccagcaaccaatgtatttgccaataggctgaaattctactttaacggtgaatatgcaggttttgatgagacgcagccaacagctgaatctggtggaaaaggaaaagtgattaaacttttaaaggaaaaatttcattttaagaaaataatcatgattggagatggtgccacagatatggaagcctgtcctcctgctgatgctttcattggatttggaggaaatgtgatcaggcaacaagtcaaggataacgccaaatggtatatcactgattttgtagagctgctgggagaactggaagaataacatccattgtcgtacagctccaaacaacttcagatgaatttttacaagttatacagattgatactgtttgcttacagttgcctattacaacttgctatagaaagttggtacaaatgatctgtactttaaactacagttaggaatcctagaagattgctttttttttttttttaactgtagttccagtattatatgatgactattgatttcctggagaggttttttttttttttgagacagaatcttgctctgttgcccaggctggagtgcagtggcgcggtctcggctcactgcaagctctgcctcccaggttcacgccattctcctgcctcagcctcccgagtagctgggactacaggcgcccgccaccacatccggctaattttttgtatttttagtagagacggggtttgaccgtgttagccaggatggtcttgatctcctgaccttgtgatccgcctgcctcagcctcccaaagtgctgggattacaggcttgggccaccgcgcccagccaatgtcctagagagttttgtgatctgaattctttatgtatatttgtagctatatttcatacaaagtgctttaagtgtggagagtcaattaaacacctttactcttagaaatacggattcggcagccttcagtgaatattggtttctctttggtatgtcaataaaagtttatccgtatgtcagaacggatttgtggaattttcagttctgcctcttgcatattggaatacccaatatttcaggtaccgtgttgaagcataaatagcccccaggcaagaaacaggcttaagactctactttgcttagtgctgggtacaatgtcctcaccccatgagcccactcccacttcctgaagccctgggacctggaaagtcctttttttttacttcttgggattgtcatatatgaaatgttacaaaagttttttgtttttgttttcctccaatataacaatagagtcttaaacaaaagtactgattaaaaatggatatttgggctcaggcctgtaatctcagcactgtgggaggacaagttaagaggatcacttgaggacaggaattcgagaccagcctggacaacagagcaagaccctgtctctgcaaaaaataaaaacattagctggatgtggcggcacgcacctgtagtcccagctacttggtgggctgagatgggaggatcccttgaactcagtagttcaaggctgcagtgagctgtgactctgccattgtactccagcctgggtgacagtgagaccccgtctcttaaaaaaaaaaaaaaaaaaaggattttcgaaattcacttaaggtaaaagaattaaaaacaggtttttactaattcacaagggccagcattttcccctaaatgaattaaatattaataactcctaacagcctatataaaccatttcttttttataaatgacttggaaatactcgaaagccaggttt

SEQ ID NO: 102243 - DNA, 2870 bp, Homo sapiens
cccggcattccgtgctccttggttccggcgttggagctctttggggcccagctttgcggacccgggagctcgggacgcaggcggggcttgtgctccgcgggggcagggcgtagggtgggcctcctacctcccctgatctcgcggtttgttccgtttcattggagcttcccggaccgtgtgctcgacggtgccctaggtgccgtggggccacacgcgagtctgataagcaccctcccccggaatcatgcggtgctgtgaggcctagcgaagatgaagatagaatgcaaggtagaaagtgctggatacctttagaaagctgcaggactggtgcgatgggagttgagacgtaagaacctgcccgtccgtagggctctggatgctgctgaggcccgaggcccctatggcagatttgaaaattcacccttgtagagtcattcctgcctttgagcggactcccttttaagtttacagaagcacttgcagaactcatcagaagccaccccgcttatcagcagatctcaagagagcgttcggtggaggccctgggtctgcacagctcacctccctgggaactgctcgcccgagcgtcggagccggcgctggccccctgcagccggaaggttgcagccgcaggagccccggaggcccaggacacaggatctagggaaggaacagaagagtgtcgtctcctagaaatctagcactggagaaacgaggaaaattcttccagcgatggtctcccactcagagctgaggaagcttttctactcagcagatgctgtgtgttttgatgttgacagcacggtcatcagagaagaaggaatcgatgagctagccaaaatctgtggcgttgaggacgcggtgtcagaaatgacacggcgagccatgggcggggcagtgcctttcaaagctgctctcacagagcgcttagccctcatccagccctccagggagcaggtgcagagactcatagcagagcaacccccacacctgacccccggcataagggagctggtaagtcgcctacaggagcgaaatgttcaggttttcctaatatctggtggctttaggagtattgtagagcatgttgcttcaaagctcaatatcccagcaaccaatgtatttgccaataggctgaaattctactttaacggtgaatatgcaggttttgatgagacgcagccaacagctgaatctggtggaaaaggaaaagtgattaaacttttaaaggaaaaatttcattttaagaaaataatcatgattggagatggtgccacagatatggaagcctgtcctcctgctgatgctttcattggatttggaggaaatgtgatcaggcaacaagtcaaggataacgccaaatggtatatcactgattttgtagagctgctgggagaactggaagaataacatccattgtcgtacagctccaaacaacttcagatgaatttttacaagttatacagattgatactgtttgcttacagttgcctattacaacttgctatagaaagttggtacaaatgatctgtactttaaactacagttaggaatcctagaagattgctttttttttttttttaactgtagttccagtattatatgatgactattgatttcctggagaggttttttttttttttgagacagaatcttgctctgttgcccaggctggagtgcagtggcgcggtctcggctcactgcaagctctgcctcccaggttcacgccattctcctgcctcagcctcccgagtagctgggactacaggcgcccgccaccacatccggctaattttttgtatttttagtagagacggggtttgaccgtgttagccaggatggtcttgatctcctgaccttgtgatccgcctgcctcagcctcccaaagtgctgggattacaggcttgggccaccgcgcccagccaatgtcctagagagttttgtgatctgaattctttatgtatatttgtagctatatttcatacaaagtgctttaagtgtggagagtcaattaaacacctttactcttagaaatacggattcggcagccttcagtgaatattggtttctctttggtatgtcaataaaagtttatccgtatgtcagaacggatttgtggaattttcagttctgcctcttgcatattggaatacccaatatttcaggtaccgtgttgaagcataaatagcccccaggcaagaaacaggcttaagactctactttgcttagtgctgggtacaatgtcctcaccccatgagcccactcccacttcctgaagccctgggacctggaaagtcctttttttttacttcttgggattgtcatatatgaaatgttacaaaagttttttgtttttgttttcctccaatataacaatagagtcttaaacaaaagtactgattaaaaatggatatttgggctcaggcctgtaatctcagcactgtgggaggacaagttaagaggatcacttgaggacaggaattcgagaccagcctggacaacagagcaagaccctgtctctgcaaaaaataaaaacattagctggatgtggcggcacgcacctgtagtcccagctacttggtgggctgagatgggaggatcccttgaactcagtagttcaaggctgcagtgagctgtgactctgccattgtactccagcctgggtgacagtgagaccccgtctcttaaaaaaaaaaaaaaaaaaaggattttcgaaattcacttaaggtaaaagaattaaaaacaggtttttactaattcacaagggccagcattttcccctaaatgaattaaatattaataactcctaacagcctatataaaccatttcttttttataaatgacttggaaatactcgaaagccaggttt

SEQ ID NO: 102244 - DNA, 2071 bp, Homo sapiens
cggacgcgtgggtcgacccacgcgtccgtgagctagccaaaatctgtggcgttgaggacgcggtgtcagaaatgacacggcgagccatgggcggggcagtgcctttcaaagctgctctcacagagcgcttagccctcatccagccctccagggagcaggtgcagagactcatagcagagcaacccccacacctgacccccggcataagggagctggtaagtcgcctacaggagcgaaatgttcaggttttcctaatatctggtggctttaggagtattgtagagcatgttgcttcaaagctcaatatcccagcaaccaatgtatttgccaataggctgaaattctactttaacggtgaatatgcaggttttgatgagacgcagccaacagctgaatctggtggaaaaggaaaagtgattaaacttttaaaggaaaaatttcattttaagaaaataatcatgattggagatggtgccacagatatggaagcctgtcctcctgctgatgctttcattggatttggaggaaatgtgatcaggcaacaagtcaaggataacgccaaatggtatatcactgattttgtagagctgctgggagaactggaagaataacatccattgtcgtacagctccaaacaacttcagatgaatttttacaagttatacagattgatactgtttgcttacagttgcctattacaacttgctatagaaagttggtacaaatgatctgtactttaaactacagttaggaatcctagaagattgctttttttttttttttaactgtagttccagtattatatgatgactattgatttcctggagaggttttttttttttttgagacagaatcttgctctgttgcccaggctggagtgcagtggcgcggtctcggctcactgcaagctctgcctcccaggttcacgccattctcctgcctcagcctcccgagtagctgggactacaggcgcccgccaccacatccggctaattttttgtatttttagtagagacggggtttgaccgtgttagccaggatggtcttgatctcctgaccttgtgatccgcctgcctcagcctcccaaagtgctgggattacaggcttgggccaccgcgcccagccaatgtcctagagagttttgtgatctgaattctttatgtatatttgtagctatatttcatacaaagtgctttaagtgtggagagtcaattaaacacctttactcttagaaatacggattcggcagccttcagtgaatattggtttctctttggtatgtcaataaaagtttatccgtatgtcagaacggatttgtggaattttcagttctgcctcttgcatattggaatacccaatatttcaggtaccgtgttgaagcataaatagcccccaggcaagaaacaggcttaagactctactttgcttagtgctgggtacaatgtcctcaccccatgagcccactcccacttcctgaagccctgggacctggaaagtcctttttttttacttcttgggattgtcatatatgaaatgttacaaaagttttttgtttttgttttcctccaatataacaatagagtcttaaacaaaagtactgattaaaaatggatatttgggctcaggcctgtaatctcagcactgtgggaggacaagttaagaggatcacttgaggacaggaattcgagaccagcctggacaacagagcaagaccctgtctctgcaaaaaataaaaacattagctggatgtggcggcacgcacctgtagtcccagctacttggtgggctgagatgggaggatcccttgaactcagtagttcaaggctgcagtgagctgtgactctgccattgtactccagcctgggtgacagtgagaccccgtctcttaaaaaaaaaaaaaaaaaaaggattttcgaaattcacttaaggtaaaagaattaaaaacaggtttttactaattcacaagggccagcattttcccctaaatgaattaaatattaataactcctaacagcctatataaaccatttcttttttataaatgacttggaaatactcgaaagccaggttt

SEQ ID NO: 102245 - DNA, 2751 bp, Homo sapiens
cccggcattccgtgctccttggttccggcgttggagctctttggggcccagctttgcggacccgggagctcgggacgcaggcggggcttgtgctccgcgggggcagggcgtagggtgggcctcctacctcccctgatctcgcggtttgttccgtttcattggagcttcccggaccgtgtgctcgacggtgccctaggtgccgtggggccacacgcgagtctgataagcaccctcccccggaatcatgcggtgctgtgaggcctagcgaagatgaagatagaatgcaaggtagaaagtgctggatacctttagaaagctgcaggactggtgcgatgggagttgagacgtaagaacctgcccgtccgtagggctctggatgctgctgaggcccgaggcccctatggcagatttgaaaattcacccttgtagagtcattcctgcctttgagcggactcccttttaagtttacagaagcacttgcagaactcatcagaagccaccccgcttatcagcagatctcaagagagcgttcggtggaggccctgggtctgcacagctcacctccctgggaactgctcgcccgagcgtcggagccggcgctggccccctgcagccggaaggttgcagccgcaggagccccggaggcccaggacacagggctcttgctcttgcagaatccacaggtctttcttgaggaaatctgtagacagaactttgtgctgcgtttttgaggaaaattcttccagcgatggtctcccactcagagctgaggaagcttttctactcagcagatgctgtgtgttttgatgttgacagcacggtcatcagagaagaaggaatcgatgagctagccaaaatctgtggcgttgaggacgcggtgtcagaaatggagctggtaagtcgcctacaggagcgaaatgttcaggttttcctaatatctggtggctttaggagtattgtagagcatgttgcttcaaagctcaatatcccagcaaccaatgtatttgccaataggctgaaattctactttaacggtgaatatgcaggttttgatgagacgcagccaacagctgaatctggtggaaaaggaaaagtgattaaacttttaaaggaaaaatttcattttaagaaaataatcatgattggagatggtgccacagatatggaagcctgtcctcctgctgatgctttcattggatttggaggaaatgtgatcaggcaacaagtcaaggataacgccaaatggtatatcactgattttgtagagctgctgggagaactggaagaataacatccattgtcgtacagctccaaacaacttcagatgaatttttacaagttatacagattgatactgtttgcttacagttgcctattacaacttgctatagaaagttggtacaaatgatctgtactttaaactacagttaggaatcctagaagattgctttttttttttttttaactgtagttccagtattatatgatgactattgatttcctggagaggttttttttttttttgagacagaatcttgctctgttgcccaggctggagtgcagtggcgcggtctcggctcactgcaagctctgcctcccaggttcacgccattctcctgcctcagcctcccgagtagctgggactacaggcgcccgccaccacatccggctaattttttgtatttttagtagagacggggtttgaccgtgttagccaggatggtcttgatctcctgaccttgtgatccgcctgcctcagcctcccaaagtgctgggattacaggcttgggccaccgcgcccagccaatgtcctagagagttttgtgatctgaattctttatgtatatttgtagctatatttcatacaaagtgctttaagtgtggagagtcaattaaacacctttactcttagaaatacggattcggcagccttcagtgaatattggtttctctttggtatgtcaataaaagtttatccgtatgtcagaacggatttgtggaattttcagttctgcctcttgcatattggaatacccaatatttcaggtaccgtgttgaagcataaatagcccccaggcaagaaacaggcttaagactctactttgcttagtgctgggtacaatgtcctcaccccatgagcccactcccacttcctgaagccctgggacctggaaagtcctttttttttacttcttgggattgtcatatatgaaatgttacaaaagttttttgtttttgttttcctccaatataacaatagagtcttaaacaaaagtactgattaaaaatggatatttgggctcaggcctgtaatctcagcactgtgggaggacaagttaagaggatcacttgaggacaggaattcgagaccagcctggacaacagagcaagaccctgtctctgcaaaaaataaaaacattagctggatgtggcggcacgcacctgtagtcccagctacttggtgggctgagatgggaggatcccttgaactcagtagttcaaggctgcagtgagctgtgactctgccattgtactccagcctgggtgacagtgagaccccgtctcttaaaaaaaaaaaaaaaaaaaggattttcgaaattcacttaaggtaaaagaattaaaaacaggtttttactaattcacaagggccagcattttcccctaaatgaattaaatattaataactcctaacagcctatataaaccatttcttttttataaatgacttggaaatactcgaaagccaggttt
